(19) United States
(12) Patent Application Publication
(10) Pub. No.: US 2008/0305493 A1
(43) Pub. Date: Dec. 11, 2008

(54) Determining Cancer-Linked Genes and Therapeutic Targets Using Molecular Cytogenetic Methods

(75) Inventors: Jeffrey W. Strovel, Laurel, MD (US); Colyn B. Cain, Bethesda, MD (US); Stephen K. Horrigan, Poolesville, MD (US); Meena Augustus, Gaithersburg, MD (US)

Correspondence Address: CARELLA, BYRNE, BAIN, GILFILLAN, CECCHI,;STEWART & OLSTEIN, 5 BECKER FARM ROAD, ROSELAND, NJ, 07068, US

(73) Assignee: AVALON PHARMACEUTICALS, Germantown, MD (US)

(21) Appl. No.: 10/591,049

(22) PCT Filed: Mar. 8, 2005
(86) PCT No.: PCT/US2005/007748

§ 371 Date: May 5, 2008

Related U.S. Application Data
(60) Provisional application No. 60/550,304, filed on Mar. 8, 2004.

(51) Int. Cl. G01N 33/53; C12Q 1/68; C12Q 1/02; C12N 5/06; G01N 33/566

(52) U.S. Cl. 435/7.1; 435/6; 436/501; 435/29; 435/375

(57) ABSTRACT

Methods for identifying antineoplastic agents by using their ability to modify expression of specific genes or the biological activity of polypeptides encoded by such genes, wherein said genes are located in specific chromosomal regions, called amplicons, or regions of interest, and the presence of such amplified regions within a cancerous cell, are disclosed. Also described are methods for diagnosing cancerous, or potentially cancerous, conditions using these methods. Also encompassed are methods involving determining the modulated expression of the genes in these regions of interest (ROIs), or amplicons, as pharmacodynamic/pharmacogenetic/surrogate markers and/or for patient profiling prior to accrual for clinical trials/treatments based on the identification of these genes as validated gene/drug targets in various cancer tissue types.

[0001] This application claims priority of U.S. Provisional Application Ser. No. 60/550,304, filed 8 Mar. 2004, the disclosure of which is hereby incorporated by reference in its entirety.

### FIELD OF THE INVENTION

[0002] The present invention relates to Identification of amplifications/gains of genomic segments of DNA within human chromosomes in diseased states, such as cancer, that are demarcated and limited within specific chromosomal bands and defined herein as “amplicons” and whose disruption and/or change in expression is useful to distinguish cancerous from non-cancerous tissue and serve as potential therapeutic targets, pharmacodynamic/pharmacogenetic/surrogate and prognostic and diagnostic markers.

### BACKGROUND OF THE INVENTION

[0003] Malignant tumors are a leading cause of death in the United States and one in four Americans is likely to die of cancer. This disease is often characterized by an increase in the number of abnormal, neoplastic cells that are ultimately derived from a normal tissue after which the cells proliferate to form a tumor, which can then metastasize (spreading into adjacent tissues or traveling elsewhere in the body via the bloodstream or lymphatic system).

[0004] The genomes of various well-studied tumors carry several different independently altered genes, including activated oncogenes and inactivated tumor suppressor genes. Chromosomal abnormalities have been identified in most cancer cells. Conventional chromosome banding techniques allow for the detection of specific chromosomal defects in tumor cells but interpretation of the banding pattern is sometimes difficult, particularly when complex chromosomal rearrangements or subtle abnormalities are present. In recent years, new techniques, such as CGH and SKY, based on fluorescent in situ hybridization (FISH) (Pinkel et al., Proc Nat Acad Sci USA 85:9138-42 (1988)) have been developed to overcome the limitations of conventional chromosome banding. CGH measures intensities of fluorescently labeled tumor DNA and normal DNA following hybridization to normal chromosomes (Kallioniemi et al., Science 258:818-21 (1992)). Gain or loss of copy number of a particular chromosome or chromosome region in the tumor DNA is determined by the relative intensity of a fluorescence ratio. SKY utilizes a cocktail of chromosome probes, fluorescently labeled to specify each chromosome, which is hybridized to tumor chromosomes in an effort to identify numerical and structural abnormalities in the tumor cell (Schröck et al., Science 273:494-7 (1996)). CGH and SKY have been used to identify chromosomal regions that harbor genes significant to the process of tumor initiation or progression.

[0005] The identification of amplifications of genomic DNA within well defined and demarcated limits on human chromosomes is done at a resolution of human chromosome banding limited to 400-550 bands by the technique of Comparative Genomic Hybridization (CGH). The present invention applies custom protocols to obtain human template chromosomes that are resolved to 850 to 1000 band resolution of human chromosomes (ISCN, 1985), to perform CGH on a large number of cell lines/tissue samples/tumor cells. This allows the identification of regions of genomic DNA amplifications ranging from 2-5 Mbp at the highest limits of resolution of human chromosomes, detected by fluorescent intensity evaluations performed at the microscope. Amplicons, or regions of interest, from 10-20 Mb and more are also defined by these methods. These amplicons contain a gene, or genes, that are amplified (meaning copy number gains), and/or differentially expressed in the tissue/cells of origin. Genes identified as being amplified and/or over-expressed provide targets for intervention with a small molecular therapeutic, antibodies, anti-sense or other therapeutic modalities. A gene or genes within these regions could also be used for diagnostic or prognostic molecular pathology characterization and useful as pharmacodynamic biomarkers for drug response profiling and patient sub-set selection and stratification.

### BRIEF SUMMARY OF THE INVENTION

[0006] In one aspect the present invention relates to a set of genes that have been localized within human chromosomal regions of interest (ROI) that have been identified by molecular cytogenetic techniques. In particular, the present invention relates to chromosomal regions of interest, or amplicons, that are summarized in Table 1 and containing genes corresponding to cDNA sequences shown in the sequence listing described herein.

[0007] In another aspect, the present invention relates to a method for diagnosing the presence of a cancerous condition, or diagnosing a predisposition to developing a cancerous condition, in an animal, especially a human being, by determining the amplification and/or over-expression, of one or more genes corresponding to SEQ ID NO: 1-3049 in a cell, or tissue sample, obtained from an animal. The animal may be afflicted with, or at risk of developing, such a cancerous condition, or otherwise predisposed to develop such a condition.

[0008] In a further aspect, the present invention relates to a method for the treatment of a cancerous condition, especially one involving breast, colon, lung, cervix, kidney, pancreas and prostate tissues, utilizing selected chemical agents having anti-tumor activity as identified using one of the assays disclosed herein.

[0009] Thus, in one aspect the present invention relates to a method for identifying an antineoplastic agent, comprising:

[0010] (a) contacting a test compound with a cell that expresses at least one gene corresponding to a polynucleotide comprising a nucleotide sequence of SEQ ID NO: 1-3049 and under conditions promoting expression of said gene; and

[0011] (b) determining a change in expression of said gene as a result of said contacting

[0012] wherein a change in expression indicates gene modulation thereby identifying said test compound as a gene modulating agent. In a preferred embodiment thereof, the change in expression is a decrease in expression.

[0013] In a further aspect, the present invention relates to a method for identifying a compound as an anti-neoplastic agent, comprising:

[0014] (a) contacting a test compound with a polypeptide encoded by a gene selected from SEQ ID NO: 1-3049,

[0015] (b) determining a change in a biological activity of said polypeptide due to said contacting,

[0016] wherein a change in activity indicates anti-neoplastic activity and thereby identifies such test compound as an agent having antineoplastic activity.

[0017] Preferably, the change in biological activity is a decrease in biological activity. Also preferred is where the biological activity is an enzyme activity, most preferably involving an enzyme selected from kinase, protease, peptidase, phosphodiesterase, phosphatase, dehydrogenase, reductase, carboxylase, transferase, deacetylase and polymerase. Also preferred is a biological activity that is a membrane transport activity, an integrin, a Cytochrome P450 enzyme, a nuclear hormone receptor, or a receptor activity, such as a G-protein-coupled receptor. In other preferred embodiments, the polypeptide is contained in a cell.

[0018] The present invention also relates to a method for treating cancer comprising contacting a cancerous cell with an agent first identified as having gene modulating activity using any of the methods of the invention and in an amount effective to cause a reduction in cancerous activity of said cell. In a preferred embodiment, said cancerous cell is contacted in vivo, as where the agent is administered to a mammal, especially a human being, afflicted with cancer and in an amount sufficient to ameliorate the cancer.

[0019] The present invention further relates to a method for treating cancer comprising contacting a cancerous cell with an agent having affinity for an expression product of a gene corresponding to a polynucleotide comprising a nucleotide sequence of SEQ ID NO: 1-3049 and in an amount effective to cause a reduction in cancerous activity of said cell. Preferably, the expression product is a polypeptide and the agent is an antibody.

[0020] The present invention also relates to a method for monitoring the progress of cancer therapy in a patient comprising monitoring in a patient undergoing cancer therapy the expression of a gene corresponding to a polypeptide having a sequence selected from SEQ ID NO: 1-3049, preferably wherein the gene comprises a sequence of SEQ ID NO: 1-3049, such as where the cancer therapy is chemotherapy.

[0021] In a further embodiment, the present invention relates to a method for determining the likelihood of success of cancer therapy in a patient, comprising monitoring in a patient undergoing cancer therapy the expression of a gene corresponding to a polynucleotide having a sequence of one or SEQ ID NO: 1-3049 wherein a decrease in said expression prior to completion of said cancer therapy is indicative of a likelihood of success of said cancer therapy, preferably wherein the gene comprises a sequence of SEQ ID NO: 1-3049 and wherein the cancer therapy is chemotherapy.

[0022] The present invention still further relates to a method for determining the progress of a treatment for cancer in a patient afflicted therewith, following commencement of a cancer treatment on said patient, comprising:

[0023] (a) determining in said patient a change in expression of one or more genes corresponding to a polynucleotide comprising a nucleotide sequence of SEQ ID NO: 1-3049; and

[0024] (b) determining a change in expression of said gene compared to expression of said one or more determined genes prior to commencement of said cancer treatment;

[0025] wherein said change in expression indicates progress of said treatment thereby determining the progress of said treatment. Preferred embodiments include where the change in expression is a decrease in expression and said decrease indicates success of said treatment.

### DEFINITIONS

[0026] As used herein, the following terms have the indicated definition unless expressly stated otherwise.

[0027] The term “amplicon” refers to regions of interest, i.e., genomic segments of DNA within human chromosomes in diseased states like cancer that are demarcated and limited within specific chromosomal bands. Since these amplicons contain sequences of a gene/or genes that are amplified (copy number gains), and/or differentially expressed in the tissue/cells of origin, a listing of these genes within the amplicons detected are listed in Table 3. Genes identified as being amplified and/or over-expressed within the amplicons provide a useful target for intervention with small/large molecule/protein/antibody therapeutics, anti-sense or other therapeutic modalities. A gene or genes within these regions is also useful for diagnostic or prognostic molecular pathology characterization/companion diagnostics, and useful as pharmacodynamic biomarkers for drug response profiling and patient sub-set selection and stratification.

[0028] The term “percent identity” or “percent identical,” when referring to a sequence, means that a sequence is compared to a claimed or described sequence after alignment of the sequence to be compared (the “Compared Sequence”) with the described or claimed sequence (the “Reference Sequence”). The Percent Identity is then determined according to the following formula:

Percent Identity=100 [1−(C/R)]

wherein C is the number of differences between the Reference Sequence and the Compared Sequence over the length of alignment between the Reference Sequence and the Compared Sequence wherein (i) each base or amino acid in the Reference Sequence that does not have a corresponding aligned base or amino acid in the Compared Sequence and (ii) each gap in the Reference Sequence and (iii) each aligned base or amino acid in the Reference Sequence that is different from an aligned base or amino acid in the Compared Sequence, constitutes a difference; and R is the number of bases or amino acids in the Reference Sequence over the length of the alignment with the Compared Sequence with any gap created in the Reference Sequence also being counted as a base or amino acid.

[0029] If an alignment exists between the Compared Sequence and the Reference Sequence for which the percent identity as calculated above is about equal to or greater than a specified minimum Percent Identity then the Compared Sequence has the specified minimum percent identity to the Reference Sequence even though alignments may exist in which the hereinabove calculated Percent Identity is less than the specified Percent Identity.

[0030] As used herein, the terms “portion,” “segment,” and “fragment,” when used in relation to polypeptides, refer to a continuous sequence of residues, such as amino acid residues, which sequence forms a subset of a larger sequence. For example, if a polypeptide were subjected to treatment with any of the common endopeptidases, such as trypsin or chymotrypsin, the oligopeptides resulting from such treatment would represent portions, segments or fragments of the starting polypeptide. When used in relation to a polynucleotide, such terms refer to the products produced by treatment of said polynucleotides with any of the common endonucleases, or any stretch of polynucleotides that could be synthetically synthesized.

[0031] As used herein, the term “DNA segment” or “DNA sequence” refers to a DNA polymer, in the form of a separate fragment or as a component of a larger DNA construct, which has been derived from DNA, and may include both single stranded and duplex sequences. Such segments are provided in the form of an open reading frame uninterrupted by internal non-translated sequences, or introns, which are typically present in eukaryotic genes.

[0032] The term “coding region” refers to that portion of a gene which either naturally or normally codes for the expression product of that gene in its natural genomic environment, i.e., the region coding in vivo for the native expression product of the gene.

[0033] The term “nucleotide sequence” refers to a heteropolymer of deoxyribonucleotides. Generally, DNA segments encoding the proteins provided by this invention are assembled from cDNA fragments and short oligonucleotide linkers, or from a series of oligonucleotides, to provide a synthetic gene which is capable of being expressed in a recombinant transcriptional unit comprising regulatory elements derived from a microbial or viral operon.

[0034] The term “expression product” means that polypeptide or protein that is the natural translation product of the gene and any nucleic acid sequence coding equivalents resulting from genetic code degeneracy and thus coding for the same amino acid(s).

[0035] The term “fragment,” when referring to a coding sequence, means a portion of DNA comprising less than the complete coding region whose expression product retains essentially the same biological function or activity as the expression product of the complete coding region.

### DETAILED SUMMARY OF THE INVENTION

[0036] The present invention relates to a set of genes that are amplified and/or over-expressed genes in cancer cell lines and have been localized to various chromosomal regions of interest. These genes have been identified through a combination of CGH, SKY, expression analysis and Reverse Transcriptase-Polymerase Chain Reaction (RT-PCR). Such genes are both markers and potential therapeutic targets for cancer, in particular breast; colon, lung and prostate malignancies. In addition, the amplified nature of such genes provides a means of diagnosing a cancerous condition, or predisposition to a cancerous conditions, by determining the amplification of one or more of such genes in a patient afflicted with, or predisposed toward, or otherwise at risk of developing, cancer.

[0037] In one aspect the present invention relates to a set of genes that have been localized within human chromosomal regions of interest (ROI) that have been identified by molecular cytogenetic techniques. In particular, the present invention relates to chromosomal regions of interest, or amplicons, that are summarized in Table 1. Table 2 lists tissues where the amplicons are found, cell lines expressing them, the amplification ratios found in those tissues for cancer versus normal cells, amplicon size and the chromosomal locations of the amplicons. Table 3 lists the chromosomal locations and accession number identifications of these regions of interest and which serve to correlate amplicons with the cDNA sequences of SEQ ID NO: 1-3049.

TABLE 1
List of Amplicons

| AMPLICON | CHR | BPSTART | BPEND | BPLENGTH |
|---|---|---|---|---|
| A1 | 8 | 122000000 | 127500000 | 5500000 |
| A2 | 13 | 96500000 | 100000000 | 3500000 |
| A3 | 5 | 175000000 | 181500000 | 6500000 |
| A4 | 13 | 26500000 | 34000000 | 7500000 |
| A5 | 7 | 101000000 | 106000000 | 5000000 |
| A6 | 10 | 73500000 | 82500000 | 9000000 |
| A7 | 7 | 71000000 | 77500000 | 6500000 |
| A8 | 1 | 116500000 | 120000000 | 3500000 |
| A9 | 6 | 36000000 | 41000000 | 5000000 |
| A10 | 18 | 70500000 | 76500000 | 6000000 |
| A11 | 9 | 9000000 | 18500000 | 9500000 |

[0038] For Table 1, CHR means chromosome number, BPLENGTH represents the number of nucleotides in the amplicon. BPSTART refers to “base pair start point” and BPEND refers to “base pair end point” along the chromosome based on the July 2003 human reference sequence UCSC version hg16 (NCBI Build 34).

TABLE 2
Amplicon Locations

| | | | | | band | | amplicon |
|---|---|---|---|---|---|---|---|
| cell line | Amp # | tissue | chrom | band start | stop | Ratio | size_MB |
| HCC1954 | A1 | Breast | 8 | q24.13 | q24.13 | 14 | 5.3 |
| NCI_H446 | A1 | scLung | 8 | q24.13 | q24.21 | 8 | 8.3 |
| NCI_H827 | A1 | scLung | 8 | q24.13 | q24.21 | 6 | 8.3 |
| HCC202 | A1 | Breast | 8 | q24.13 | q24.21 | 6 | 8.3 |
| NCI_H82 | A1 | scLung | 8 | q24.13 | q24.13 | 7 | 5.3 |
| NCI_H23 | A1 | nscLung | 8 | q24.13 | q24.13 | 7 | 5.3 |
| MDA_MB436 | A2 | Breast | 13 | q32.2 | q32.3 | 6 | 5.3 |
| NCI_H1963 | A2 | scLung | 13 | q32.3 | q32.3 | 6 | 3.3 |
| EFM192A | A2 | Breast | 13 | q32.3 | q34 | 8 | 18.8 |
| MDA_MB157 | A2 | Breast | 13 | q32.3 | q34 | 5 | 18.8 |
| HCC1937 | A2 | Breast | 13 | q32.3 | q32.3 | 4 | 3.3 |
| SKBR3 | A2 | Breast | 13 | q32.3 | q32.3 | 4 | 18.8 |
| NCI_H1963 | A2 | nscLung | 13 | q32.3 | q32.3 | 6 | 3.3 |
| HCC1954 | A3 | Breast | 5 | q35.3 | q35.3 | 4 | 4.3 |
| MDA_MB436 | A3 | Breast | 5 | q35.1 | q35.3 | 7 | 14 |
| BT20 | A4 | Breast | 5 | q35.1 | q35.3 | 4 | 14 |
| KPL1 | A5 | Breast | 5 | q35.1 | q35.3 | 4 | 14 |
| HCC3153 | A6 | Breast | 5 | q35.3 | q35.3 | 3 | 4.3 |
| HT29 | A4 | Colon | 13 | q12.3 | q13.2 | 5 | 9 |
| SW403 | A4 | Colon | 13 | q21.1 | q21.2 | 15 | 6 |
| BT20 | A4 | Breast | 13 | q12.3 | q13.2 | 4 | 9 |
| CPDR9 | A4 | Prostate | 13 | q12.2 | q12.3 | 2 | 7.1 |
| SW480 | A5 | Colon | 7 | q22.2 | q22.2 | 9 | 1 |
| X71 | A5 | Colon | 7 | q22.1 | q22.2 | 5 | 7.2 |
| X72 | A5 | Colon | 7 | q22.3 | q22.3 | 6 | 3.3 |
| Lovo | A6 | Colon | 7 | q22.1 | q22.2 | 5 | 7.2 |
| X1819_1 | A7 | Colon | 7 | q22.1 | q22.2 | 5 | 7.2 |
| EFM19 | A6 | Breast | 10 | q22.1 | q22.3 | 6 | 15.3 |
| PC3 | A6 | Prostate | 10 | q22.2 | q22.3 | 7 | 8.3 |
| MDA_MB436 | A6 | Breast | 10 | q22.1 | q22.2 | 3 | 10.7 |
| SKBR3 | A6 | Breast | 10 | q22.2 | q22.3 | 4 | 8.3 |
| SW48 | A6 | Colon | 10 | q22.1 | q22.3 | 4 | 15.3 |
| X71 | A6 | Colon | 10 | q22.2 | q22.3 | 2 | 8.3 |
| SKBR3 | A7 | Breast | 7 | q11.23 | q11.23 | 5 | 4 |
| X72 | A7 | Colon | 7 | q11.23 | q11.23 | 7 | 4 |
| X71 | A7 | Colon | 7 | q11.23 | q11.23 | 5 | 4 |
| X1819_1 | A7 | Colon | 7 | q11.23 | q11.23 | 4 | 4 |
| NCI_H69 | A7 | scLung | 7 | q11.23 | q11.23 | 4 | 4 |
| BT20 | A8 | Breast | 1 | p12.2 | p13.2 | 10 | 9 |
| CAMA-1 | A8 | Breast | 1 | p12 | p12 | 6 | 6.7 |
| KPL-1 | A8 | Breast | 1 | p11.2 | p13.3 | 11 | 14.7 |
| Colo205 | A9 | Colon | 6 | p21.2 | p21.2 | 8 | 3.4 |
| MDA_MB231 | A9 | Breast | 6 | p21.1 | p21.2 | 7 | 9.8 |
| NCI_{——}H522 | A9 | nscLung | 6 | p21.2 | p21.31 | 6 | 9.1 |
| PANC-1 | A10 | Pancreas | 18 | q23 | q23 | 7 | 5.2 |
| NCI_H1607 | A11 | scLung | 9 | p22.2 | p23 | 10 | 14.5 |
| NCI_H446 | A11 | scLung | 9 | p22.3 | p22.3 | 8 | 2.9 |
| HCC1954 | A11 | Breast | 9 | p22.2 | p23 | 10 | 14.5 |

[0039] In addition, SEQ ID NO: 1-3049 represents the nucleotide sequences for cDNA sequences corresponding to genes located in these regions of interest. Such regions contain genes found to be amplified and over-expressed in cancerous tissues, especially of breast, colon, lung, cervix, kidney, pancreas and prostate.

[0040] Each amplicon may contain about 75 genes, at least one of which will be amplified in a cancerous condition. Genes that show amplification and/or over-expression can be indicative of the cancerous status of a given cell.

[0041] Briefly, the procedures used to identify the genes disclosed herein may be summarized as follows:

[0042] For CGH analysis, based on detailed molecular cytogenetic characterizations, the following data sets are generated, which may include regions reported in the public domain as well as unique regions not previously known.
[0043] 1. A map of chromosomal regions involved in consistent, recurrent and high level genomic gains (i.e., amplifications) for a representative cancer cell line or tumor type (e.g. colon, prostate, breast and lung) that can be recognized as a pattern/signature for a given tumor type.
[0044] 2. A map of chromosomal regions containing genomic losses (i.e., deletions) in each tumor type and individual cell line to be examined.
[0045] 3. Levels of intensities of gains and losses categorized for entry into a database.
[0046] 4. A comparison of the patterns of gains and losses between the clinical samples (e.g. colon xenografts) and cell lines (e.g., colon) of matched Stages and Grades.
[0047] 5. A comparison of the patterns of gains and losses between primary prostate tumor cell lines (e.g., CPDR lines) and metastatic prostate tumor cell lines (e.g., DU 145, PC3 and LNCaP).

[0048] In accordance with the present invention, for SKY analysis, data sets were generated according to the following steps:
[0049] 1. Identification and development of a database of novel chromosomal rearrangements in epithelial cancer cell lines.
[0050] 2. Identification of novel translocations involving specific chromosomes or chromosomal regions
[0051] 3. Reconciliation of SKY and CGH analysis on the same cell line as a verification of the combined findings.

[0052] Combining genomic DNA analysis of gains and losses in the tumor cell lines/clinical samples with cDNA expression analysis from matched tumor types displayed ordered on the assembled Human genome sequence:
[0053] 1. A pattern of gene expression on a Affymetrix chip set (U95 and U133) was used to generate differential gene expression profiles between samples sets containing normal and malignant tissues from colon, prostate, lung, breast and various cell lines.
[0054] 2. A Spoffire™ visualization tool was developed that allowed the generation of a list of all the genes that are present in the Human genome sequence within the defined regions of gains/losses for each cell type/tumor type to identify genes to include in the HITS platform and for identification of cancer associated genes
[0055] 3. The following algorithm was employed:
   [0056] i) Match chromosomal regions of amplification/gains defined by CGH with the location of genes/ESTs on an Affymetrix chip as mapped to a Human genome template.
   [0057] ii) Identify genes/ESTs over-expressed in tumor tissue compared to normal tissue in said chromosomal regions using.
   [0058] iii) Compile data on cell lines of a particular tumor type and different tumor types showing clusters of genomic gains and losses at certain chromosomal regions.
   [0059] iv) Pick BACs that span the chromosomal regions consistently gained and containing over-expressed genes in an effort to positionally clone novel cancer genes (oncogenes and genes in relevant pathways)
   [0060] v) Validate the identified genes by
      [0061] A) Picking STS markers that identify the gene sequence and quantify the relative copy number in genomic DNA and RNA across a panel of tumor cell lines.
      [0062] B) Develop probes for FISH on chromosomes from tumor cell lines and primary tumor tissue micro-arrays.
[0063] 4. The expression data from tumor cell lines that have undergone SKY/CGH analysis was used to pick candidate genes to validate as individual targets in functional genomic assays and in-vivo assays and for use in the transcriptional assay platform.

[0064] In accordance with the present invention, over-expression of cellular genes is conveniently monitored in model cellular systems using cell lines (such as is used in the example below), primary cells, or tissue samples maintained in growth media. For different purposes, these may be treated with compounds at one or more different concentrations to assay for modulating agents. Thus, cellular RNAs are isolated from the cells or cultures as an indicator of selected gene expression. The cellular RNAs are then divided and subjected to analysis to determine the presence and/or quantity of specific RNA transcripts, which transcripts are then amplified for detection purposes using standard methodologies, such as reverse transcriptase polymerase chain reaction (RT-PCR). The levels of specific RNA transcripts, including their presence or absence, are determined. When used for identification of modulating agents, such as anti-neoplastic agents, a metric is derived for the type and degree of response of the treated sample compared to control samples.

[0065] In accordance with the foregoing, the amplicons identified as being amplified and/or over-expressed, which can include increased copy number thereof, in cancerous cells are localized in chromosomal regions of interest as identified in Tables 2 and 3.

[0066] The genes localized in these amplicons may be utilized to characterize, the cancerous, or non-cancerous, status of cells, or tissues. The methods of the invention may be used with a variety of cell lines or with primary samples from tumors maintained in vitro under suitable culture conditions for varying periods of time, or in situ in suitable animal models.

[0067] The amplicons disclosed herein are expressed at levels in cancer cells that are different from the expression levels in non-cancer cells. Expression in cancer versus non-cancer cells of the same tissue type is a key identifier.

[0068] In accordance with the forgoing, the present invention also relates to a method for identifying a gene modulating agent, such as an anti-neoplastic agent, comprising:

[0069] (a) contacting a test compound, a compound whose gene-modulating and/or anti-neoplastic activity is to be determined, with one or more cells expressing one or more genes mapped to the chromosomal region of interest, or amplicon, for genes as identified in Table 3, and

[0070] (b) determining a change in expression of said one or more genes compared to when said contacting has not occurred,

[0071] wherein a change in expression of said gene is indicative of gene modulating activity, thereby identifying said test compound as a gene modulating agent.

[0072] In accordance with the foregoing, the present invention relates to a method for identifying an antineoplastic agent, comprising:

[0073] (a) contacting a test compound with a cell that expresses one or more amplicons of Table 2 having an amplification ratio of at least 2.0; and

[0074] (b) determining a change in said amplification ratio due to said contacting;

[0075] wherein a change in said amplification ratio due to said contacting indicates that said test compound has gene modulating activity

[0076] thereby identifying said test compound as a gene modulating agent.

[0077] The present invention also contemplates a method for identifying an antineoplastic agent, comprising:

[0078] (a) contacting a test compound with a cell that expresses at least one gene corresponding to a polynucleotide comprising a nucleotide sequence of SEQ ID NO: 1-3049 and under conditions promoting expression of said gene; and

[0079] (b) determining a change in expression of said gene as a result of said contacting

[0080] wherein a change in expression indicates gene modulation thereby identifying said test compound as a gene modulating agent.

[0081] In preferred embodiments of these methods, the change in expression is a decrease in expression and/or the decrease in expression is a decrease in copy number of the gene and/or the gene comprises a nucleotide sequence of one of SEQ ID NO: 1-3049 and/or the cell was genetically engineered to express said gene.

[0082] Because the genes disclosed herein are over-expressed and relate to the cancerous condition of a cell, successful anti-neoplastic activity will commonly be exhibited by agents that reduce the expression of said genes In one embodiment thereof, the change in expression is a decrease in copy number of the gene or genes under study. In accordance therewith, said change in gene copy number is conveniently determined by detecting a change in expression of messenger RNA encoded by said gene sequence. In another preferred embodiment, expression is determined for more than one such gene, such as 2, 5, 10 or more of the genes.

[0083] Thus, the present invention also encompasses a method for detecting the cancerous status of a cell, comprising detecting elevated expression in said cell of at least one gene corresponding to a polynucleotide comprising a nucleotide sequence of SEQ ID NO: 1-3049 whereby such elevated expression is indicative of cancerous status of the cell. In preferred embodiments thereof, the elevated expression is an elevated copy number of the gene.

[0084] Other methods useful in measuring a change in expression of the genes disclosed herein include measuring a change in the amount or rate of synthesis of a polypeptide encoded by said gene, preferably a decrease in synthesis of said polypeptide. Most preferably, the polypeptide comprises an amino acid sequence highly homologous to a sequence encoded by a gene mapping to an amplicon disclosed herein and whose expression is elevated in cancer.

[0085] The methods of the invention can thus be utilized to identify anti-neoplastic agents useful in treatment of cancerous conditions. Such activity can be further modified by first identifying such an agent using an assay as already described and further contacting such agent with a cancerous cell, followed by monitoring of the status of said cell, or cells. A change in status indicative of successful anti-neoplastic activity may include a decrease in the rate of replication of the cancerous cell(s), a decrease in the total number of progeny cells that can be produced by said cancerous cell(s), or a decrease in the number of times said cancerous cell(s) can replicate, or the death of said cancerous cell(s).

[0086] Anti-neoplastic agents may also be identified using recombinant cells suitably engineered to contain and express the cancer-related genes disclosed herein. In one such embodiment, a recombinant cell is formed using standard technology and then utilized in the assays disclosed herein. Methods of forming such recombinant cells are well known in the literature. See, for example, Sambrook, et al., Molecular Cloning: A Laboratory Manual, Second Edition, Cold Spring Harbor, N.Y., (1989), Wu et al, Methods in Gene Biotechnology (CRC Press, New York, N.Y., 1997), and Recombinant Gene Expression Protocols, in Methods in Molecular Biology, Vol. 62, (Tuan, ed., Humana Press, Totowa, N.J., 1997), the disclosures of which are hereby incorporated by reference.

[0087] The present invention also relates to a method for detecting the cancerous status of a cell, comprising detecting elevated copy number and/or expression in said cell of at least one gene that maps to a chromosomal region of interest, or amplicon, as identified in Table 3. Such elevated expression may be readily monitored by comparison to that of otherwise normal cells having the same genes. Elevated expression of such genes is indicative of the cancerous state. Such elevated expression, including increased copy number, may be the expression of more than one such gene.

[0088] The present invention also relates to a method for detecting a cancer-linked gene comprising the steps of contacting a test compound, identified as having gene modulating activity for a gene mapping to one of the amplicons disclosed herein, with a cell expressing a test gene and detecting modulation, such as decreased activity, of such test gene relative to when said compound is not present thereby identifying said test gene as a cancer-related gene. In preferred embodiments, the gene determined by said method is an oncogene, or cancer facilitating gene.

[0089] In another embodiment, there is provided a method for treating cancer comprising contacting a cancerous cell with an agent first identified as having gene modulating activity using any of the assay methods disclosed according to the invention and in an amount effective to reduce the cancerous activity of said cell. In a preferred embodiment, the cancerous cell is contacted in vivo. In other preferred embodiments, said reduction in cancerous activity is a decrease in the rate of proliferation of said cancerous cell, or said reduction in cancerous activity is the death of said cancerous cell.

[0090] The present invention further relates to a method for treating cancer comprising contacting a cancerous cell with an agent having activity against an expression product encoded by a gene mapping to an amplicon as disclosed herein, preferably where the expression product is a polypeptide. In a preferred embodiment, said cancerous cell is contacted in vivo. In another preferred embodiment, the agent is an antibody.

[0091] Nucleotide sequences mapping to the amplicons disclosed herein may be genomic in nature and thus represent the sequence of an actual gene, such as a human gene, or may be a cDNA sequence derived from a messenger RNA (mRNA) and thus represent contiguous exonic sequences derived from a corresponding genomic sequence or they may be wholly synthetic in origin for purposes of testing. Such cDNA sequences, mapping to the amplicons disclosed herein are identified as SEQ ID NO: 1-3049.

[0092] As described in the Example below, the expression of cancer-related genes may be determined from the relative expression levels of the RNA complement of a cancerous cell relative to a normal (i.e., non-cancerous) cell. Because of the processing that may take place in transforming the initial RNA transcript into the final mRNA, the sequences disclosed herein may represent less than the full genomic sequence. They may also represent sequences derived from ribosomal and transfer RNAs. Consequently, the genes present in the cell (and representing the genomic sequences) and the sequences disclosed in SEQ ID NO: 1-3049, which are mostly cDNA sequences, may be identical or may be such that the cDNAs contain less than the full genomic sequence. Such genes and cDNA sequences are still considered corresponding sequences because they both encode similar RNA sequences. Thus, by way of non-limiting example only, a gene that encodes an RNA transcript, which is then processed into a shorter mRNA, is deemed to encode both such RNAs and therefore encodes an RNA complementary to (using the usual Watson-Crick complementarity rules), or that would otherwise be encoded by, a cDNA (for example, a sequence as disclosed herein). Thus, the sequences disclosed herein correspond to genes contained in the cancerous or normal cells used to determine relative levels of expression because they represent the same sequences or are complementary to RNAs encoded by these genes. Such genes also include different alleles and splice variants that may occur in the cells used in the methods of the invention.

[0093] In addition, sequences encoding the same proteins as any of these genes, regardless of the percent identity of such sequences, are also specifically contemplated by any of the methods of the present invention that rely on any or all of said sequences, regardless of how they are otherwise described or limited. Thus, any such sequences are available for use in carrying out any of the methods disclosed according to the invention. Such sequences also include any open reading frames, as defined herein, present within any genes mapping to the amplicons of the invention.

[0094] The present invention also finds use as a means of diagnosing the presence of cancer in a patient, as where a sample of cancerous tissue or cells, or tissues or cells suspected of being cancerous, are examined for elevated expression, such as at least 2 fold expression, of a gene in one of the amplicons disclosed herein, such as an increased expression of a cDNA sequence, or polypeptide encoded by said cDNA sequence, disclosed in Table 3 and being one of the sequences of SEQ ID NC): 1-3049.

[0095] For such purposes, and in accordance with the disclosure elsewhere herein, such diagnosis is based on the detection of elevated expression or amplification, such as elevated copy number, of one or more of the genes identified according to the invention. Such elevated expression can be determined by any of the means described herein.

[0096] In one such embodiment, the elevated expression, as compared to normal cells and/or tissues of the same organ, is determined by measuring the relative rates of transcription of RNA, such as by production of corresponding cDNAs and then analyzing the resulting DNA using probes developed from genes mapping to the amplicons of the invention. Thus, the levels of cDNA produced by use of reverse transcriptase with the full RNA complement of a cell suspected of being cancerous produces a corresponding amount of cDNA that can then be amplified using polymerase chain reaction, or some other means, such as rolling circle amplification, to determine the relative levels of resulting cDNA and, thereby, the relative levels of gene expression.

[0097] For RNA analysis, the latter may be isolated from samples in a variety of ways, including lysis and denaturation with a phenolic solution containing a chaotropic agent (e.g., triazol) followed by isopropanol precipitation, ethanol wash, and resuspension in aqueous solution; or lysis and denaturation followed by isolation on solid support, such as a Qiagen resin and reconstitution in aqueous solution; or lysis and denaturation in non-phenolic, aqueous solutions followed by enzymatic conversion of RNA to DNA template copies. Steady state RNA levels for a given type of cell or tissue may have to be ascertained prior to employment of the methods of the invention but such is well within the skill of those in the art and will not be further described in detail herein.

[0098] Alternatively, increased expression, such as increased copy number, may be determined for the genes present in a cancerous cell, or a cell suspected of being cancerous, by determining elevated expression within the regions of interest, or amplicons, disclosed herein. Thus, the DNA of such cells may be extracted and probed for increased gene expression within the area disclosed herein as amplified in different cancer types and tissues.

[0099] In employing the methods of the invention, it should be borne in mind that gene expression indicative of a cancerous state need not be characteristic of every cell found to be cancerous. Thus, the methods disclosed herein are useful for detecting the presence of a cancerous condition within a tissue where less than all cells exhibit the complete pattern of over-expression. For example, a set of selected genes, which are found within the regions of interest disclosed herein, may be found, using appropriate probes, either DNA or RNA, to be present in as little as 60% of cells derived from a sample of tumorous, or malignant, tissue while being absent from as much as 60% of cells derived from corresponding non-cancerous, or otherwise normal, tissue (and thus being present in as much as 40% of such normal tissue cells). In a preferred embodiment, such gene pattern is found to be present in at least 70% of cells drawn from a cancerous tissue and absent from at least 70% of a corresponding normal, non-cancerous, tissue sample. In an especially preferred embodiment, such gene pattern is found to be present in at least 80% of cells drawn from a cancerous tissue and absent from at least 80% of a corresponding normal, non-cancerous, tissue sample. In a most preferred embodiment, such gene pattern is found to be present in at least 90% of cells drawn from a cancerous tissue and absent from at least 90% of a corresponding normal, non-cancerous, tissue sample. In an additional embodiment, such gene pattern is found to be present in at least 100% of cells drawn from a cancerous tissue and absent from at least 100% of a corresponding normal, non-cancerous, tissue sample, although the latter embodiment may represent a rare occurrence.

[0100] Because changes in expression of these genes (up-regulation) are linked to the disease state (i.e. cancer), the change in expression may contribute to the initiation or progression of the disease. For example, if a gene that is up-regulated is an oncogene such a gene provides for a means of screening for small molecule therapeutics beyond screens based upon expression output alone. For example, genes that display up-regulation in cancer and whose elevated expression contributes to initiation or progression of disease represent targets in screens for small molecules that inhibit or block their function. Examples include, but are not be limited to, kinase inhibition, cellular proliferation, substrate analogs that block the active site of protein targets, etc.

[0101] It should be noted that there are a variety of different contexts in which genes have been evaluated as being involved in the cancerous process. Thus, some genes may be oncogenes and encode proteins that are directly involved in the cancerous process and thereby promote the occurrence of cancer in an animal. Other genes may simply be involved either directly or indirectly in the cancerous process or condition and may serve in an ancillary capacity with respect to the cancerous state. All such types of genes are deemed with those to be determined in accordance with the invention as disclosed herein. Thus, the gene determined by said method of the invention may be an oncogene, or the gene determined by said method may be a cancer facilitating gene, the latter including a gene that directly or indirectly affects the cancerous process, either in the promotion of a cancerous condition or in facilitating the progress of cancerous growth or otherwise modulating the growth of cancer cells, either in vivo or ex vivo. Such genes may work indirectly where their expression alters the activity of some other gene or gene expression product that is itself directly involved in initiating or facilitating the progress of a cancerous condition. For example, a gene that encodes a polypeptide, either wild or mutant in type, which polypeptide acts to suppress of tumor suppressor gene, or its expression product, will thereby act indirectly to promote tumor growth.

[0102] Many cancerous genes appear to have their effect by encoding an aberrant protein that functions in a cell in a manner different from that of normal cells, or else said protein is overproduced or underproduced as a result of some mutation in the coding sequence, or promoter or enhancer sequences, of a particular gene, such as one of Genes 1-3049 disclosed herein and expressed by the amplicons of the invention.

[0103] In accordance with the present invention, there are provided methods for measuring the activity, such as a biological activity, of such a polypeptide. Such biological activity may include any measurable activity, such as chemical reactivity, catalytic ability, binding to specific structures and receptors, acting as a receptor, or just being present in a membrane of a cell and therefore available as a target site for antibodies or other agents. Any such polypeptides may thus provide a target for a chemotherapeutic agent, especially an antineoplastic agent.

[0104] As is well known in the art, polypeptide activities can be measured in different ways so as to enable screening procedures for agents, such as test compounds, that inhibit the activity of the polypeptide and thereby work against the function of that polypeptide, such as where the polypeptide is some type of cancer-related protein, such as that produced by expression of an oncogene, or where the polypeptide is overproduced as part of the cancer initiating or facilitating process. As non-limiting examples, such screening methods for antineoplastic agents can include the measurement of compounds that bind to proteins (or that bind to a gene or a transcript of a gene), compounds that inhibit expression (including processing and/or maturation) of a protein, or the detection of downstream reaction product, most often with specific antibodies using enzyme-linked immunosorbent assay (ELISA) procedures well known in the art, or compounds that inhibit activity, such as enzyme activity or some other function, or compounds that interact with upstream or downstream proteins (such as with transcription factors or other binding proteins that may serve to regulate gene expression).

[0105] In accordance with the foregoing, the present invention relates to a method for identifying a compound as an anti-neoplastic agent, comprising:

[0106] (a) contacting a test compound with a polypeptide encoded by a gene selected from SEQ ID NO: 1-3049,

[0107] (b) determining a change in a biological activity of said polypeptide due to said contacting,

[0108] wherein a change in activity indicates anti-neoplastic activity and thereby identifies such test compound as an agent having antineoplastic activity.

[0109] In a preferred embodiment, the change in biological activity is a decrease in biological activity.

[0110] In another preferred embodiment, the biological activity is an enzyme activity, such as where the enzyme is one selected from the group kinase, protease, peptidase, phosphodiesterase, phosphatase, dehydrogenase, reductase, carboxylase, transferase, deacetylase and polymerase.

[0111] Assays for these enzymes are available, such as for phosphodiesterases (the most pharmacologically relevant phosphodiesterases are those that hydrolyze cyclic nucleotides (see, for example, cAMP and cGMP assays available from Perkin-Elmer, as well as Estrade et al., Eur. J. Pharmacol. 352:2-3, 157-163 (1998)).

[0112] Protein phosphatases remove phosphate residues from proteins. Most tests of their activity use the same assays as for protein kinases. A non-radioactive phosphatase assay system is available from Promega Biotech.

[0113] The therapeutically most relevant dehydrogenases oxidize or reduce small molecular weight metabolites, esp. steroid hormones, or that generally use or generate NAD or NADP (see: Haeseleer et al., J. Biol. Chem., 273:21790-21799 (1998)). A commercial assay is available from Cayman Chemical (at www.caymanchem.com).

[0114] Gamma-carboxylases are important enzymes in the blood coagulation process. The main assay protocols use synthetic peptides (see: Ulrich et al., J. Biol. Chem., 263:9697-9702 (1988); Begley et al., J. Biol. Chem., 275:36245-36249 (2000)).

[0115] In highly preferred embodiments, the kinase is one of a protein kinase, a serine or threonine kinase, or a receptor tyrosine protein kinase. Where the polypeptide encoded by a gene of the invention is a protein kinase, especially involving tyrosine kinase, various assays for activity are available. Protein kinases add phosphate groups to serine, threonine or tyrosine residues on proteins, most commonly measured with phospho-serine, threonine, or tyrosine-specific antibodies, or generation of radiolabeled substrate, or consumption of ATP, or phosphorylation of (synthetic) small peptides, or measuring downstream enzyme activity and gene transcription. Such assays are commercially available. (See, for example, the tyrosine kinase assay from Roche Molecular Biochemicals). Assays for serine/threonine kinases are also available at Chromagen.com, Upstate Biotechnology, Inc. (Lake Placid, N.Y., and at upstatebiotech.com) and from Applied BioSystems (Foster City, Calif. (home.appliedbiosystems.com)).

[0116] In other specific embodiments, the protease is a serine protease, cysteine protease or aspartic acid protease, or the transferase is a methyltransferase, preferably a cytosine methyltransferase or an adenine methyltransferase, or the deacetylase is a histone deacetylase, or the carboxylase is a γ-carboxylase, or the peptidase is a zinc peptidase, or the polymerase is a DNA polymerase or an RNA polymerase.

[0117] Proteases degrade proteins, un-specifically or at specific sites. Almost all pharmacologically relevant ones have very narrowly defined specific substrates, and their activity is most often measured by directly measuring cleavage product or generation of (fluorescent) light after cleavage of synthetic substrates. Assays are available for serine proteases (Calbiochem, Palo Alto, Calif., and see Berdichevsky et al., J. Virol. Methods, 107:245-255 (2003), for systeine proteases (See: Schulz et al., Mol. Pathol., 51:222-24 (1998) and Seizer et al., PNAS, 96:11015-11022 (1999)), for aspartic acid proteases (Geno Tech, Inc. at www.genotech.com) and for zinc peptidases (see Evans et al., J. Biol. Chem., 278:23180-23186 (2003)).

[0118] Both (regulatory) DNA-methylases and (biosynthetic) protein methylases that are drug targets. (See: Jonassen and Clarke, J. Biol. Chem., 275:12381-12387 (2000); Jackson et al., Nature, 416:556-560 (2002)).

[0119] Most HDAC (histone deacetylase) assays use colorimetric or fluorometric (synthetic) substrates. Standard assays are for binding, especially molecular size changes, blocking a specific site, and effects on transcription or downstream reactions (if DNA or RNA is the direct target of a drug). A commercial assay is available from Vinci Biochem (at www.vincibiochem.it).

[0120] In another specific embodiment, the biological activity is a membrane transport activity, preferably wherein the polypeptide is a cation channel protein, an anion channel protein, a gated-ion channel protein or an ABC transporter protein. Drug effects on the activity of transporter and channel proteins are screened by measuring increase or decrease of the ((radio-)labeled) transported entity inside or outside the cell, in cell-based assays, ATP consumption (in the case of ATPases), or changes in cell membrane potential. Assays employing such proteins are available, such as for ABC transporter (see: Marcil et al., Lancet, 354:1341-46 (1999) and for ion channels (from Evotec OAI, at www.evotecoai.com and from PharmaLinks, at www.pharmalinks.org/research/cellsignalling).

[0121] In one embodiment, the polypeptide is an integrin (the signal transduction pathways elicited by the integrins are slow and not very well characterized, hence most assays are either just binding assays or measure downstream biological phenomena (such as migration, invasion, etc.) (See: Ganta et al., Endocrinology, 138:3606-3612 (1997); Sim et al., J. Biomed. Mater. Research, 68A:352-359 (2004); and Weinreb et al., Anal. Biochem., 306:305-313 (2002)), or a Cytochrome P450 enzyme (almost all cytochrome assays require knowledge of what the substrate is and measure conversion of substrate (free or (radio-)labeled) or generation of product; useful C¹⁴-labeled substrates are available from Amersham Biosciences at www1.amershambiosciences.com), or a nuclear hormone receptor (Assays available from Discoverx, Fremont, Calif., such as an estrogen assay; also see Rosen et al., Curr. Opin. Drug. Discov. Devel., 6:224-30 (2003)).

[0122] In one preferred embodiment, the biological activity is a receptor activity, preferably where the receptor is a G-protein-coupled receptor (GPCR).

[0123] GPCRs are transmembrane proteins that wind 7 times back and forth through a cell's plasma membrane with a ligand binding site located on the outside of the membrane surface of the cell and the effector site being present inside the cell. These receptors bind GDP and GTP. In response to ligand binding, GPCRs activate signal transduction pathways which induce a number of assayable physiological changes, e.g., an increase in intracellular calcium levels, cyclic-AMP, inositol phosphate turnover, and downstream gene transcription (directly or via reporter-assays) along with other translocation assays available for measuring GPCR activation when the polypeptide encoded by a gene of the invention is a GPCR. Thus, such proteins work through a second messenger. The result is activation of CREB, a transcription factor that stimulates the production of gene products. One useful assay is the so-called BRET2/arrestin assay, useful in screening for compounds that interact with GPCRs. (See: Bertrand et al, J. Recept. Signal Transduct Res., 22:533-41 (February-November 2002)). In addition, numerous assays are commercially available, such as the Transfluor Assay, available from Norak Biosciences, Inc. (www.norakbio.com) or ArrayScan and KineticScan, both from Cellomics, or assays from CyBio (Jena, Germany).

[0124] Assays useful with the invention are usually set up to screen for agonists or antagonists after adding ligand, but effects on most of these parameters can be measured whether or not the ligand for the receptor is known. Such assays may involve radioligand-binding assays. Activation of the majority of GPCRs by agonists leads to the interaction of beta-arrestin (a protein that is involved in receptor desensitization and sequestration) with the receptor, which is measurable by fluorescence energy transfer

[0125] The disclosure of all journal articles, or other publications, referred to herein are hereby incorporated by reference in their entirety.

[0126] In one embodiment, the polypeptide is in a solution or suspension and contact with the test compound is by direct contact between the test compound and the protein molecule. Alternatively, the polypeptide may be in a cell and the test compound may have to diffuse into the cell in order to contact the polypeptide. In an alternative embodiment, the test compound may be contacted with a cell that contains or expresses the polypeptide but the test compound may have no direct contact with the polypeptide. In stead, the test compound may act to induce production and/or activity of a different compound, such as an intracellular second messenger that serves to contact the polypeptide and modulate or change the biological activity of this polypeptide.

[0127] In accordance with the foregoing, the method of the present invention includes cancer modulating agents that are themselves either polypeptides, or small chemical entities, that affect the cancerous process, including initiation, suppression or facilitation of tumor growth, either in vivo or ex vivo. Such agents may also be antibodies that react with one or more polypeptides encoded by genes present in the amplicons of the invention.

[0128] In keeping with the disclosure herein, the present invention also relates to a method for treating cancer comprising contacting a cancerous cell with an agent having activity against an expression product encoded by a gene mapping within regions of chromosomal interest.

[0129] The method of the present invention includes embodiments of the above-recited method wherein said cancer cell is contacted in vivo as well as ex vivo, preferably wherein said agent comprises a portion, or is part of an overall molecular structure, having affinity for said expression product. In one such embodiment, said portion having affinity for said expression product is an antibody.

[0130] In one embodiment of the present invention, a chemical agent, such as a protein or other polypeptide, is joined to an agent, such as an antibody, having affinity for an expression product of a cancerous cell, such as a polypeptide or protein encoded by a gene related to the cancerous process, especially a gene mapping to an amplicon as disclosed herein In a specific embodiment, said expression product acts as a therapeutic target for the affinity portion of said anticancer agent and where, after binding of the affinity portion of such agent to the expression product, the anti-cancer portion of said agent acts against said expression product so as to neutralize its effects in initiating, facilitating or promoting tumor formation and/or growth. In a separate embodiment of the present invention, binding of the agent to said expression product may, without more, have the effect of deterring cancer promotion, facilitation or growth, especially where the presence of said expression product is related, either intimately or only in an ancillary manner, to the development and growth of a tumor. Thus, where the presence of said expression product is essential to tumor initiation and/or growth, binding of said agent to said expression product will have the effect of negating said tumor promoting activity. In one such embodiment, said agent is an apoptosis-inducing agent that induces cell suicide, thereby killing the cancer cell and halting tumor growth.

[0131] Many cancers contain chromosomal rearrangements, which typically represent translocations, amplifications, or deletions of specific regions of genomic DNA. A recurrent chromosomal rearrangement that is associated with a specific stage and type of cancer always affects a gene (or possibly genes) that play a direct and critical role in the initiation or progression of the disease. Many of the known oncogenes or tumor suppressor genes that play direct roles in cancer have either been initially identified based upon their positional cloning from a recurrent chromosomal rearrangement or have been demonstrated to fall within a rearrangement subsequent to their cloning by other methods. In all cases, such genes display amplification at both the level of DNA copy number and at the level of transcriptional expression at the mRNA level.

[0132] In accordance with the present invention, said functionally related genes are genes modulating the same metabolic pathway or said genes are genes encoding functionally related polypeptides. In one such embodiment, said genes are genes whose expression is modulated by the same transcriptional activator or enhancer sequence, especially where said transcriptional activator or enhancer increases, or otherwise modulates, the activity of a gene mapping to one of the amplicons of the invention.

[0133] The present invention also relates to a process that comprises a method for producing a product, such as test data, comprising identifying an agent according to one of the disclosed methods for identifying such an agent (i.e., the therapeutic agents identified according to the assay procedures disclosed herein) wherein said product is the data collected with respect to said agent as a result of said identification process, or assay, and wherein said data is sufficient to convey the chemical character and/or structure and/or properties of said agent. For example, the present invention specifically contemplates a situation whereby a user of an assay of the invention may use the assay to screen for compounds having the desired enzyme modulating activity and, having identified the compound, then conveys that information (i.e., information as to structure, dosage, etc) to another user who then utilizes the information to reproduce the agent and administer it for therapeutic or research purposes according to the invention. For example, the user of the assay (user 1) may screen a number of test compounds without knowing the structure or identity of the compounds (such as where a number of code numbers are used the first user is simply given samples labeled with said code numbers) and, after performing the screening process, using one or more assay processes of the present invention, then imparts to a second user (user 2), verbally or in writing or some equivalent fashion, sufficient information to identify the compounds having a particular modulating activity (for example, the code number with the corresponding results). This transmission of information from user 1 to user 2 is specifically contemplated by the present invention.

[0134] In accordance with the foregoing, the present invention relates to a method for producing test data with respect to the anti-neoplastic activity of a compound, such as a test compound as defined herein, comprising:

[0135] (a) identifying a test compound as having anti-neoplastic activity using a method of the invention, such as measuring the biological activity of a polypeptide encoded by a gene of Table 3 (SEQ ID NO: 1-3049), and

[0136] (b) producing test data with respect to the anti-neoplastic activity of said test compound sufficient to identify the chemical structure of said test compound.

[0137] In another embodiment, the present invention provides a method for monitoring the progress of a cancer treatment, such as where the methods of the invention permit a determination that a given course of cancer therapy is or is not proving effective because of an increased or decreased expression of a gene, or genes, mapping to an amplicon as disclosed herein. For example, where there is an increased copy number of one or more of said genes monitoring of such genes can predict success or failure of a course of therapy, such as chemotherapy, or predict the likelihood of a relapse based on elevated activity or expression of one or more of these genes following such course of therapy.

[0138] In accordance with the foregoing, the present invention contemplates a method for determining the progress of a treatment for cancer in a patient afflicted with cancer, following commencement of a cancer treatment on said patient, comprising determining in said patient a change in expression of one or more genes, preferably more than one, corresponding to a gene of Table 3 or encoding a polypeptide or transcript of such a gene, or genes compared to expression of said one or more determined genes prior to commencement of said cancer treatment, wherein a change in expression, especially a decrease in expression, indicates positive effects of such treatment, thereby determining the progress of said treatment.

[0139] In a preferred embodiment, the detected change in expression is a decrease in expression. In another preferred embodiment, the cancer treatment is treatment with a chemotherapeutic agent, especially an agent that modulates, preferably decreases, expression of a gene identified herein, such as where said agent was first identified as having anti-neoplastic activity using a method of the invention. Thus, in accordance with this aspect of the present invention, a patient, or even a research animal, such as a mouse, rat, rabbit or primate, afflicted with cancer, including a cancer induced for research purposes, is introduced to a cancer treatment regimen, such as administration of an anti-cancer agent, including one first identified as having anti-neoplastic activity by one or more of the screening methods disclosed herein. The progress and success or failure of such treatment is subsequently ascertained by determining the subsequent expression of one or more, preferably at least 3, or 5, or 10, of genes mapping to one or more of the amplicons disclosed herein, preferably to the same amplicon, or that encodes a transcript or polypeptide of such a gene following said treatment. In a preferred embodiment, a treatment that reduces said expression is deemed advantageous and may then be the basis for continuing said treatment. The methods of the invention thereby provide a means of continually monitoring the success of the treatment and evaluating both the need, and desirability, of continuing said treatment. In addition, more than one said treatment may be administered simultaneously without diminishing the value of the methods of the invention in determining the overall success of such combined treatment. Thus, more than one said anti-neoplastic agent may be administered to the same patient and overall effectiveness ascertained by the recited methods.

[0140] In accordance with the foregoing, the present invention also contemplates a method for determining the likelihood of survival of a patient afflicted with cancer, following commencement of a cancer treatment on said patient, comprising determining in said patient a change in expression of one or more genes, preferably more than one, corresponding to a gene of Table 3 or encoding a polypeptide or transcript of such a gene, or genes, compared to expression of said one or more determined genes prior to commencement of said cancer treatment, wherein a change in expression, especially a decrease in expression, indicates positive and life-extending effects of such treatment, thereby determining the likelihood of survival of said treatment.

[0141] In a preferred embodiment, the detected change in expression is a decrease in expression and said determined gene, or genes, may include 2, 3, 5, 10 or more of the genes described herein. Thus, the methods of the invention may be utilized as a means for compiling cancer survival statistics following one or more, possibly combined, treatments for cancer as in keeping with the other methods disclosed herein.

[0142] The genes of the amplicons, or regions of interest, identified herein also offer themselves as pharmacodynamic markers (or as pharmacogenetic and/or surrogate markers), such as for patient profiling prior to clinical trials and/or targeted therapies, including combination treatments, resulting from the identification of these genes as valid gene targets for chemotherapy based on the screening procedures of the invention. In one embodiment thereof, the likelihood of success of a cancer treatment with a selected chemotherapeutic agent may be based on the fact that such agent has been determined to have expression modulating activity with one or more genes identified herein, especially where said genes have been identified as showing elevated expression levels in samples from a prospective patient afflicted with cancer. Methods described elsewhere herein for determining cancerous status of a cell may find ready use in such evaluations.

[0143] It should be cautioned that, in carrying out the procedures of the present invention as disclosed herein, any reference to particular buffers, media, reagents, cells, culture conditions and the like are not intended to be limiting, but are to be read so as to include all related materials that one of ordinary skill in the art would recognize as being of interest or value in the particular context in which that discussion is presented. For example, it is often possible to substitute one buffer system or culture medium for another and still achieve similar, if not identical, results. Those of skill in the art will have sufficient knowledge of such systems and methodologies so as to be able, without undue experimentation, to make such substitutions as will optimally serve their purposes in using the methods and procedures disclosed herein.

[0144] The present invention will now be further described by way of the following non-limiting example. In applying the disclosure of the example, it should be kept clearly in mind that other and different embodiments of the methods disclosed according to the present invention will no doubt suggest themselves to those of skill in the relevant art.

### EXAMPLE

[0145] Cancerous cells that over-express one or more genes mapping to the amplicons disclosed herein, are grown to a density of 10⁵ cells/cm² in Leibovitz's L-15 medium supplemented with 2 mM L-glutamine (90%) and 10% fetal bovine serum. The cells are collected after treatment with 0.25% trypsin, 0.02% EDTA at 37° C. for 2 to 5 minutes. The trypsinized cells are then diluted with 30 ml growth medium and plated at a density of 50,000 cells per well in a 96 well plate (200 μl/well). The following day, cells are treated with either compound buffer alone, or compound buffer containing a chemical agent to be tested, for 24 hours. The media is then removed, the cells lysed and the RNA recovered using the RNAeasy reagents and protocol obtained from Qiagen. RNA is quantitated and 10 ng of sample in 1 μl are added to 24 μl of Taqman reaction mix containing 1×PCR buffer, RNAsin, reverse transcriptase, nucleoside triphosphates, amplitaq gold, tween 20, glycerol, bovine serum albumin (BSA) and specific PCR primers and probes for a reference gene (18S RNA) and a test gene (Gene X). Reverse transcription is then carried out at 48° C. for 30 minutes. The sample is then applied to a Perlin Elmer 7700 sequence detector and heat denatured for 10 minutes at 95° C. Amplification is performed through 40 cycles using 15 seconds annealing at 60° C. followed by a 60 second extension at 72° C. and 30 second denaturation at 95° C. Data files are then captured and the data analyzed with the appropriate baseline windows and thresholds.

[0146] The quantitative difference between the target and reference genes is then calculated and a relative expression value determined for all of the samples used. This procedure is then repeated for each of the target genes in a given signature, or characteristic, set and the relative expression ratios for each pair of genes is determined (i.e., a ratio of expression is determined for each target gene versus each of the other genes for which expression is measured, where each gene's absolute expression is determined relative to the reference gene for each compound, or chemical agent, to be screened). The samples are then scored and ranked according to the degree of alteration of the expression profile in the treated samples relative to the control. The overall expression of the set of genes relative to the controls, as modulated by one chemical agent relative to another, is also ascertained. Chemical agents having the most effect on a given gene, or set of genes, are considered the most anti-neoplastic.

### Sequence Listing on CD-ROM Only

[0147] The sequences disclosed herein as SEQ ID NO: 1-3049 in the sequence listing are contained on compact disc (CD-ROM) only (denoted as Filename: Avalon 237 (5,279 kB), 4 copies of which appear on discs denoted Copy 1, Copy 2, Copy 3 and CRF, and which discs were generated on 7 Mar. 2005), which accompanies this application and the contents of said CD-ROMs are hereby incorporated by reference in their entirety. These sequence numbers correspond to cDNA sequences derived from the genes identified in Table 3.

TABLE 3
Amplicon Identification

| | | | Chro- | | |
|---|---|---|---|---|---|
| Amplicon | Transcript Id | Name | mosome | bpstart | bpend |
| A1 | ENST00000303924 | HAS2 | 8 | 122582937 | 122598168 |
| A1 | ENSESTT00000046662 | t | 8 | 122585931 | 122609941 |
| A1 | ENSESTT00000046660 | | 8 | 122608522 | 122610061 |
| A1 | ENSESTT00000046661 | | 8 | 122640599 | 122653390 |
| A1 | ENST00000328524 | | 8 | 123738119 | 123738958 |
| A1 | ENSESTT00000047108 | | 8 | 123750171 | 123920219 |
| A1 | ENST00000314393 | NM_014943 | 8 | 123750577 | 123943336 |
| A1 | ENSESTT00000047109 | | 8 | 123789727 | 123790358 |
| A1 | ENSESTT00000047110 | | 8 | 123921884 | 123943336 |
| A1 | ENSESTT00000047116 | | 8 | 123983935 | 123988137 |
| A1 | ENSESTT00000047111 | | 8 | 123983935 | 124011208 |
| A1 | ENSESTT00000047112 | | 8 | 123983935 | 124011208 |
| A1 | ENST00000259512 | NM_024295 | 8 | 123984034 | 124011088 |
| A1 | ENSESTT00000047115 | | 8 | 123984041 | 123990329 |
| A1 | ENSESTT00000047114 | | 8 | 123987689 | 123999547 |
| A1 | ENSESTT00000047113 | | 8 | 123991511 | 124011208 |
| A1 | ENSESTT00000065616 | | 8 | 124041564 | 124062478 |
| A1 | ENST00000287380 | NM_145647 | 8 | 124041598 | 124120767 |
| A1 | ENSESTT00000065617 | | 8 | 124042077 | 124066211 |
| A1 | ENST00000309336 | Q8TAK7 | 8 | 124046061 | 124098030 |
| A1 | ENST00000327098 | Q8TAK7 | 8 | 124062489 | 124073028 |
| A1 | ENSESTT00000065618 | | 8 | 124074181 | 124088995 |
| A1 | ENSESTT00000065619 | | 8 | 124094878 | 124098018 |
| A1 | ENSESTT00000065620 | | 8 | 124099026 | 124120981 |
| A1 | ENSESTT00000065621 | | 8 | 124109587 | 124120981 |
| A1 | ENSESTT00000065622 | | 8 | 124109691 | 124120981 |
| A1 | ENST00000318462 | Q86UY5 | 8 | 124147875 | 124177793 |
| A1 | ENSESTT00000065624 | | 8 | 124151533 | 124162903 |
| A1 | ENSESTT00000065623 | | 8 | 124151533 | 124177809 |
| A1 | ENST00000276699 | NM_032899 | 8 | 124151685 | 124176255 |
| A1 | ENSESTT00000065671 | | 8 | 124188795 | 124210200 |
| A1 | ENST00000276704 | NM_032847 | 8 | 124188931 | 124210174 |
| A1 | ENSESTT00000065672 | | 8 | 124189023 | 124210138 |
| A1 | ENSESTT00000065673 | | 8 | 124195324 | 124210138 |
| A1 | ENSESTT00000065668 | | 8 | 124218685 | 124236123 |
| A1 | ENST00000297857 | ZHX1 | 8 | 124222153 | 124224774 |
| A1 | ENSESTT00000065670 | | 8 | 124224524 | 124243082 |
| A1 | ENSESTT00000065669 | | 8 | 124224572 | 124243107 |
| A1 | ENST00000309019 | | 8 | 124284858 | 124285232 |
| A1 | ENST00000287394 | NM_014109 | 8 | 124289962 | 124365185 |
| A1 | ENSESTT00000065666 | | 8 | 124294833 | 124315051 |
| A1 | ENSESTT00000065667 | | 8 | 124305201 | 124313890 |
| A1 | ENSESTT00000065665 | | 8 | 124315497 | 124328452 |
| A1 | ENST00000329771 | | 8 | 124369449 | 124370499 |
| A1 | NST00000287387 | M_018024 | 8 | 124385553 | 124410848 |
| A1 | NSESTT00000065625 | | 8 | 124385553 | 124410849 |
| A1 | ENSESTT00000065626 | | 8 | 124385601 | 124410849 |
| A1 | ENSESTT00000065627 | | 8 | 124385602 | 124410849 |
| A1 | ENSESTT00000065628 | | 8 | 124385602 | 124410849 |
| A1 | ENST00000287396 | FBXO32 | 8 | 124471947 | 124510034 |
| A1 | ENSESTT00000065664 | | 8 | 124472004 | 124500973 |
| A1 | ENSESTT00000065662 | | 8 | 124472004 | 124510034 |
| A1 | ENSESTT00000065663 | | 8 | 124483080 | 124510034 |
| A1 | ENST00000325995 | | 8 | 124614600 | 124621754 |
| A1 | ENST00000330051 | | 8 | 124614651 | 124621727 |
| A1 | ENST00000329589 | | 8 | 124614654 | 124621727 |
| A1 | ENSESTT00000065661 | | 8 | 124649681 | 124657768 |
| A1 | ENST00000262219 | ANXA13 | 8 | 124650068 | 124681581 |
| A1 | ENSESTT00000065659 | | 8 | 124662584 | 124706220 |
| A1 | ENSESTT00000065660 | | 8 | 124667216 | 124706214 |
| A1 | ENST00000334705 | Q8N6F3 | 8 | 124737531 | 124744075 |
| A1 | ENST00000325963 | NM_144963 | 8 | 124747485 | 124784276 |
| A1 | ENSESTT00000065657 | | 8 | 124749308 | 124767066 |
| A1 | ENSESTT00000065656 | | 8 | 124753384 | 124767066 |
| A1 | ENSESTT00000065658 | | 8 | 124777101 | 124779458 |
| A1 | ENST00000297628 | | 8 | 124934987 | 124955009 |
| A1 | ENST00000321393 | NM_73684 | 8 | 124982464 | 124984850 |
| A1 | ENSESTT00000049471 | | 8 | 125004837 | 125009297 |
| A1 | ENST00000308614 | NM_182525 | 8 | 125014902 | 125029621 |
| A1 | ENST00000330102 | | 8 | 125045027 | 125088508 |
| A1 | ENST00000327482 | | 8 | 125120753 | 125121402 |
| A1 | ENST00000297632 | Q8WVK5 | 8 | 125280819 | 125341514 |
| A1 | ENSESTT00000049470 | | 8 | 125282330 | 125296251 |
| A1 | ENST00000328599 | NM_017956 | 8 | 125419757 | 125421103 |
| A1 | ENSESTT00000049469 | | 8 | 125441637 | 125443183 |
| A1 | ENSESTT00000049445 | | 8 | 125443596 | 125455222 |
| A1 | ENST00000303545 | RNF139 | 8 | 125443702 | 125456727 |
| A1 | ENSESTT00000049468 | | 8 | 125454689 | 125456214 |
| A1 | ENSESTT00000049466 | | 8 | 125457337 | 125491832 |
| A1 | ENSESTT00000049464 | | 8 | 125457337 | 125507878 |
| A1 | ENSESTT00000049463 | | 8 | 125457337 | 125507907 |
| A1 | ENSESTT00000049461 | | 8 | 125457337 | 125507908 |
| A1 | ENSESTT00000049458 | | 8 | 125457337 | 125507913 |
| A1 | ENSESTT00000049467 | | 8 | 125457339 | 125472731 |
| A1 | ENSESTT00000049462 | | 8 | 125457339 | 125507908 |
| A1 | ENST00000276692 | NM_032026 | 8 | 125457339 | 125507917 |
| A1 | ENSESTT00000049465 | | 8 | 125472748 | 125507878 |
| A1 | ENSESTT00000049459 | | 8 | 125472748 | 125507913 |
| A1 | ENSESTT00000049460 | | 8 | 125473099 | 125507913 |
| A1 | ENST00000276689 | NDUFB9 | 8 | 125507932 | 125518808 |
| A1 | ENSESTT00000049446 | | 8 | 125507947 | 125518807 |
| A1 | ENST00000325064 | MTSS1 | 8 | 125519619 | 125697247 |
| A1 | ENSESTT00000049457 | | 8 | 125521907 | 125524630 |
| A1 | ENSESTT00000049456 | | 8 | 125525191 | 125526708 |
| A1 | ENSESTT00000049455 | | 8 | 125526532 | 125537360 |
| A1 | ENSESTT00000049453 | | 8 | 125553967 | 125697188 |
| A1 | ENSESTT00000049454 | | 8 | 125668151 | 125697188 |
| A1 | ENST00000319286 | NM_152412 | 8 | 125942128 | 125948216 |
| A1 | ENSESTT00000049452 | | 8 | 125965815 | 125967028 |
| A1 | ENST00000265896 | SQLE | 8 | 125968234 | 125990776 |
| A1 | ENSESTT00000049447 | | 8 | 125974452 | 125989666 |
| A1 | ENSESTT00000049451 | | 8 | 125987460 | 125991054 |
| A1 | ENSESTT00000049448 | | 8 | 125993091 | 125997546 |
| A1 | ENSESTT00000049450 | | 8 | 125993091 | 126001545 |
| A1 | ENSESTT00000049449 | | 8 | 125993091 | 126006166 |
| A1 | ENST00000318410 | Y196_HUMAN | 8 | 125993448 | 126052729 |
| A1 | ENSESTT00000052951 | | 8 | 126001094 | 126012931 |
| A1 | ENSESTT00000052952 | | 8 | 126001094 | 126012931 |
| A1 | ENSESTT00000052949 | | 8 | 126001094 | 126013531 |
| A1 | ENSESTT00000052944 | | 8 | 126001094 | 126032404 |
| A1 | ENSESTT00000052945 | | 8 | 126001094 | 126032404 |
| A1 | ENSESTT00000052953 | | 8 | 126001148 | 126008731 |
| A1 | ENSESTT00000052950 | | 8 | 126006063 | 126013531 |
| A1 | ENSESTT00000052946 | | 8 | 126006063 | 126032404 |
| A1 | ENSESTT00000052948 | | 8 | 126012674 | 126016164 |
| A1 | ENSESTT00000052947 | | 8 | 126013317 | 126032404 |
| A1 | ENSESTT00000052943 | | 8 | 126036476 | 126043900 |
| A1 | ENSESTT00000052941 | | 8 | 126045186 | 126060614 |
| A1 | ENSESTT00000052942 | | 8 | 126051717 | 126060573 |
| A1 | ENST00000287437 | NM_173685 | 8 | 126060684 | 126335950 |
| A1 | ENSESTT00000052921 | | 8 | 126060694 | 126120112 |
| A1 | ENSESTT00000052935 | | 8 | 126060694 | 126151406 |
| A1 | ENSESTT00000052934 | | 8 | 126060694 | 126326148 |
| A1 | ENSESTT00000052931 | | 8 | 126060694 | 126326652 |
| A1 | ENSESTT00000052932 | | 8 | 126060694 | 126326652 |
| A1 | ENSESTT00000052933 | | 8 | 126060694 | 126326652 |
| A1 | ENSESTT00000052929 | | 8 | 126060694 | 126335951 |
| A1 | ENSESTT00000052930 | | 8 | 126060694 | 126335951 |
| A1 | ENSESTT00000052924 | | 8 | 126060717 | 126151406 |
| A1 | ENSESTT00000052923 | | 8 | 126060717 | 126326652 |
| A1 | ENSESTT00000052922 | | 8 | 126060717 | 126335951 |
| A1 | ENSESTT00000052926 | | 8 | 126060741 | 126151406 |
| A1 | ENSESTT00000052925 | | 8 | 126060741 | 126326652 |
| A1 | ENSESTT00000052927 | | 8 | 126150930 | 126335951 |
| A1 | ENSESTT00000052940 | | 8 | 126317027 | 126320247 |
| A1 | ENSESTT00000052928 | | 8 | 126326536 | 126335951 |
| A1 | ENST00000311922 | NM_025195 | 8 | 126399453 | 126407235 |
| A1 | ENSESTT00000052936 | | 8 | 126399454 | 126404869 |
| A1 | ENSESTT00000052939 | | 8 | 126400000 | 126402312 |
| A1 | ENSESTT00000052937 | | 8 | 126402477 | 126405286 |
| A1 | ENST00000311709 | Q9P1E1 | 8 | 126552574 | 126553590 |
| A1 | ENSESTT00000052938 | | 8 | 126914570 | 126919779 |
| A1 | ENST00000329599 | | 8 | 127041420 | 127043050 |
| A1 | ENSESTT00000046663 | | 8 | 127466983 | 127469137 |
| A1 | ENSESTT00000046664 | | 8 | 127487532 | 127491189 |
| A2 | ENSESTT00000040368 | | 13 | 96395910 | 96638676 |
| A2 | ENSESTT00000040357 | | 13 | 96493435 | 96594999 |
| A2 | OTTHUMT00013002849 | FARP1-006 | 13 | 96493435 | 96595559 |
| A2 | ENSESTT00000040356 | | 13 | 96493435 | 96762294 |
| A2 | OTTHUMT00013002844 | FARP1-001 | 13 | 96493435 | 96800024 |
| A2 | ENST00000319562 | FARP1 | 13 | 96493506 | 96798828 |
| A2 | ENSESTT00000040369 | | 13 | 96526040 | 96526774 |
| A2 | OTTHUMT00013002835 | bA10G5.1-002 | 13 | 96526040 | 96527520 |
| A2 | OTTHUMT00013002834 | bA10G5.1-001 | 13 | 96526425 | 96527547 |
| A2 | ENST00000267291 | ZNF183L1 | 13 | 96526535 | 96527491 |
| A2 | OTTHUMT00013002839 | bA261P24.2-002 | 13 | 96678973 | 96683493 |
| A2 | OTTHUMT00013002838 | bA261P24.2-001 | 13 | 96679135 | 96683493 |
| A2 | ENSESTT00000040358 | | 13 | 96715645 | 96762294 |
| A2 | OTTHUMT00013002845 | FARP1-002 | 13 | 96734616 | 96736041 |
| A2 | OTTHUMT00013002846 | FARP1-003 | 13 | 96754326 | 96762232 |
| A2 | OTTHUMT00013002847 | FARP1-004 | 13 | 96759593 | 96775753 |
| A2 | OTTHUMT00013002848 | FARP1-005 | 13 | 96781485 | 96786357 |
| A2 | OTTHUMT00013002842 | bA111L24.3-001 | 13 | 96785660 | 96786095 |
| A2 | ENSESTT00000040359 | | 13 | 96789051 | 96798697 |
| A2 | OTTHUMT00013002862 | STK24-005 | 13 | 96800456 | 96816816 |
| A2 | OTTHUMT00013002859 | STK24-002 | 13 | 96800456 | 96872252 |
| A2 | OTTHUMT00013002858 | STK24-001 | 13 | 96800456 | 96927118 |
| A2 | ENSESTT00000040367 | | 13 | 96802878 | 96810698 |
| A2 | ENSESTT00000040366 | | 13 | 96802878 | 96816333 |
| A2 | ENSESTT00000040365 | | 13 | 96802878 | 96825181 |
| A2 | ENSESTT00000040363 | | 13 | 96802878 | 96825239 |
| A2 | ENSESTT00000040360 | | 13 | 96802878 | 96927359 |
| A2 | ENSESTT00000040361 | | 13 | 96802878 | 96927359 |
| A2 | ENST00000261573 | STK24 | 13 | 96803428 | 96872107 |
| A2 | OTTHUMT00013002863 | STK24-006 | 13 | 96805676 | 96814040 |
| A2 | OTTHUMT00013002860 | STK24-003 | 13 | 96806237 | 96869522 |
| A2 | ENSESTT00000040364 | | 13 | 96812027 | 96825239 |
| A2 | OTTHUMT00013002861 | STK24-004 | 13 | 96825116 | 96928195 |
| A2 | OTTHUMT00013002864 | STK24-007 | 13 | 96855283 | 96926459 |
| A2 | ENSESTT00000040362 | | 13 | 96855283 | 96926459 |
| A2 | ENST00000313290 | Q8WYY0 | 13 | 96886851 | 96887246 |
| A2 | OTTHUMT00013002856 | bA295B17.5-001 | 13 | 96927499 | 96929085 |
| A2 | OTTHUMT00013002872 | bA295B17.2-001 | 13 | 96960547 | 96961131 |
| A2 | OTTHUMT00013002874 | bA295B17.3-001 | 13 | 96979939 | 96980244 |
| A2 | OTTHUMT00013002876 | bA295B17.4-001 | 13 | 96991069 | 96991494 |
| A2 | OTTHUMT00013002878 | SLC15A1-001 | 13 | 97034056 | 97102908 |
| A2 | ENST00000218552 | SLC15A1 | 13 | 97034979 | 97076822 |
| A2 | OTTHUMT00013002879 | SLC15A1-002 | 13 | 97070782 | 97076822 |
| A2 | ENST00000313260 | O14496 | 13 | 97071712 | 97076756 |
| A2 | OTTHUMT00013002899 | bA155N3.2-010 | 13 | 97143742 | 97182048 |
| A2 | OTTHUMT00013002890 | bA155N3.2-001 | 13 | 97143742 | 97328245 |
| A2 | ENSESTT00000040495 | | 13 | 97144240 | 97147514 |
| A2 | ENSESTT00000040494 | | 13 | 97144240 | 97150734 |
| A2 | ENST00000301980 | DOC9_HUMAN | 13 | 97147367 | 97436606 |
| A2 | OTTHUMT00013002902 | bA155N3.2-013 | 13 | 97150543 | 97179710 |
| A2 | OTTHUMT00013002901 | bA155N3.2-012 | 13 | 97157916 | 97179621 |
| A2 | OTTHUMT00013002898 | bA155N3.2-009 | 13 | 97159564 | 97197939 |
| A2 | ENSESTT00000040492 | | 13 | 97160444 | 97203725 |
| A2 | ENSESTT00000040493 | | 13 | 97160510 | 97182047 |
| A2 | OTTHUMT00013002900 | bA155N3.2-011 | 13 | 97160514 | 97179751 |
| A2 | OTTHUMT00013002896 | bA155N3.2-007 | 13 | 97181651 | 97206239 |
| A2 | OTTHUMT00013002895 | bA155N3.2-006 | 13 | 97182029 | 97200335 |
| A2 | OTTHUMT00013002882 | bA155N3.3-001 | 13 | 97182339 | 97184884 |
| A2 | OTTHUMT00013002894 | bA155N3.2-005 | 13 | 97196203 | 97210731 |
| A2 | ENSESTT00000040491 | | 13 | 97206155 | 97213319 |
| A2 | OTTHUMT00013002897 | bA155N3.2-008 | 13 | 97210436 | 97213803 |
| A2 | ENSESTT00000040490 | | 13 | 97210439 | 97213399 |
| A2 | ENSESTT00000040489 | | 13 | 97217686 | 97230930 |
| A2 | ENSESTT00000040488 | | 13 | 97234078 | 97238454 |
| A2 | OTTHUMT00013002893 | bA155N3.2-004 | 13 | 97238390 | 97238940 |
| A2 | ENSESTT00000040487 | | 13 | 97253255 | 97271344 |
| A2 | ENSESTT00000040486 | | 13 | 97253255 | 97276111 |
| A2 | OTTHUMT00013002891 | bA155N3.2-002 | 13 | 97272306 | 97436880 |
| A2 | ENST00000333692 | | 13 | 97300012 | 97300702 |
| A2 | OTTHUMT00013002884 | bA318G11.2-001 | 13 | 97300012 | 97300702 |
| A2 | OTTHUMT00013002892 | bA155N3.2-003 | 13 | 97305690 | 97436648 |
| A2 | ENSESTT00000040485 | | 13 | 97305748 | 97436584 |
| A2 | OTTHUMT00013002888 | bA122A8.3-001 | 13 | 97523848 | 97524745 |
| A2 | OTTHUMT00013002886 | bA122A8.1-001 | 13 | 97540834 | 97541246 |
| A2 | ENST00000325317 | | 13 | 97541028 | 97541237 |
| A2 | OTTHUMT00013002916 | bA87L10.1-001 | 13 | 97546697 | 97550965 |
| A2 | OTTHUMT00013002917 | bA87L10.1-002 | 13 | 97546697 | 97550965 |
| A2 | ENSESTT00000040484 | | 13 | 97547656 | 97550936 |
| A2 | OTTHUMT00013002939 | bA178C10.1-008 | 13 | 97551029 | 97735570 |
| A2 | OTTHUMT00013002933 | bA178C10.1-002 | 13 | 97551029 | 97735795 |
| A2 | ENSESTT00000040442 | | 13 | 97551031 | 97736683 |
| A2 | ENSESTT00000040438 | | 13 | 97551081 | 97718301 |
| A2 | ENSESTT00000040437 | | 13 | 97551081 | 97736683 |
| A2 | ENSESTT00000040439 | | 13 | 97551109 | 97664477 |
| A2 | OTTHUMT00013002940 | bA178C10.1-009 | 13 | 97551142 | 97690820 |
| A2 | OTTHUMT00013002942 | bA178C10.1-011 | 13 | 97551147 | 97664475 |
| A2 | ENSESTT00000040440 | | 13 | 97551164 | 97718142 |
| A2 | OTTHUMT00013002932 | bA178C10.1-001 | 13 | 97551164 | 97736689 |
| A2 | OTTHUMT00013002941 | bA178C10.1-010 | 13 | 97551171 | 97594879 |
| A2 | ENSESTT00000040441 | | 13 | 97551172 | 97736683 |
| A2 | ENST00000257320 | PHGDHL1 | 13 | 97551667 | 97735590 |
| A2 | OTTHUMT00013002920 | bA461N23.2-001 | 13 | 97565231 | 97566117 |
| A2 | ENST00000325202 | | 13 | 97565627 | 97566013 |
| A2 | ENST00000325028 | PHGDHL1 | 13 | 97588684 | 97735590 |
| A2 | OTTHUMT00013002934 | bA178C10.1-003 | 13 | 97594770 | 97736689 |
| A2 | OTTHUMT00013002928 | GPR18-001 | 13 | 97604987 | 97611999 |
| A2 | ENST00000245300 | GPR18 | 13 | 97604995 | 97608642 |
| A2 | ENSESTT00000040482 | | 13 | 97605550 | 97608614 |
| A2 | OTTHUMT00013002929 | GPR18-002 | 13 | 97605834 | 97608629 |
| A2 | ENSESTT00000040483 | | 13 | 97606624 | 97608610 |
| A2 | OTTHUMT00013002922 | EBI2-001 | 13 | 97644794 | 97657708 |
| A2 | ENST00000301931 | EBI2 | 13 | 97644799 | 97657654 |
| A2 | ENSESTT00000040481 | | 13 | 97645785 | 97657708 |
| A2 | OTTHUMT00013002937 | bA178C10.1-006 | 13 | 97658207 | 97735649 |
| A2 | OTTHUMT00013002935 | bA178C10.1-004 | 13 | 97663038 | 97736689 |
| A2 | OTTHUMT00013002936 | bA178C10.1-005 | 13 | 97664963 | 97735953 |
| A2 | OTTHUMT00013002924 | bA461N23.5-001 | 13 | 97668409 | 97669210 |
| A2 | OTTHUMT00013002926 | bA461N23.6-001 | 13 | 97701675 | 97702282 |
| A2 | OTTHUMT00013002938 | bA178C10.1-007 | 13 | 97718042 | 97727821 |
| A2 | OTTHUMT00013002954 | bA178C10.2-001 | 13 | 97722428 | 97722941 |
| A2 | ENSESTT00000040480 | | 13 | 97736300 | 97736679 |
| A2 | ENSESTT00000040479 | | 13 | 97756206 | 97759085 |
| A2 | OTTHUMT00013002956 | bA178C10.3-001 | 13 | 97758036 | 97759317 |
| A2 | OTTHUMT00013002960 | bA214F16.3-001 | 13 | 97841538 | 97842752 |
| A2 | OTTHUMT00013002958 | bA214F16.2-001 | 13 | 97849982 | 97851307 |
| A2 | ENSESTT00000040461 | | 13 | 97851670 | 97897704 |
| A2 | ENSESTT00000040460 | | 13 | 97851670 | 97905912 |
| A2 | ENSESTT00000040457 | | 13 | 97851670 | 97913646 |
| A2 | ENSESTT00000040458 | | 13 | 97851670 | 97913646 |
| A2 | ENSESTT00000040459 | | 13 | 97851670 | 97913646 |
| A2 | ENSESTT00000040462 | | 13 | 97851727 | 97867945 |
| A2 | OTTHUMT00013002963 | TM9SF2-002 | 13 | 97851729 | 97897328 |
| A2 | OTTHUMT00013002962 | TM9SF2-001 | 13 | 97851729 | 97913644 |
| A2 | ENST00000245361 | TM9SF2 | 13 | 97851862 | 97913013 |
| A2 | OTTHUMT00013002964 | TM9SF2-003 | 13 | 97864470 | 97888117 |
| A2 | ENSESTT00000040467 | | 13 | 97886862 | 97897704 |
| A2 | ENSESTT00000040466 | | 13 | 97886862 | 97905912 |
| A2 | ENSESTT00000040463 | | 13 | 97886862 | 97913646 |
| A2 | ENSESTT00000040464 | | 13 | 97886862 | 97913646 |
| A2 | ENSESTT00000040465 | | 13 | 97886862 | 97913646 |
| A2 | ENSESTT00000040468 | | 13 | 97890373 | 97891991 |
| A2 | OTTHUMT00013002965 | TM9SF2-004 | 13 | 97890766 | 97891991 |
| A2 | ENSESTT00000040471 | | 13 | 97891812 | 97905912 |
| A2 | ENSESTT00000040469 | | 13 | 97891812 | 97913646 |
| A2 | ENSESTT00000040470 | | 13 | 97891812 | 97913646 |
| A2 | ENSESTT00000040473 | | 13 | 97897238 | 97905912 |
| A2 | ENSESTT00000040472 | | 13 | 97897238 | 97909646 |
| A2 | ENSESTT00000040474 | | 13 | 97899412 | 97905912 |
| A2 | ENSESTT00000040476 | | 13 | 97912182 | 97912840 |
| A2 | OTTHUMT00013002970 | bA214F16.4-001 | 13 | 97927367 | 97930623 |
| A2 | OTTHUMT00013002972 | bA214F16.5-001 | 13 | 97932961 | 97933435 |
| A2 | ENSESTT00000040478 | | 13 | 97956924 | 98215198 |
| A2 | ENSESTT00000040477 | | 13 | 97956924 | 98221218 |
| A2 | OTTHUMT00013002980 | CLYBL-001 | 13 | 97956924 | 98242825 |
| A2 | ENST00000323941 | CLYBL | 13 | 97956937 | 98242824 |
| A2 | OTTHUMT00013002981 | CLYBL-002 | 13 | 97956945 | 98241868 |
| A2 | OTTHUMT00013002982 | CLYBL-003 | 13 | 97956951 | 98242819 |
| A2 | OTTHUMT00013002974 | bA279D17.1-001 | 13 | 98040336 | 98041226 |
| A2 | OTTHUMT00013002976 | bA279D17.2-001 | 13 | 98076502 | 98077746 |
| A2 | ENSESTT00000040339 | | 13 | 98076717 | 98079197 |
| A2 | ENSESTT00000040309 | | 13 | 98123162 | 98215493 |
| A2 | OTTHUMT00013002978 | bA134O15.2-001 | 13 | 98124280 | 98125544 |
| A2 | OTTHUMT00013002983 | CLYBL-004 | 13 | 98209116 | 98215493 |
| A2 | OTTHUMT00013002984 | CLYBL-005 | 13 | 98209116 | 98215493 |
| A2 | ENSESTT00000040310 | | 13 | 98213298 | 98242825 |
| A2 | ENSESTT00000040311 | | 13 | 98215060 | 98242825 |
| A2 | ENSESTT00000040312 | | 13 | 98215103 | 98242825 |
| A2 | OTTHUMT00013002986 | CLYBL-007 | 13 | 98216572 | 98243149 |
| A2 | ENSESTT00000040313 | | 13 | 98216572 | 98243149 |
| A2 | OTTHUMT00013002985 | CLYBL-006 | 13 | 98221273 | 98241868 |
| A2 | ENSESTT00000040314 | | 13 | 98235260 | 98241868 |
| A2 | OTTHUMT00013003004 | bA12G12.1-001 | 13 | 98315452 | 98322164 |
| A2 | ENST00000267294 | ZIC5 | 13 | 98315452 | 98322179 |
| A2 | OTTHUMT00013002994 | ZIC2-001 | 13 | 98332294 | 98337019 |
| A2 | ENST00000245295 | ZIC2 | 13 | 98332320 | 98337019 |
| A2 | ENSESTT00000040315 | | 13 | 98332599 | 98335720 |
| A2 | OTTHUMT00013002995 | ZIC2-002 | 13 | 98334544 | 98335747 |
| A2 | ENSESTT00000040316 | | 13 | 98334544 | 98335747 |
| A2 | OTTHUMT00013002997 | ZIC2-004 | 13 | 98334944 | 98335747 |
| A2 | ENSESTT00000040317 | | 13 | 98334944 | 98335747 |
| A2 | OTTHUMT00013002998 | ZIC2-005 | 13 | 98335044 | 98335729 |
| A2 | ENSESTT00000040318 | | 13 | 98335044 | 98335729 |
| A2 | ENSESTT00000040319 | | 13 | 98335196 | 98335747 |
| A2 | OTTHUMT00013002996 | ZIC2-003 | 13 | 98335749 | 98336159 |
| A2 | ENSESTT00000040320 | | 13 | 98335749 | 98336160 |
| A2 | OTTHUMT00013003006 | bA12G12.3-001 | 13 | 98378024 | 98378429 |
| A2 | OTTHUMT00013003008 | bA12G12.4-001 | 13 | 98412551 | 98413856 |
| A2 | ENSESTT00000040321 | | 13 | 98439330 | 98660115 |
| A2 | OTTHUMT00013003012 | PCCA-001 | 13 | 98439338 | 98880687 |
| A2 | ENSESTT00000040322 | | 13 | 98439361 | 98660115 |
| A2 | ENSESTT00000040323 | | 13 | 98439372 | 98660115 |
| A2 | ENSESTT00000040324 | | 13 | 98439395 | 98660115 |
| A2 | ENST00000310787 | PCCA | 13 | 98453138 | 98880421 |
| A2 | OTTHUMT00013003017 | PCCA-006 | 13 | 98499456 | 98511880 |
| A2 | OTTHUMT00013003010 | bA340C20.2-001 | 13 | 98500772 | 98501347 |
| A2 | ENSESTT00000040325 | | 13 | 98585858 | 98660115 |
| A2 | OTTHUMT00013003014 | PCCA-003 | 13 | 98643479 | 98775986 |
| A2 | ENSESTT00000040326 | | 13 | 98643479 | 98881032 |
| A2 | ENSESTT00000040327 | | 13 | 98643479 | 98881032 |
| A2 | ENSESTT00000040328 | | 13 | 98643479 | 98881032 |
| A2 | OTTHUMT00013003013 | PCCA-002 | 13 | 98656031 | 98690514 |
| A2 | ENSESTT00000040329 | | 13 | 98660116 | 98881032 |
| A2 | OTTHUMT00013003015 | PCCA-004 | 13 | 98718727 | 98880687 |
| A2 | OTTHUMT00013003016 | PCCA-005 | 13 | 98718754 | 98842072 |
| A2 | OTTHUMT00013003028 | bA151A6.5-001 | 13 | 98814695 | 98830540 |
| A2 | OTTHUMT00013003030 | bA151A6.5-003 | 13 | 98829802 | 98831270 |
| A2 | OTTHUMT00013003029 | bA151A6.5-002 | 13 | 98829814 | 98831412 |
| A2 | ENSESTT00000040330 | | 13 | 98865680 | 98881032 |
| A2 | OTTHUMT00013003018 | PCCA-007 | 13 | 98865682 | 98880687 |
| A2 | OTTHUMT00013003052 | bA151A6.2-001 | 13 | 98881802 | 98934252 |
| A2 | ENST00000257302 | Q9BT41 | 13 | 98881812 | 98883998 |
| A2 | ENSESTT00000040335 | | 13 | 98882280 | 98934255 |
| A2 | ENSESTT00000040336 | | 13 | 98882742 | 98934255 |
| A2 | ENSESTT00000040338 | | 13 | 98882742 | 98939783 |
| A2 | OTTHUMT00013003055 | bA151A6.2-004 | 13 | 98882750 | 98883924 |
| A2 | OTTHUMT00013003054 | bA151A6.2-003 | 13 | 98882750 | 98939783 |
| A2 | ENSESTT00000040337 | | 13 | 98882766 | 98883908 |
| A2 | OTTHUMT00013003056 | bA151A6.2-005 | 13 | 98882769 | 98883908 |
| A2 | OTTHUMT00013003053 | bA151A6.2-002 | 13 | 98882769 | 98938986 |
| A2 | OTTHUMT00013003034 | bA151A6.4-001 | 13 | 98887578 | 98930372 |
| A2 | OTTHUMT00013003026 | bA151A6.3-001 | 13 | 98890071 | 98890529 |
| A2 | ENST00000245316 | | 13 | 98890156 | 98890503 |
| A2 | OTTHUMT00013003036 | bA113J24.1-001 | 13 | 98954189 | 99025171 |
| A2 | OTTHUMT00013003037 | bA113J24.1-002 | 13 | 98954189 | 99025171 |
| A2 | ENST00000245302 | NM_032813 | 13 | 98955249 | 98989063 |
| A2 | ENSESTT00000040332 | | 13 | 98975664 | 98987865 |
| A2 | ENSESTT00000040334 | | 13 | 98975708 | 98986863 |
| A2 | OTTHUMT00013003038 | bA113J24.1-003 | 13 | 98975708 | 98992566 |
| A2 | OTTHUMT00013003042 | bA113J24.1-007 | 13 | 98975790 | 98986863 |
| A2 | ENSESTT00000040333 | | 13 | 98976035 | 98987865 |
| A2 | OTTHUMT00013003041 | bA113J24.1-006 | 13 | 98985320 | 98986887 |
| A2 | OTTHUMT00013003039 | bA113J24.1-004 | 13 | 98992475 | 99025134 |
| A2 | ENSESTT00000040331 | | 13 | 98992500 | 99014571 |
| A2 | ENSESTT00000040306 | | 13 | 99006632 | 99025080 |
| A2 | ENSESTT00000040307 | | 13 | 99013216 | 99025060 |
| A2 | ENSESTT00000040308 | | 13 | 99018487 | 99020990 |
| A2 | ENSESTT00000040305 | | 13 | 99018833 | 99025134 |
| A2 | OTTHUMT00013003043 | bA113J24.1-008 | 13 | 99018834 | 99025134 |
| A2 | OTTHUMT00013003040 | bA113J24.1-005 | 13 | 99018996 | 99020990 |
| A2 | OTTHUMT00013003066 | bA430M15.1-001 | 13 | 99058580 | 99409639 |
| A2 | OTTHUMT00013003062 | bA190K16.2-001 | 13 | 99106806 | 99107314 |
| A2 | ENST00000310576 | | 13 | 99106812 | 99107311 |
| A2 | ENST00000310558 | Q9BXE6 | 13 | 99111961 | 99112335 |
| A2 | OTTHUMT00013003064 | bA118F16.1-001 | 13 | 99291117 | 99294619 |
| A3 | ENSESTT00000026233 | | 5 | 175066018 | 175091447 |
| A3 | ENST00000231683 | HRH2 | 5 | 175091160 | 175092239 |
| A3 | ENST00000274620 | CPLX2 | 5 | 175204533 | 175288154 |
| A3 | ENST00000274615 | Q96NN7 | 5 | 175288871 | 175289290 |
| A3 | ENST00000334259 | Q8N9L3 | 5 | 175289858 | 175290319 |
| A3 | ENST00000265097 | THOC3 | 5 | 175367459 | 175376203 |
| A3 | ENST00000333723 | | 5 | 175414077 | 175415294 |
| A3 | ENST00000331171 | | 5 | 175414077 | 175415309 |
| A3 | ENST00000330220 | | 5 | 175414083 | 175415294 |
| A3 | ENST00000253490 | Q8TBX6 | 5 | 175492772 | 175517499 |
| A3 | ENSESTT00000026234 | | 5 | 175492798 | 175504815 |
| A3 | ENSESTT00000026235 | | 5 | 175514024 | 175528803 |
| A3 | ENSESTT00000026236 | | 5 | 175531948 | 175533047 |
| A3 | ENSESTT00000026237 | | 5 | 175532319 | 175534252 |
| A3 | ENSESTT00000026238 | | 5 | 175646358 | 175697849 |
| A3 | ENSESTT00000026239 | | 5 | 175646582 | 175697880 |
| A3 | ENST00000303137 | Q8NDZ2 | 5 | 175671357 | 175753911 |
| A3 | ENSESTT00000026240 | | 5 | 175702967 | 175753921 |
| A3 | ENST00000330147 | | 5 | 175714285 | 175714659 |
| A3 | ENST00000332772 | Q8IZ15 | 5 | 175721351 | 175753371 |
| A3 | ENST00000298569 | NM_020444 | 5 | 175753991 | 175769668 |
| A3 | ENSESTT00000026241 | | 5 | 175755867 | 175762014 |
| A3 | ENSESTT00000026242 | | 5 | 175758565 | 175763625 |
| A3 | ENST00000310389 | NM_173664 | 5 | 175773428 | 175781426 |
| A3 | ENSESTT00000026243 | | 5 | 175773498 | 175776896 |
| A3 | ENST00000327101 | CGB7_HUMAN | 5 | 175791865 | 175796511 |
| A3 | ENSESTT00000026244 | | 5 | 175795923 | 175797685 |
| A3 | ENST00000274787 | NM_138820 | 5 | 175796696 | 175797683 |
| A3 | ENSESTT00000026253 | | 5 | 175800471 | 175824467 |
| A3 | ENST00000310407 | CLTB | 5 | 175800698 | 175824287 |
| A3 | ENST00000310418 | NM_001834 | 5 | 175800698 | 175824287 |
| A3 | ENSESTT00000026254 | | 5 | 175800716 | 175824462 |
| A3 | ENSESTT00000026246 | | 5 | 175856279 | 175904920 |
| A3 | ENSESTT00000026245 | | 5 | 175856279 | 175915561 |
| A3 | ENST00000261942 | NM_014613 | 5 | 175856301 | 175917997 |
| A3 | ENSESTT00000026247 | | 5 | 175856353 | 175861483 |
| A3 | ENSESTT00000026248 | | 5 | 175907924 | 175914952 |
| A3 | ENST00000274811 | RNF44 | 5 | 175934638 | 175940396 |
| A3 | ENSESTT00000026249 | | 5 | 175957282 | 175983069 |
| A3 | ENST00000261944 | NM_017675 | 5 | 175957315 | 176003596 |
| A3 | ENSESTT00000026250 | | 5 | 175986469 | 175992466 |
| A3 | ENSESTT00000026251 | | 5 | 175994575 | 176000693 |
| A3 | ENSESTT00000026252 | | 5 | 175994607 | 176000693 |
| A3 | ENST00000303991 | NM_052899 | 5 | 176003728 | 176018054 |
| A3 | ENST00000335532 | Q96PZ4 | 5 | 176004664 | 176007764 |
| A3 | ENST00000310112 | SNCB | 5 | 176028134 | 176037898 |
| A3 | ENST00000318682 | | 5 | 176051522 | 176053904 |
| A3 | ENSESTT00000025931 | | 5 | 176052504 | 176054064 |
| A3 | ENST00000310032 | Q96S98 | 5 | 176055391 | 176066978 |
| A3 | ENSESTT00000025934 | | 5 | 176055433 | 176064052 |
| A3 | ENSESTT00000025933 | | 5 | 176055433 | 176065755 |
| A3 | ENSESTT00000025932 | | 5 | 176055433 | 176065798 |
| A3 | ENST00000274797 | FBXO23 | 5 | 176055504 | 176060711 |
| A3 | ENSESTT00000025937 | | 5 | 176055510 | 176064052 |
| A3 | ENSESTT00000025936 | | 5 | 176055510 | 176065755 |
| A3 | ENSESTT00000025935 | | 5 | 176055510 | 176065798 |
| A3 | ENST00000298564 | Q96FV3 | 5 | 176055540 | 176064848 |
| A3 | ENSESTT00000025938 | | 5 | 176059752 | 176065560 |
| A3 | ENST00000318314 | Q9H7Q1 | 5 | 176062303 | 176065622 |
| A3 | ENST00000329542 | | 5 | 176270544 | 176282324 |
| A3 | ENSESTT00000025945 | | 5 | 176276066 | 176278347 |
| A3 | ENST00000261961 | Q96GP4 | 5 | 176281909 | 176287810 |
| A3 | ENSESTT00000025946 | | 5 | 176281927 | 176285515 |
| A3 | ENST00000292432 | HK3 | 5 | 176288997 | 176304083 |
| A3 | ENST00000323774 | Q9BZR1 | 5 | 176313206 | 176377614 |
| A3 | ENST00000274827 | NM_016290 | 5 | 176313206 | 176390539 |
| A3 | ENSESTT00000025947 | | 5 | 176323181 | 176337765 |
| A3 | ENST00000261948 | NM_012279 | 5 | 176430663 | 176472523 |
| A3 | ENSESTT00000025948 | | 5 | 176430665 | 176472752 |
| A3 | ENSESTT00000025949 | | 5 | 176452251 | 176458816 |
| A3 | ENSESTT00000025951 | | 5 | 176494862 | 176499035 |
| A3 | ENSESTT00000025950 | | 5 | 176494862 | 176500300 |
| A3 | ENSESTT00000025952 | | 5 | 176494947 | 176500300 |
| A3 | ENST00000292408 | FGFR4 | 5 | 176497522 | 176505600 |
| A3 | ENST00000292410 | NM_022963 | 5 | 176497527 | 176505600 |
| A3 | ENSESTT00000025956 | | 5 | 176500568 | 176504578 |
| A3 | ENSESTT00000025957 | | 5 | 176501099 | 176504578 |
| A3 | ENSESTT00000025958 | | 5 | 176505115 | 176506050 |
| A3 | ENSESTT00000025959 | | 5 | 176505286 | 176507234 |
| A3 | ENSESTT00000025960 | | 5 | 176541049 | 176612169 |
| A3 | ENST00000298507 | NSD1 | 5 | 176543028 | 176703698 |
| A3 | ENSESTT00000025961 | | 5 | 176543093 | 176545330 |
| A3 | ENSESTT00000025963 | | 5 | 176612187 | 176617686 |
| A3 | ENSESTT00000025966 | | 5 | 176619693 | 176654715 |
| A3 | ENST00000312855 | | 5 | 176673510 | 176674522 |
| A3 | ENSESTT00000025977 | | 5 | 176699894 | 176702992 |
| A3 | ENSESTT00000025979 | | 5 | 176709391 | 176710012 |
| A3 | ENST00000303270 | RAB24 | 5 | 176709392 | 176711227 |
| A3 | ENSESTT00000025981 | | 5 | 176711722 | 176714120 |
| A3 | ENSESTT00000025980 | | 5 | 176711722 | 176714888 |
| A3 | ENST00000303204 | PX19_HUMAN | 5 | 176711736 | 176714888 |
| A3 | ENST00000303182 | Q96ME3 | 5 | 176715058 | 176719769 |
| A3 | ENST00000303165 | MXD3 | 5 | 176715151 | 176719769 |
| A3 | ENST00000303127 | LMAN2 | 5 | 176739703 | 176759624 |
| A3 | ENSESTT00000025989 | | 5 | 176765891 | 176779165 |
| A3 | ENST00000303066 | RGS14 | 5 | 176765973 | 176780117 |
| A3 | ENSESTT00000025990 | | 5 | 176775288 | 176776866 |
| A3 | ENSESTT00000025991 | | 5 | 176779454 | 176780554 |
| A3 | ENSESTT00000025992 | | 5 | 176792400 | 176794461 |
| A3 | ENST00000324417 | SLC34A1 | 5 | 176792400 | 176806801 |
| A3 | ENSESTT00000025994 | | 5 | 176804912 | 176806144 |
| A3 | ENST00000319628 | | 5 | 176808126 | 176808530 |
| A3 | ENST00000253496 | F12 | 5 | 176810246 | 176817481 |
| A3 | ENSESTT00000025997 | | 5 | 176834655 | 176841379 |
| A3 | ENSESTT00000026002 | | 5 | 176834669 | 176842058 |
| A3 | ENSESTT00000026001 | | 5 | 176834669 | 176844638 |
| A3 | ENSESTT00000025999 | | 5 | 176834669 | 176849007 |
| A3 | ENSESTT00000026000 | | 5 | 176834669 | 176849007 |
| A3 | ENSESTT00000025998 | | 5 | 176834669 | 176850575 |
| A3 | ENST00000230673 | GPRK6 | 5 | 176834797 | 176849743 |
| A3 | ENSESTT00000026007 | | 5 | 176841092 | 176842058 |
| A3 | ENSESTT00000026006 | | 5 | 176841092 | 176844638 |
| A3 | ENSESTT00000026004 | | 5 | 176841092 | 176849007 |
| A3 | ENSESTT00000026005 | | 5 | 176841092 | 176849007 |
| A3 | ENSESTT00000026003 | | 5 | 176841092 | 176850575 |
| A3 | ENSESTT00000025996 | | 5 | 176842854 | 176844638 |
| A3 | ENSESTT00000025995 | | 5 | 176842854 | 176849007 |
| A3 | ENSESTT00000026008 | | 5 | 176842854 | 176850575 |
| A3 | ENST00000323249 | NM_030567 | 5 | 176854746 | 176864135 |
| A3 | ENSESTT00000026009 | | 5 | 176854894 | 176864139 |
| A3 | ENST00000309007 | DBN1 | 5 | 176864466 | 176881467 |
| A3 | ENST00000292385 | NM_080881 | 5 | 176865288 | 176880013 |
| A3 | ENST00000327525 | NM_005451 | 5 | 176891199 | 176905416 |
| A3 | ENST00000328562 | Q14250 | 5 | 176891449 | 176904318 |
| A3 | ENST00000330043 | Q9BXB9 | 5 | 176891449 | 176904318 |
| A3 | ENSESTT00000026018 | | 5 | 176891939 | 177031673 |
| A3 | ENSESTT00000026017 | | 5 | 176897221 | 177038162 |
| A3 | ENSESTT00000026016 | | 5 | 176897716 | 177038203 |
| A3 | ENST00000330641 | Q96C91 | 5 | 176898295 | 176904318 |
| A3 | ENST00000331981 | Q9BXB8 | 5 | 176898906 | 176904318 |
| A3 | ENST00000312943 | Q9BQB3 | 5 | 176909731 | 176916090 |
| A3 | ENST00000274826 | NM_024872 | 5 | 176911807 | 176917676 |
| A3 | ENST00000330503 | DDX41 | 5 | 176919402 | 176924661 |
| A3 | ENSESTT00000026010 | | 5 | 176926890 | 176943796 |
| A3 | ENST00000329540 | NM_019057 | 5 | 176926890 | 176961637 |
| A3 | ENSESTT00000026015 | | 5 | 176945068 | 177094067 |
| A3 | ENSESTT00000026011 | | 5 | 176999291 | 177002623 |
| A3 | ENSESTT00000026013 | | 5 | 176999295 | 177133284 |
| A3 | ENSESTT00000026012 | | 5 | 176999295 | 177136090 |
| A3 | ENST00000328179 | NM_017510 | 5 | 176999300 | 177003200 |
| A3 | ENSESTT00000026014 | | 5 | 176999308 | 177136081 |
| A3 | ENSESTT00000035756 | | 5 | 177000737 | 177003218 |
| A3 | ENSESTT00000035757 | | 5 | 177000783 | 177136346 |
| A3 | ENSESTT00000035758 | | 5 | 177001245 | 177136718 |
| A3 | ENSESTT00000035760 | | 5 | 177007252 | 177150698 |
| A3 | ENST00000333469 | NM_005451 | 5 | 177023996 | 177038192 |
| A3 | ENSESTT00000035801 | | 5 | 177024173 | 177038191 |
| A3 | ENST00000292374 | Q14250 | 5 | 177024246 | 177037114 |
| A3 | ENST00000331561 | Q9BXB9 | 5 | 177024246 | 177037114 |
| A3 | ENST00000331867 | Q96C91 | 5 | 177031099 | 177037114 |
| A3 | ENSESTT00000035800 | | 5 | 177031469 | 177038195 |
| A3 | ENSESTT00000035802 | | 5 | 177031684 | 177037209 |
| A3 | ENST00000332347 | Q9BXB8 | 5 | 177031702 | 177037114 |
| A3 | ENST00000331704 | | 5 | 177042509 | 177048868 |
| A3 | ENST00000333364 | NM_024872 | 5 | 177044585 | 177050454 |
| A3 | ENSESTT00000035798 | | 5 | 177045241 | 177050448 |
| A3 | ENSESTT00000035797 | | 5 | 177045345 | 177050987 |
| A3 | ENSESTT00000035799 | | 5 | 177045385 | 177050435 |
| A3 | ENST00000330228 | DDX41 | 5 | 177052393 | 177057440 |
| A3 | ENSESTT00000035796 | | 5 | 177060391 | 177064902 |
| A3 | ENSESTT00000035761 | | 5 | 177060392 | 177077299 |
| A3 | ENST00000274788 | NM_019057 | 5 | 177060394 | 177072665 |
| A3 | ENSESTT00000035795 | | 5 | 177065352 | 177077000 |
| A3 | ENSESTT00000035794 | | 5 | 177078577 | 177094163 |
| A3 | ENSESTT00000035759 | | 5 | 177132801 | 177136335 |
| A3 | ENST00000332598 | NM_017510 | 5 | 177132810 | 177136711 |
| A3 | ENST00000029410 | B4GALT7 | 5 | 177140813 | 177150931 |
| A3 | ENSESTT00000035762 | | 5 | 177151883 | 177159317 |
| A3 | ENST00000302857 | Q9HAI8 | 5 | 177159504 | 177159962 |
| A3 | ENST00000318185 | | 5 | 177166961 | 177173303 |
| A3 | ENST00000303108 | NM_173663 | 5 | 177263967 | 177321278 |
| A3 | ENST00000324610 | | 5 | 177269572 | 177285570 |
| A3 | ENSESTT00000035793 | | 5 | 177281869 | 177293899 |
| A3 | ENST00000329355 | Q8TE30 | 5 | 177314834 | 177318658 |
| A3 | ENST00000331417 | | 5 | 177377030 | 177378248 |
| A3 | ENST00000328082 | | 5 | 177377030 | 177378266 |
| A3 | ENST00000303154 | THOC3 | 5 | 177416128 | 177424868 |
| A3 | ENSESTT00000035763 | | 5 | 177416183 | 177424870 |
| A3 | ENST00000332215 | Q9H7L9 | 5 | 177511798 | 177512883 |
| A3 | ENST00000308304 | PROP1 | 5 | 177532838 | 177536844 |
| A3 | ENSESTT00000035764 | | 5 | 177582334 | 177589578 |
| A3 | ENSESTT00000035765 | | 5 | 177589720 | 177594471 |
| A3 | ENSESTT00000035766 | | 5 | 177593021 | 177594534 |
| A3 | ENST00000332649 | | 5 | 177596176 | 177596784 |
| A3 | ENST00000274605 | Y341_HUMAN | 5 | 177654157 | 177663002 |
| A3 | ENSESTT00000035767 | | 5 | 177660981 | 177662330 |
| A3 | ENST00000313376 | YE01_HUMAN | 5 | 177671613 | 177689151 |
| A3 | ENSESTT00000035769 | | 5 | 177671744 | 177688239 |
| A3 | ENSESTT00000035768 | | 5 | 177671744 | 177689170 |
| A3 | ENSESTT00000035770 | | 5 | 177684377 | 177689170 |
| A3 | ENSESTT00000035792 | | 5 | 177690065 | 177694571 |
| A3 | ENST00000274606 | NOLA2 | 5 | 177690069 | 177694497 |
| A3 | ENST00000327842 | NM_022471 | 5 | 177726321 | 177727901 |
| A3 | ENST00000261953 | HNRPAB | 5 | 177745109 | 177751782 |
| A3 | ENSESTT00000035781 | | 5 | 177745132 | 177746614 |
| A3 | ENSESTT00000035779 | | 5 | 177745132 | 177751397 |
| A3 | ENSESTT00000035780 | | 5 | 177745132 | 177751397 |
| A3 | ENSESTT00000035777 | | 5 | 177745132 | 177751563 |
| A3 | ENSESTT00000035778 | | 5 | 177745132 | 177751563 |
| A3 | ENSESTT00000035771 | | 5 | 177745132 | 177751762 |
| A3 | ENSESTT00000035772 | | 5 | 177745132 | 177751762 |
| A3 | ENSESTT00000035773 | | 5 | 177745132 | 177751762 |
| A3 | ENSESTT00000035774 | | 5 | 177745132 | 177751762 |
| A3 | ENSESTT00000035775 | | 5 | 177745132 | 177751762 |
| A3 | ENSESTT00000035776 | | 5 | 177745132 | 177751762 |
| A3 | ENST00000307328 | NM_004499 | 5 | 177745440 | 177751225 |
| A3 | ENSESTT00000035782 | | 5 | 177746443 | 177751762 |
| A3 | ENSESTT00000035783 | | 5 | 177747326 | 177751762 |
| A3 | ENSESTT00000035790 | | 5 | 177749103 | 177770674 |
| A3 | ENSESTT00000035787 | | 5 | 177749103 | 177772179 |
| A3 | ENST00000308158 | NM_032921 | 5 | 177749186 | 177773152 |
| A3 | ENSESTT00000035791 | | 5 | 177749189 | 177763185 |
| A3 | ENSESTT00000035788 | | 5 | 177749189 | 177772179 |
| A3 | ENSESTT00000035789 | | 5 | 177749225 | 177772179 |
| A3 | ENSESTT00000035784 | | 5 | 177750732 | 177751762 |
| A3 | ENSESTT00000035786 | | 5 | 177779162 | 177788865 |
| A3 | ENSESTT00000035785 | | 5 | 177891469 | 177892852 |
| A3 | ENSESTT00000025813 | | 5 | 178143370 | 178154143 |
| A3 | ENST00000316308 | CLK4 | 5 | 178144219 | 178171217 |
| A3 | ENSESTT00000025820 | | 5 | 178153016 | 178159432 |
| A3 | ENSESTT00000025818 | | 5 | 178153016 | 178167610 |
| A3 | ENSESTT00000025819 | | 5 | 178157479 | 178160721 |
| A3 | ENSESTT00000025816 | | 5 | 178157835 | 178167668 |
| A3 | ENSESTT00000025814 | | 5 | 178158920 | 178171217 |
| A3 | ENSESTT00000025815 | | 5 | 178159118 | 178167738 |
| A3 | ENSESTT00000025817 | | 5 | 178160838 | 178167632 |
| A3 | ENST00000306591 | ZNF354A | 5 | 178252662 | 178269624 |
| A3 | ENSESTT00000025812 | | 5 | 178267657 | 178269949 |
| A3 | ENSESTT00000025811 | | 5 | 178307485 | 178309124 |
| A3 | ENST00000331699 | | 5 | 178307800 | 178322947 |
| A3 | ENSESTT00000025799 | | 5 | 178400555 | 178423360 |
| A3 | ENST00000322434 | ZNF354B | 5 | 178400555 | 178425630 |
| A3 | ENSESTT00000025800 | | 5 | 178401325 | 178406916 |
| A3 | ENST00000320451 | ZNF271 | 5 | 178472120 | 178473301 |
| A3 | ENST00000320129 | ZNF454 | 5 | 178481825 | 178507035 |
| A3 | ENSESTT00000025801 | | 5 | 178483299 | 178505397 |
| A3 | ENST00000319065 | Q8NHA9 | 5 | 178505697 | 178533033 |
| A3 | ENSESTT00000025802 | | 5 | 178509517 | 178530722 |
| A3 | ENST00000231188 | GRM6 | 5 | 178522259 | 178535546 |
| A3 | ENSESTT00000025810 | | 5 | 178535880 | 178536808 |
| A3 | ENSESTT00000025803 | | 5 | 178564407 | 178573529 |
| A3 | ENST00000315475 | ZNF354C | 5 | 178601202 | 178621290 |
| A3 | ENSESTT00000025809 | | 5 | 178623365 | 178624025 |
| A3 | ENSESTT00000025808 | | 5 | 178653824 | 178654193 |
| A3 | ENSESTT00000025806 | | 5 | 178654498 | 178665387 |
| A3 | ENSESTT00000025807 | | 5 | 178661813 | 178663369 |
| A3 | ENST00000251582 | ADAMTS2 | 5 | 178662264 | 178699481 |
| A3 | ENST00000274609 | ADAMTS2 | 5 | 178691731 | 178885702 |
| A3 | ENSESTT00000025805 | | 5 | 178692740 | 178699439 |
| A3 | ENSESTT00000025804 | | 5 | 178917905 | 178919135 |
| A3 | ENSESTT00000035851 | | 5 | 179043326 | 179055582 |
| A3 | ENSESTT00000035852 | | 5 | 179090766 | 179129747 |
| A3 | ENSESTT00000035853 | | 5 | 179099890 | 179129747 |
| A3 | ENSESTT00000035854 | | 5 | 179099924 | 179129747 |
| A3 | ENST00000319449 | | 5 | 179100164 | 179146212 |
| A3 | ENSESTT00000035855 | | 5 | 179100278 | 179107690 |
| A3 | ENSESTT00000035856 | | 5 | 179107577 | 179131807 |
| A3 | ENSESTT00000035857 | | 5 | 179133252 | 179146705 |
| A3 | ENST00000319571 | NM_030970 | 5 | 179140510 | 179140581 |
| A3 | ENST00000258707 | | 5 | 179148300 | 179148368 |
| A3 | ENSESTT00000035915 | | 5 | 179150871 | 179154755 |
| A3 | ENSESTT00000035916 | | 5 | 179150871 | 179154755 |
| A3 | ENSESTT00000035908 | | 5 | 179150871 | 179160390 |
| A3 | ENSESTT00000035909 | | 5 | 179150871 | 179160390 |
| A3 | ENST00000326748 | HNRPH1 | 5 | 179150872 | 179160359 |
| A3 | ENSESTT00000035918 | | 5 | 179151147 | 179154344 |
| A3 | ENSESTT00000035910 | | 5 | 179151147 | 179160390 |
| A3 | ENSESTT00000035917 | | 5 | 179151282 | 179154755 |
| A3 | ENSESTT00000035911 | | 5 | 179151282 | 179160390 |
| A3 | ENST00000329433 | | 5 | 179152814 | 179157705 |
| A3 | ENSESTT00000035914 | | 5 | 179154867 | 179159858 |
| A3 | ENSESTT00000035912 | | 5 | 179154867 | 179160364 |
| A3 | ENSESTT00000035913 | | 5 | 179157887 | 179160362 |
| A3 | ENST00000331874 | Q8NA96 | 5 | 179176906 | 179177448 |
| A3 | ENSESTT00000035858 | | 5 | 179184188 | 179186866 |
| A3 | ENST00000328856 | Q86VE1 | 5 | 179184188 | 179187649 |
| A3 | ENSESTT00000035859 | | 5 | 179215326 | 179231463 |
| A3 | ENSESTT00000035907 | | 5 | 179215692 | 179217634 |
| A3 | ENST00000329156 | | 5 | 179230857 | 179231354 |
| A3 | ENSESTT00000035861 | | 5 | 179235589 | 179245048 |
| A3 | ENSESTT00000035860 | | 5 | 179235589 | 179267552 |
| A3 | ENST00000247461 | CANX | 5 | 179235655 | 179267584 |
| A3 | ENSESTT00000035865 | | 5 | 179240421 | 179242025 |
| A3 | ENSESTT00000035862 | | 5 | 179243792 | 179267552 |
| A3 | ENSESTT00000035863 | | 5 | 179246533 | 179256391 |
| A3 | ENSESTT00000035864 | | 5 | 179263334 | 179267552 |
| A3 | ENST00000292599 | MAML1 | 5 | 179269772 | 179313948 |
| A3 | ENSESTT00000035866 | | 5 | 179303154 | 179307853 |
| A3 | ENST00000298607 | NM_024978 | 5 | 179314421 | 179314996 |
| A3 | ENST00000292596 | LTC4S | 5 | 179330648 | 179333175 |
| A3 | ENSESTT00000035868 | | 5 | 179330696 | 179333148 |
| A3 | ENSESTT00000035869 | | 5 | 179330774 | 179333175 |
| A3 | ENSESTT00000035870 | | 5 | 179332229 | 179332994 |
| A3 | ENSESTT00000035867 | | 5 | 179332243 | 179333174 |
| A3 | ENST00000292591 | MGAT4B | 5 | 179334262 | 179343246 |
| A3 | ENSESTT00000035906 | | 5 | 179334633 | 179337617 |
| A3 | ENSESTT00000035901 | | 5 | 179334633 | 179338133 |
| A3 | ENSESTT00000035902 | | 5 | 179334633 | 179338133 |
| A3 | ENSESTT00000035895 | | 5 | 179334633 | 179343595 |
| A3 | ENSESTT00000035903 | | 5 | 179334876 | 179338133 |
| A3 | ENSESTT00000035904 | | 5 | 179334883 | 179338133 |
| A3 | ENSESTT00000035900 | | 5 | 179334883 | 179342992 |
| A3 | ENSESTT00000035896 | | 5 | 179334883 | 179343595 |
| A3 | ENSESTT00000035897 | | 5 | 179334883 | 179343595 |
| A3 | ENSESTT00000035905 | | 5 | 179335007 | 179333133 |
| A3 | ENSESTT00000035898 | | 5 | 179335007 | 179343595 |
| A3 | ENSESTT00000035899 | | 5 | 179337988 | 179343595 |
| A3 | ENSESTT00000035871 | | 5 | 179357567 | 179374487 |
| A3 | ENST00000292588 | SQSTM1 | 5 | 179357599 | 179373255 |
| A3 | ENSESTT00000035894 | | 5 | 179370411 | 179373916 |
| A3 | ENST00000292586 | NM_016175 | 5 | 179373936 | 179378682 |
| A3 | ENSESTT00000035893 | | 5 | 179373938 | 179395443 |
| A3 | ENST00000328625 | NM_016175 | 5 | 179374053 | 179395458 |
| A3 | ENST00000261956O75163 | | 5 | 179398735 | 179444516 |
| A3 | ENST00000312107 | NM_015043 | 5 | 179400110 | 179407115 |
| A3 | ENSESTT00000035892 | | 5 | 179400203 | 179402065 |
| A3 | ENSESTT00000035891 | | 5 | 179400212 | 179402552 |
| A3 | ENSESTT00000035890 | | 5 | 179400359 | 179404512 |
| A3 | ENSESTT00000035889 | | 5 | 179409551 | 179415194 |
| A3 | ENSESTT00000035887 | | 5 | 179415747 | 179444521 |
| A3 | ENSESTT00000035888 | | 5 | 179416330 | 179444521 |
| A3 | ENSESTT00000035886 | | 5 | 179492143 | 179507146 |
| A3 | ENSESTT00000035885 | | 5 | 179492144 | 179514948 |
| A3 | ENSESTT00000035884 | | 5 | 179492144 | 179549976 |
| A3 | ENSESTT00000035881 | | 5 | 179492144 | 179608429 |
| A3 | ENST00000261947 | RNF130 | 5 | 179492168 | 179608763 |
| A3 | ENSESTT00000035882 | | 5 | 179514859 | 179608429 |
| A3 | ENSESTT00000035883 | | 5 | 179516790 | 179608429 |
| A3 | ENST00000332144 | | 5 | 179622379 | 179623665 |
| A3 | ENST00000274820 | NM_175062 | 5 | 179638729 | 179745830 |
| A3 | ENST00000316131 | | 5 | 179763049 | 179763664 |
| A3 | ENSESTT00000035880 | | 5 | 179772812 | 179779418 |
| A3 | ENSESTT00000035877 | | 5 | 179772812 | 179817172 |
| A3 | ENST00000057533 | NM_139069 | 5 | 179773046 | 179817223 |
| A3 | ENST00000316123 | MAPK9 | 5 | 179773046 | 179817223 |
| A3 | ENSESTT00000035879 | | 5 | 179783749 | 179798444 |
| A3 | ENSESTT00000035878 | | 5 | 179790169 | 179801503 |
| A3 | ENST00000328081 | | 5 | 179794621 | 179796637 |
| A3 | ENSESTT00000035876 | | 5 | 179816486 | 179828537 |
| A3 | ENST00000253778 | GFPT2 | 5 | 179837361 | 179875263 |
| A3 | ENSESTT00000035874 | | 5 | 179837891 | 179868310 |
| A3 | ENSESTT00000035875 | | 5 | 179861517 | 179867483 |
| A3 | ENSESTT00000035873 | | 5 | 179868152 | 179889985 |
| A3 | ENSESTT00000035872 | | 5 | 179872531 | 179889987 |
| A3 | ENST00000261951 | NM_015455 | 5 | 180065924 | 180110862 |
| A3 | ENSESTT00000035640 | | 5 | 180065968 | 180087268 |
| A3 | ENSESTT00000035639 | | 5 | 180065968 | 180101184 |
| A3 | ENST00000332929 | Q8TAJ0 | 5 | 180112873 | 180113151 |
| A3 | ENSESTT00000035680 | | 5 | 180126767 | 180128147 |
| A3 | ENST00000292641 | SCGB3A1 | 5 | 180126768 | 180128145 |
| A3 | ENSESTT00000035679 | | 5 | 180139821 | 180148082 |
| A3 | ENST00000261937 | FLT4 | 5 | 180145626 | 180186207 |
| A3 | ENSESTT00000035678 | | 5 | 180162667 | 180166645 |
| A3 | ENSESTT00000035677 | | 5 | 180166890 | 180186286 |
| A3 | ENST00000315712 | Q8NHB0 | 5 | 180229572 | 180230422 |
| A3 | ENST00000307832 | Q8NGV0 | 5 | 180275785 | 180276720 |
| A3 | ENSESTT00000035676 | | 5 | 180327203 | 180328628 |
| A3 | ENSESTT00000035675 | | 5 | 180327203 | 180328768 |
| A3 | ENST00000333055 | MGAT1 | 5 | 180327210 | 180352203 |
| A3 | ENSESTT00000035663 | | 5 | 180327543 | 180339485 |
| A3 | ENST00000307826 | Q8NBL8 | 5 | 180328296 | 180329633 |
| A3 | ENSESTT00000035662 | | 5 | 180329112 | 180339503 |
| A3 | ENSESTT00000035659 | | 5 | 180329155 | 180345445 |
| A3 | ENSESTT00000035661 | | 5 | 180329332 | 180340541 |
| A3 | ENSESTT00000035665 | | 5 | 180332068 | 180352229 |
| A3 | ENSESTT00000035664 | | 5 | 180332092 | 180339429 |
| A3 | ENSESTT00000035660 | | 5 | 180332309 | 180345357 |
| A3 | ENSESTT00000035658 | | 5 | 180344545 | 180346738 |
| A3 | ENSESTT00000035666 | | 5 | 180345508 | 180352200 |
| A3 | ENSESTT00000035657 | | 5 | 180345511 | 180346792 |
| A3 | ENSESTT00000035673 | | 5 | 180384273 | 180397228 |
| A3 | ENSESTT00000035672 | | 5 | 180384335 | 180397947 |
| A3 | ENST00000330037 | NM_152283 | 5 | 180385559 | 180387766 |
| A3 | ENST00000302108 | | 5 | 180386417 | 180388132 |
| A3 | ENSESTT00000035674 | | 5 | 180387577 | 180397213 |
| A3 | ENST00000231229 | NM_024850 | 5 | 180435821 | 180487566 |
| A3 | ENSESTT00000035641 | | 5 | 180435955 | 180448194 |
| A3 | ENSESTT00000035642 | | 5 | 180448211 | 180487568 |
| A3 | ENST00000301996 | BTNL3 | 5 | 180525529 | 180543025 |
| A3 | ENST00000298708 | NM_152547 | 5 | 180582152 | 180590225 |
| A3 | ENSESTT00000035643 | | 5 | 180589782 | 180591964 |
| A3 | ENST00000327705 | Q8N324 | 5 | 180590141 | 180598180 |
| A3 | ENSESTT00000035644 | | 5 | 180592305 | 180595974 |
| A3 | ENST00000328095 | | 5 | 180635802 | 180637319 |
| A3 | ENST00000328767 | | 5 | 180650805 | 180651920 |
| A3 | ENST00000329365 | | 5 | 180661176 | 180661966 |
| A3 | ENST00000328275 | Q8NGV1 | 5 | 180691605 | 180692552 |
| A3 | ENSESTT00000035645 | | 5 | 180728586 | 180731091 |
| A3 | ENST00000274773 | Q96J89 | 5 | 180731275 | 180736815 |
| A3 | ENSESTT00000035646 | | 5 | 180734864 | 180739766 |
| A3 | ENSESTT00000035671 | | 5 | 180739916 | 180741785 |
| A3 | ENST00000334421 | TRIM7 | 5 | 180740159 | 180741772 |
| A3 | ENST00000312487 | Q96Q10 | 5 | 180760899 | 180772041 |
| A3 | ENST00000315073 | TRIM41 | 5 | 180760917 | 180772467 |
| A3 | ENSESTT00000035647 | | 5 | 180769651 | 180772470 |
| A3 | ENSESTT00000035648 | | 5 | 180770071 | 180772470 |
| A3 | ENST00000274821 | GNB2L1 | 5 | 180773587 | 180780586 |
| A3 | ENSESTT00000035670 | | 5 | 180773591 | 180776245 |
| A3 | ENSESTT00000035649 | | 5 | 180783187 | 180783850 |
| A3 | ENSESTT00000035669 | | 5 | 180791085 | 180796857 |
| A3 | ENST00000327725 | NM_022907 | 5 | 180792443 | 180792880 |
| A3 | ENSESTT00000035668 | | 5 | 180793051 | 180796920 |
| A3 | ENSESTT00000035667 | | 5 | 180793672 | 180796987 |
| A3 | ENST00000327767 | TRIM52 | 5 | 180794077 | 180797476 |
| A3 | ENSESTT00000035652 | | 5 | 180797875 | 180800890 |
| A3 | ENSESTT00000035651 | | 5 | 180797875 | 180800918 |
| A3 | ENSESTT00000035650 | | 5 | 180797875 | 180800920 |
| A3 | ENSESTT00000035653 | | 5 | 180854088 | 180864732 |
| A3 | ENSESTT00000035654 | | 5 | 180866068 | 180886905 |
| A3 | ENST00000333864 | O4F3_HUMAN | 5 | 180903950 | 180904888 |
| A3 | ENSESTT00000035655 | | 5 | 180988607 | 180991662 |
| A3 | ENSESTT00000035656 | | 5 | 180990904 | 180991624 |
| A3 | ENST00000332522 | | 5 | 181008629 | 181009085 |
| A4 | OTTHUMT00013000706 | FLT1-001 | 13 | 26672489 | 26867232 |
| A4 | ENST00000282397 | FLT1 | 13 | 26675304 | 26867254 |
| A4 | ENSESTT00000037419 | | 13 | 26740528 | 26762136 |
| A4 | ENSESTT00000037420 | | 13 | 26749569 | 26762136 |
| A4 | ENSESTT00000037421 | | 13 | 26756741 | 26762136 |
| A4 | ENSESTT00000037417 | | 13 | 26769173 | 26810483 |
| A4 | ENSESTT00000037415 | | 13 | 26769173 | 26839090 |
| A4 | ENSESTT00000037418 | | 13 | 26772654 | 26810483 |
| A4 | ENSESTT00000037416 | | 13 | 26772654 | 26839090 |
| A4 | ENSESTT00000037414 | | 13 | 26839038 | 26867241 |
| A4 | OTTHUMT00013000708 | bA57H24.1-001 | 13 | 26970970 | 26972189 |
| A4 | ENST00000255315 | C13orf12 | 13 | 27031241 | 27051059 |
| A4 | OTTHUMT00013000710 | bA97E23.1-001 | 13 | 27031241 | 27051062 |
| A4 | OTTHUMT00013000711 | bA97E23.1-002 | 13 | 27031241 | 27051062 |
| A4 | ENSESTT00000037329 | | 13 | 27031251 | 27051047 |
| A4 | ENSESTT00000037330 | | 13 | 27031270 | 27034993 |
| A4 | ENSESTT00000037328 | | 13 | 27032876 | 27050475 |
| A4 | ENSESTT00000037342 | | 13 | 27044487 | 27050337 |
| A4 | OTTHUMT00013000715 | bA97E23.2-002 | 13 | 27072201 | 27076694 |
| A4 | ENST00000266943 | NM_181785 | 13 | 27072854 | 27090734 |
| A4 | OTTHUMT00013000714 | bA97E23.2-001 | 13 | 27072854 | 27091107 |
| A4 | ENSESTT00000037341 | | 13 | 27073385 | 27082982 |
| A4 | ENSESTT00000037340 | | 13 | 27073407 | 27085276 |
| A4 | ENSESTT00000037339 | | 13 | 27085474 | 27091111 |
| A4 | OTTHUMT00013000718 | bA97E23.3-001 | 13 | 27094523 | 27096158 |
| A4 | ENSESTT00000037338 | | 13 | 27094840 | 27095270 |
| A4 | OTTHUMT00013000720 | bA161P17.1-001 | 13 | 27150695 | 27151074 |
| A4 | ENST00000255289 | Q8N5E2 | 13 | 27397451 | 27875542 |
| A4 | OTTHUMT00013000739 | bA274A8.1-002 | 13 | 27397451 | 27875892 |
| A4 | OTTHUMT00013000726 | bA351N4.3-003 | 13 | 27611516 | 27622691 |
| A4 | OTTHUMT00013000725 | bA351N4.3-002 | 13 | 27611760 | 27622691 |
| A4 | OTTHUMT00013000724 | bA351N4.3-001 | 13 | 27611924 | 27622691 |
| A4 | ENSESTT00000037331 | | 13 | 27653849 | 27673230 |
| A4 | OTTHUMT00013000722 | bA351N4.2-001 | 13 | 27678843 | 27680052 |
| A4 | OTTHUMT00013000738 | bA274A8.1-001 | 13 | 27800764 | 27875873 |
| A4 | ENSESTT00000037332 | | 13 | 27800922 | 27869445 |
| A4 | ENST00000323380 | Q8N642 | 13 | 27848687 | 27859887 |
| A4 | OTTHUMT00013000730 | bA274A8.2-001 | 13 | 27849033 | 27859887 |
| A4 | ENSESTT00000037337 | | 13 | 27849033 | 27859887 |
| A4 | OTTHUMT00013000732 | SLC7A1-001 | 13 | 27881547 | 27967721 |
| A4 | ENST00000266949 | SLC7A1 | 13 | 27886617 | 27908325 |
| A4 | OTTHUMT00013000733 | SLC7A1-002 | 13 | 27889004 | 27891647 |
| A4 | ENSESTT00000037336 | | 13 | 27889008 | 27894543 |
| A4 | ENSESTT00000037335 | | 13 | 27894554 | 27902860 |
| A4 | ENSESTT00000037333 | | 13 | 27907953 | 27967721 |
| A4 | ENSESTT00000037334 | | 13 | 27907955 | 27958929 |
| A4 | OTTHUMT00013000734 | SLC7A1-003 | 13 | 27907961 | 27958929 |
| A4 | ENST00000330321 | Q8NI69 | 13 | 27964863 | 27965033 |
| A4 | ENST00000255303 | Q8TE30 | 13 | 28014062 | 28017889 |
| A4 | ENST00000310635 | Q9P1E1 | 13 | 28017953 | 28018969 |
| A4 | OTTHUMT00013000746 | UBL3-001 | 13 | 28136508 | 28222821 |
| A4 | ENST00000241470 | | 13 | 28136546 | 28222715 |
| A4 | ENSESTT00000037443 | | 13 | 28138914 | 28222162 |
| A4 | ENSESTT00000037445 | | 13 | 28139131 | 28144336 |
| A4 | ENSESTT00000037444 | | 13 | 28139753 | 28222162 |
| A4 | OTTHUMT00013000744 | bA90M5.2-001 | 13 | 28238096 | 28238306 |
| A4 | OTTHUMT00013000748 | bA90M5.4-001 | 13 | 28290784 | 28298788 |
| A4 | ENSESTT00000037431 | | 13 | 28310040 | 28322630 |
| A4 | ENST00000241471 | Q9H523 | 13 | 28310043 | 28322495 |
| A4 | OTTHUMT00013000742 | bA90M5.1-001 | 13 | 28310043 | 28322628 |
| A4 | OTTHUMT00013000750 | bA629E24.1-001 | 13 | 28479753 | 28481012 |
| A4 | OTTHUMT00013000752 | bA490N5.1-001 | 13 | 28526203 | 28526723 |
| A4 | OTTHUMT00013000754 | bA374F3.1-001 | 13 | 28580177 | 28679585 |
| A4 | ENSESTT00000037442 | | 13 | 28580405 | 28603509 |
| A4 | ENST00000261628 | NM_032116 | 13 | 28580617 | 28679163 |
| A4 | ENSESTT00000037439 | | 13 | 28627583 | 28655933 |
| A4 | ENSESTT00000037440 | | 13 | 28627583 | 28679620 |
| A4 | ENSESTT00000037438 | | 13 | 28627618 | 28679146 |
| A4 | ENSESTT00000037441 | | 13 | 28627625 | 28679181 |
| A4 | OTTHUMT00013000756 | bA374F3.2-001 | 13 | 28668272 | 28668860 |
| A4 | ENST00000319015 | | 13 | 28668284 | 28668872 |
| A4 | OTTHUMT00013000758 | bA374F3.3-001 | 13 | 28688497 | 28692033 |
| A4 | OTTHUMT00013000761 | bA374F3.4-002 | 13 | 28713496 | 28736232 |
| A4 | ENSESTT00000037437 | | 13 | 28713496 | 28736232 |
| A4 | OTTHUMT00013000760 | bA374F3.4-001 | 13 | 28714620 | 28737898 |
| A4 | OTTHUMT00013000763 | bA374F3.4-004 | 13 | 28729879 | 28736287 |
| A4 | OTTHUMT00013000762 | bA374F3.4-003 | 13 | 28729879 | 28749282 |
| A4 | OTTHUMT00013000764 | bA374F3.4-005 | 13 | 28735317 | 28745169 |
| A4 | OTTHUMT00013000765 | bA374F3.4-006 | 13 | 28746140 | 28749101 |
| A4 | OTTHUMT00013000772 | bA223E19.1-001 | 13 | 28800091 | 28800795 |
| A4 | ENST00000302464 | UBE2L3 | 13 | 28800128 | 28800592 |
| A4 | OTTHUMT00013000792 | bA550P23.2-001 | 13 | 28818545 | 28820625 |
| A4 | OTTHUMT00013000777 | HMGB1-004 | 13 | 28831990 | 28838109 |
| A4 | ENST00000255320 | HMGB1 | 13 | 28831997 | 28838013 |
| A4 | ENSESTT00000037436 | | 13 | 28833364 | 28838063 |
| A4 | OTTHUMT00013000774 | HMGB1-001 | 13 | 28833566 | 28836447 |
| A4 | OTTHUMT00013000775 | HMGB1-002 | 13 | 28833621 | 28836447 |
| A4 | OTTHUMT00013000776 | HMGB1-003 | 13 | 28833633 | 28838075 |
| A4 | ENSESTT00000037435 | | 13 | 28834423 | 28989492 |
| A4 | OTTHUMT00013000781 | HMGB1-008 | 13 | 28834483 | 28835401 |
| A4 | OTTHUMT00013000782 | HMGB1-009 | 13 | 28834675 | 28836526 |
| A4 | ENSESTT00000037434 | | 13 | 28834713 | 28989872 |
| A4 | OTTHUMT00013000779 | HMGB1-006 | 13 | 28834750 | 28836793 |
| A4 | OTTHUMT00013000778 | HMGB1-005 | 13 | 28835348 | 28838651 |
| A4 | OTTHUMT00013000780 | HMGB1-007 | 13 | 28835448 | 28838051 |
| A4 | OTTHUMT00013000794 | bA550P23.3-001 | 13 | 28911734 | 28915598 |
| A4 | OTTHUMT00013000796 | bA550P23.4-001 | 13 | 28913780 | 28915034 |
| A4 | OTTHUMT00013000798 | bA550P23.5-001 | 13 | 28925807 | 28926830 |
| A4 | OTTHUMT00013000801 | bA121O19.1-002 | 13 | 28989830 | 29003611 |
| A4 | ENST00000255304 | NM_005800 | 13 | 28989920 | 29031493 |
| A4 | OTTHUMT00013000800 | bA121O19.1-001 | 13 | 28989920 | 29031686 |
| A4 | ENSESTT00000037432 | | 13 | 28990053 | 29003351 |
| A4 | ENSESTT00000037433 | | 13 | 28990087 | 29003261 |
| A4 | ENSESTT00000042385 | | 13 | 29014843 | 29031687 |
| A4 | OTTHUMT00013000806 | ALOX5AP-001 | 13 | 29107645 | 29136556 |
| A4 | ENST00000255317 | ALOX5AP | 13 | 29107669 | 29136562 |
| A4 | OTTHUMT00013000807 | ALOX5AP-002 | 13 | 29114473 | 29116533 |
| A4 | OTTHUMT00013000804 | bA469L23.2-001 | 13 | 29175343 | 29182782 |
| A4 | ENSESTT00000042392 | | 13 | 29175343 | 29183024 |
| A4 | ENSESTT00000042393 | | 13 | 29202772 | 29255532 |
| A4 | OTTHUMT00013000810 | bA252M21.1-001 | 13 | 29254688 | 29255532 |
| A4 | ENSESTT00000042394 | | 13 | 29254696 | 29255532 |
| A4 | ENST00000218987 | NM_032849 | 13 | 29278328 | 29297708 |
| A4 | OTTHUMT00013000812 | bA252M21.2-001 | 13 | 29278328 | 29297709 |
| A4 | OTTHUMT00013000813 | bA252M21.2-002 | 13 | 29278843 | 29296586 |
| A4 | ENSESTT00000042395 | | 13 | 29289536 | 29297968 |
| A4 | ENSESTT00000042471 | | 13 | 29302805 | 29303625 |
| A4 | OTTHUMT00013000816 | bA252M21.3-001 | 13 | 29302814 | 29303619 |
| A4 | OTTHUMT00013000818 | bA252M21.4-001 | 13 | 29303638 | 29304723 |
| A4 | OTTHUMT00013000819 | bA252M21.4-002 | 13 | 29303766 | 29304337 |
| A4 | OTTHUMT00013000823 | bA252M21.5-002 | 13 | 29304840 | 29305327 |
| A4 | OTTHUMT00013000822 | bA252M21.5-001 | 13 | 29304840 | 29347639 |
| A4 | ENST00000320096 | NM_152325 | 13 | 29304853 | 29347044 |
| A4 | ENSESTT00000042396 | | 13 | 29329009 | 29347274 |
| A4 | OTTHUMT00013000826 | bA252M21.6-001 | 13 | 29345426 | 29349760 |
| A4 | OTTHUMT00013000828 | bA252M21.7-001 | 13 | 29367299 | 29368275 |
| A4 | OTTHUMT00013000830 | bA173P16.1-001 | 13 | 29471238 | 29487836 |
| A4 | ENSESTT00000042440 | | 13 | 29508750 | 29511044 |
| A4 | ENSESTT00000042437 | | 13 | 29508750 | 29511319 |
| A4 | ENSESTT00000042416 | | 13 | 29508750 | 29520230 |
| A4 | ENSESTT00000042418 | | 13 | 29508750 | 29520230 |
| A4 | ENSESTT00000042420 | | 13 | 29508750 | 29520230 |
| A4 | ENSESTT00000042421 | | 13 | 29508750 | 29520230 |
| A4 | ENSESTT00000042403 | | 13 | 29508750 | 29520554 |
| A4 | ENSESTT00000042405 | | 13 | 29508750 | 29520554 |
| A4 | ENSESTT00000042406 | | 13 | 29508750 | 29520554 |
| A4 | ENSESTT00000042407 | | 13 | 29508750 | 29520554 |
| A4 | ENSESTT00000042438 | | 13 | 29508750 | 29520623 |
| A4 | ENSESTT00000042443 | | 13 | 29508750 | 29520623 |
| A4 | ENSESTT00000042444 | | 13 | 29508750 | 29520623 |
| A4 | ENSESTT00000042445 | | 13 | 29508750 | 29520623 |
| A4 | ENSESTT00000042402 | | 13 | 29508750 | 29523880 |
| A4 | ENSESTT00000042404 | | 13 | 29508750 | 29523880 |
| A4 | ENSESTT00000042413 | | 13 | 29508750 | 29523880 |
| A4 | ENSESTT00000042414 | | 13 | 29508750 | 29523880 |
| A4 | ENSESTT00000042442 | | 13 | 29508762 | 29509663 |
| A4 | OTTHUMT00013000835 | bA173P16.2-004 | 13 | 29508762 | 29510705 |
| A4 | OTTHUMT00013000832 | bA173P16.2-001 | 13 | 29508765 | 29534064 |
| A4 | OTTHUMT00013000833 | bA173P16.2-002 | 13 | 29508765 | 29534064 |
| A4 | OTTHUMT00013000834 | bA173P16.2-003 | 13 | 29508765 | 29534064 |
| A4 | ENSESTT00000042441 | | 13 | 29509002 | 29511044 |
| A4 | ENSESTT00000042422 | | 13 | 29509002 | 29520230 |
| A4 | ENSESTT00000042423 | | 13 | 29509002 | 29520230 |
| A4 | ENSESTT00000042408 | | 13 | 29509002 | 29520554 |
| A4 | ENSESTT00000042409 | | 13 | 29509002 | 29520554 |
| A4 | ENSESTT00000042446 | | 13 | 29509002 | 29520623 |
| A4 | ENSESTT00000042447 | | 13 | 29509002 | 29520623 |
| A4 | ENSESTT00000042415 | | 13 | 29509002 | 29523880 |
| A4 | ENSESTT00000042417 | | 13 | 29509002 | 29523880 |
| A4 | ENST00000239887 | HSPH1 | 13 | 29509455 | 29533719 |
| A4 | ENST00000320027 | HSPH1 | 13 | 29509455 | 29533719 |
| A4 | ENSESTT00000042439 | | 13 | 29509641 | 29511319 |
| A4 | ENSESTT00000042424 | | 13 | 29510418 | 29520230 |
| A4 | ENSESTT00000042410 | | 13 | 29510418 | 29520554 |
| A4 | ENSESTT00000042448 | | 13 | 29510418 | 29520623 |
| A4 | ENSESTT00000042419 | | 13 | 29510418 | 29523880 |
| A4 | ENSESTT00000042425 | | 13 | 29510574 | 29520230 |
| A4 | ENSESTT00000042432 | | 13 | 29510574 | 29522321 |
| A4 | ENSESTT00000042428 | | 13 | 29510574 | 29523880 |
| A4 | OTTHUMT00013000836 | bA173P16.2-005 | 13 | 29510676 | 29511319 |
| A4 | ENSESTT00000042426 | | 13 | 29510913 | 29520230 |
| A4 | ENSESTT00000042427 | | 13 | 29510913 | 29520230 |
| A4 | ENSESTT00000042411 | | 13 | 29510913 | 29520554 |
| A4 | ENSESTT00000042449 | | 13 | 29510913 | 29520623 |
| A4 | ENSESTT00000042433 | | 13 | 29510913 | 29522321 |
| A4 | ENSESTT00000042429 | | 13 | 29510913 | 29523880 |
| A4 | ENSESTT00000042430 | | 13 | 29510913 | 29523880 |
| A4 | ENSESTT00000042436 | | 13 | 29515928 | 29520230 |
| A4 | ENSESTT00000042412 | | 13 | 29515928 | 29520554 |
| A4 | ENSESTT00000042401 | | 13 | 29515928 | 29520623 |
| A4 | ENSESTT00000042434 | | 13 | 29515928 | 29522321 |
| A4 | ENSESTT00000042431 | | 13 | 29515928 | 29523880 |
| A4 | ENSESTT00000042435 | | 13 | 29520095 | 29522321 |
| A4 | ENSESTT00000042400 | | 13 | 29527641 | 29534068 |
| A4 | ENSESTT00000042399 | | 13 | 29527667 | 29534489 |
| A4 | ENSESTT00000042397 | | 13 | 29572112 | 29633161 |
| A4 | OTTHUMT00013000842 | bA367C11.1-001 | 13 | 29572112 | 29704409 |
| A4 | ENSESTT00000042398 | | 13 | 29632535 | 29656892 |
| A4 | OTTHUMT00013000843 | bA367C11.1-002 | 13 | 29632544 | 29656892 |
| A4 | ENST00000310319 | Q9P1E1 | 13 | 29675357 | 29676373 |
| A4 | OTTHUMT00013000846 | bA367C11.2-001 | 13 | 29683426 | 29685058 |
| A4 | ENST00000298386 | LGR8_HUMAN | 13 | 30111674 | 30175009 |
| A4 | OTTHUMT00013000848 | bA432E15.1-001 | 13 | 30111679 | 30175009 |
| A4 | ENSESTT00000037457 | | 13 | 30218905 | 30325581 |
| A4 | ENSESTT00000037458 | | 13 | 30218972 | 30324856 |
| A4 | OTTHUMT00013000850 | Em:AC002525.1-001 | 13 | 30324632 | 30325609 |
| A4 | ENST00000306722 | | 13 | 30324717 | 30325498 |
| A4 | OTTHUMT00013000852 | bA207N4.2-001 | 13 | 30397451 | 30403776 |
| A4 | OTTHUMT00013000854 | bA37E23.1-001 | 13 | 30403437 | 30668794 |
| A4 | ENSESTT00000037459 | | 13 | 30403557 | 30451064 |
| A4 | OTTHUMT00013000855 | bA37E23.1-002 | 13 | 30403692 | 30410757 |
| A4 | ENSESTT00000037460 | | 13 | 30403692 | 30410757 |
| A4 | ENST00000318671 | Q9H551 | 13 | 30403933 | 30474153 |
| A4 | OTTHUMT00013000856 | bA37E23.1-003 | 13 | 30433001 | 30489607 |
| A4 | ENST00000267067 | Q99993 | 13 | 30457981 | 30529546 |
| A4 | ENSESTT00000037461 | | 13 | 30533334 | 30543341 |
| A4 | ENSESTT00000037462 | | 13 | 30545609 | 30551036 |
| A4 | ENST00000261575 | NM_023037 | 13 | 30574067 | 30667597 |
| A4 | ENSESTT00000037446 | | 13 | 30603413 | 30668738 |
| A4 | ENSESTT00000037447 | | 13 | 30606797 | 30609886 |
| A4 | OTTHUMT00013000858 | bA37E23.1-005 | 13 | 30621676 | 30650976 |
| A4 | ENSESTT00000037448 | | 13 | 30621802 | 30637786 |
| A4 | ENSESTT00000037449 | | 13 | 30626285 | 30634614 |
| A4 | ENSESTT00000037450 | | 13 | 30626290 | 30637786 |
| A4 | ENSESTT00000037453 | | 13 | 30626512 | 30650976 |
| A4 | ENSESTT00000037454 | | 13 | 30626512 | 30650976 |
| A4 | ENSESTT00000037452 | | 13 | 30626512 | 30661841 |
| A4 | ENSESTT00000037451 | | 13 | 30626512 | 30661882 |
| A4 | OTTHUMT00013000859 | bA37E23.1-006 | 13 | 30634526 | 30661776 |
| A4 | ENSESTT00000037455 | | 13 | 30659981 | 30668767 |
| A4 | OTTHUMT00013000857 | bA37E23.1-004 | 13 | 30659988 | 30667640 |
| A4 | ENSESTT00000037456 | | 13 | 30666374 | 30668767 |
| A4 | OTTHUMT00013000870 | bA37E23.5-001 | 13 | 30670291 | 30670849 |
| A4 | OTTHUMT00013000868 | bA37E23.4-001 | 13 | 30680855 | 30683420 |
| A4 | ENSESTT00000037463 | | 13 | 30687607 | 30698292 |
| A4 | OTTHUMT00013003674 | BRCA2-001 | 13 | 30687617 | 30771806 |
| A4 | ENSESTT00000037464 | | 13 | 30687640 | 30698728 |
| A4 | ENST00000267071 | BRCA2 | 13 | 30688598 | 30770907 |
| A4 | ENSESTT00000037465 | | 13 | 30735410 | 30752226 |
| A4 | ENSESTT00000037466 | | 13 | 30748806 | 30752226 |
| A4 | OTTHUMT00013003675 | BRCA2-002 | 13 | 30751977 | 30770409 |
| A4 | OTTHUMT00013000866 | bA37E23.3-001 | 13 | 30756797 | 30758245 |
| A4 | OTTHUMT00013000872 | bA298P3.2-001 | 13 | 30773713 | 30800270 |
| A4 | OTTHUMT00013000873 | bA298P3.2-002 | 13 | 30773810 | 30800270 |
| A4 | OTTHUMT00013000874 | bA298P3.2-003 | 13 | 30773814 | 30788840 |
| A4 | OTTHUMT00013000875 | bA298P3.2-004 | 13 | 30773954 | 30800151 |
| A4 | ENSESTT00000037479 | | 13 | 30774634 | 30800259 |
| A4 | ENSESTT00000037481 | | 13 | 30774983 | 30779922 |
| A4 | ENST00000267044 | NM_052818 | 13 | 30775079 | 30779464 |
| A4 | ENST00000306588 | Q8WTU5 | 13 | 30775281 | 30800219 |
| A4 | OTTHUMT00013000876 | bA298P3.2-005 | 13 | 30775816 | 30800151 |
| A4 | OTTHUMT00013000878 | bA298P3.2-007 | 13 | 30778590 | 30800143 |
| A4 | ENST00000332066 | NM_014081 | 13 | 30779092 | 30779373 |
| A4 | OTTHUMT00013000877 | bA298P3.2-006 | 13 | 30797059 | 30800151 |
| A4 | OTTHUMT00013000879 | bA298P3.2-008 | 13 | 30797495 | 30805091 |
| A4 | ENSESTT00000037480 | | 13 | 30797642 | 30800151 |
| A4 | OTTHUMT00013000888 | bA298P3.3-001 | 13 | 30804554 | 30818619 |
| A4 | ENSESTT00000037478 | | 13 | 30804625 | 30814984 |
| A4 | ENST00000267052 | NM_033111 | 13 | 30804924 | 30818554 |
| A4 | ENSESTT00000037476 | | 13 | 30815994 | 30910936 |
| A4 | OTTHUMT00013000896 | bA11K16.4-001 | 13 | 30816130 | 30816268 |
| A4 | OTTHUMT00013000890 | bA11K16.1-001 | 13 | 30849411 | 30850978 |
| A4 | OTTHUMT00013000892 | bA11K16.2-001 | 13 | 30852732 | 30890057 |
| A4 | OTTHUMT00013000894 | bA11K16.3-001 | 13 | 30864436 | 30870629 |
| A4 | ENST00000267068 | NM_014887 | 13 | 30889031 | 30910919 |
| A4 | OTTHUMT00013000897 | bA11K16.4-002 | 13 | 30889031 | 30910919 |
| A4 | ENSESTT00000037473 | | 13 | 30889508 | 30894409 |
| A4 | ENSESTT00000037471 | | 13 | 30889508 | 30908302 |
| A4 | ENSESTT00000037474 | | 13 | 30889684 | 30893770 |
| A4 | OTTHUMT00013000898 | bA11K16.4-003 | 13 | 30889998 | 30908006 |
| A4 | ENSESTT00000037472 | | 13 | 30899013 | 30908193 |
| A4 | ENSESTT00000037467 | | 13 | 30907172 | 30908872 |
| A4 | ENSESTT00000037477 | | 13 | 30908368 | 30910932 |
| A4 | ENSESTT00000037470 | | 13 | 30908503 | 30910929 |
| A4 | OTTHUMT00013000899 | bA11K16.4-004 | 13 | 30908564 | 30910962 |
| A4 | ENSESTT00000037475 | | 13 | 30908708 | 30910962 |
| A4 | ENSESTT00000037468 | | 13 | 30958592 | 31031343 |
| A4 | OTTHUMT00013000906 | 49J10.1-006 | 13 | 30958624 | 31118238 |
| A4 | ENST00000261578 | APRIN | 13 | 30958642 | 31145465 |
| A4 | OTTHUMT00013000907 | 49J10.1-007 | 13 | 30958685 | 31118238 |
| A4 | OTTHUMT00013000908 | 49J10.1-008 | 13 | 30958688 | 31024465 |
| A4 | ENSESTT00000037469 | | 13 | 30958704 | 31021469 |
| A4 | OTTHUMT00013000904 | 49J10.1-002 | 13 | 30958706 | 31022754 |
| A4 | ENSESTT00000037369 | | 13 | 31071946 | 31113272 |
| A4 | ENSESTT00000037370 | | 13 | 31073121 | 31113272 |
| A4 | OTTHUMT00013000905 | 49J10.1-004 | 13 | 31073219 | 31079179 |
| A4 | ENSESTT00000037371 | | 13 | 31073219 | 31079179 |
| A4 | OTTHUMT00013000915 | bA380B4.1-002 | 13 | 31125470 | 31148043 |
| A4 | OTTHUMT00013000914 | bA380B4.1-001 | 13 | 31125470 | 31150157 |
| A4 | ENSESTT00000037372 | | 13 | 31130670 | 31143217 |
| A4 | OTTHUMT00013000918 | bA380B4.2-001 | 13 | 31249569 | 31283788 |
| A4 | OTTHUMT00013000920 | bA218A18.1-001 | 13 | 31325521 | 31326539 |
| A4 | ENSESTT00000037388 | | 13 | 31385588 | 31388081 |
| A4 | OTTHUMT00013003671 | KL-002 | 13 | 31388571 | 31436440 |
| A4 | ENST00000255481KL | | 13 | 31388571 | 31438279 |
| A4 | OTTHUMT00013003670 | KL-001 | 13 | 31388571 | 31438282 |
| A4 | OTTHUMT00013000926 | bA81F11.1-001 | 13 | 31475278 | 31578143 |
| A4 | ENSESTT00000037373 | | 13 | 31476827 | 31478958 |
| A4 | ENSESTT00000037386 | | 13 | 31477004 | 31484030 |
| A4 | ENST00000255486 | STARD13 | 13 | 31477730 | 31558159 |
| A4 | ENSESTT00000037387 | | 13 | 31482009 | 31484030 |
| A4 | OTTHUMT00013000930 | bA81F11.1-005 | 13 | 31483921 | 31485330 |
| A4 | OTTHUMT00013000924 | bA81F11.4-001 | 13 | 31494713 | 31495797 |
| A4 | ENSESTT00000037374 | | 13 | 31494713 | 31495802 |
| A4 | OTTHUMT00013000928 | bA81F11.1-003 | 13 | 31501869 | 31558216 |
| A4 | ENSESTT00000037379 | | 13 | 31502223 | 31578161 |
| A4 | ENSESTT00000037378 | | 13 | 31502350 | 31722654 |
| A4 | OTTHUMT00013000929 | bA81F11.1-004 | 13 | 31510566 | 31539759 |
| A4 | ENSESTT00000037380 | | 13 | 31510566 | 31539761 |
| A4 | OTTHUMT00013000927 | bA81F11.1-002 | 13 | 31527573 | 31657844 |
| A4 | OTTHUMT00013000922 | bA81F11.2-001 | 13 | 31530724 | 31536546 |
| A4 | ENSESTT00000037385 | | 13 | 31530724 | 31536546 |
| A4 | ENSESTT00000037384 | | 13 | 31547153 | 31657728 |
| A4 | OTTHUMT00013000936 | bA81F11.3-001 | 13 | 31562078 | 31657873 |
| A4 | ENSESTT00000037383 | | 13 | 31647964 | 31657873 |
| A4 | OTTHUMT00013000938 | bA363P13.1-001 | 13 | 31649690 | 31653471 |
| A4 | ENSESTT00000037375 | | 13 | 31649690 | 31653473 |
| A4 | ENSESTT00000037381 | | 13 | 31705816 | 31720135 |
| A4 | OTTHUMT00013000940 | bA141M1.1-001 | 13 | 31705983 | 31707403 |
| A4 | ENSESTT00000037382 | | 13 | 31705983 | 31707414 |
| A4 | OTTHUMT00013000942 | bA141M1.4-001 | 13 | 31720744 | 31722761 |
| A4 | ENSESTT00000037377 | | 13 | 31721064 | 31722742 |
| A4 | OTTHUMT00013000946 | bA141M1.3-001 | 13 | 31727343 | 32048905 |
| A4 | OTTHUMT00013000948 | bA141M1.3-003 | 13 | 31883467 | 31896459 |
| A4 | ENSESTT00000037376 | | 13 | 31883467 | 31896459 |
| A4 | OTTHUMT00013000944 | bA37L2.1-001 | 13 | 31983104 | 31983659 |
| A4 | OTTHUMT00013000947 | bA141M1.3-002 | 13 | 32026796 | 32048861 |
| A4 | OTTHUMT00013000954 | bA179A7.2-001 | 13 | 32029573 | 32032065 |
| A4 | OTTHUMT00013000952 | RFC3-001 | 13 | 32190203 | 32209633 |
| A4 | ENSESTT00000039806 | | 13 | 32190245 | 32209644 |
| A4 | ENSESTT00000039805 | | 13 | 32190245 | 32338382 |
| A4 | ENSESTT00000039804 | | 13 | 32190245 | 32338695 |
| A4 | ENST00000255484 | RFC3 | 13 | 32190316 | 32208432 |
| A4 | OTTHUMT00013000956 | bA218I21.1-001 | 13 | 32454566 | 32455447 |
| A4 | OTTHUMT00013000958 | bA266E6.1-001 | 13 | 32807587 | 33012822 |
| A4 | ENSESTT00000039807 | | 13 | 32807587 | 33012822 |
| A4 | OTTHUMT00013000959 | bA266E6.1-002 | 13 | 32905983 | 32906487 |
| A4 | ENSESTT00000039808 | | 13 | 32905983 | 32906487 |
| A4 | OTTHUMT00013000962 | bA266E6.2-001 | 13 | 32946341 | 32946803 |
| A4 | OTTHUMT00013000972 | NBEA-001 | 13 | 33314456 | 34044873 |
| A4 | ENST00000310336 | NBEA | 13 | 33314958 | 34043128 |
| A5 | ENSESTT00000038767 | | 7 | 101019421 | 101400637 |
| A5 | ENSESTT00000038766 | | 7 | 101019421 | 101485396 |
| A5 | ENSESTT00000038765 | | 7 | 101019421 | 101487431 |
| A5 | OTTHUMT00007006261 | CUTL1 | 7 | 101019473 | 101487362 |
| A5 | ENST00000292538 | CUTL1 | 7 | 101019492 | 101486563 |
| A5 | ENST00000292535 | CUTL1 | 7 | 101021063 | 101453321 |
| A5 | ENSESTT00000038777 | | 7 | 101081303 | 101082106 |
| A5 | ENSESTT00000038768 | | 7 | 101119629 | 101231763 |
| A5 | ENSESTT00000038771 | | 7 | 101273798 | 101400637 |
| A5 | ENSESTT00000038770 | | 7 | 101273798 | 101485396 |
| A5 | ENSESTT00000038769 | | 7 | 101273798 | 101487431 |
| A5 | ENSESTT00000038772 | | 7 | 101362019 | 101397352 |
| A5 | OTTHUMT00007006649 | mbhmh_gw729093.100322718.100376677.3.8e− | 7 | 101400541 | 101405344 |
| A5 | ENSESTT00000038778 | | 7 | 101400655 | 101404987 |
| A5 | OTTHUMT00007007070 | mbhmh_H_RG313A17_F193468.fgenesh2.2 | 7 | 101429721 | 101452503 |
| A5 | OTTHUMT00007007797 | Hs_7_c1557 | 7 | 101468176 | 101468461 |
| A5 | ENSESTT00000038775 | | 7 | 101477627 | 101484340 |
| A5 | ENSESTT00000038774 | | 7 | 101477627 | 101485396 |
| A5 | ENSESTT00000038773 | | 7 | 101477627 | 101487431 |
| A5 | ENSESTT00000038776 | | 7 | 101486181 | 101487431 |
| A5 | ENSESTT00000038779 | | 7 | 101488534 | 101512349 |
| A5 | OTTHUMT00007006892 | mbax_h_100048510_100795952_m_134702119_1 | 7 | 101498891 | 101522278 |
| A5 | ENST00000306803 | NM_020979 | 7 | 101504016 | 101522278 |
| A5 | ENSESTT00000038780 | | 7 | 101517823 | 101522351 |
| A5 | OTTHUMT00007007831 | Hs_7_c1560 | 7 | 101527852 | 101530126 |
| A5 | OTTHUMT00007007835 | Hs_7_c1561 | 7 | 101537904 | 101547742 |
| A5 | OTTHUMT00007006950 | mbhmh_ts.101.008.a | 7 | 101547738 | 101553959 |
| A5 | ENST00000331921 | | 7 | 101548723 | 101555503 |
| A5 | ENST00000332533 | | 7 | 101551346 | 101554016 |
| A5 | ENSESTT00000038782 | | 7 | 101564512 | 101576836 |
| A5 | ENSESTT00000038781 | | 7 | 101564512 | 101581544 |
| A5 | ENSESTT00000038783 | | 7 | 101564790 | 101581544 |
| A5 | OTTHUMT00007007838 | Hs_7_c1564 | 7 | 101564796 | 101586300 |
| A5 | ENSESTT00000038785 | | 7 | 101566265 | 101576836 |
| A5 | ENSESTT00000038784 | | 7 | 101566265 | 101581544 |
| A5 | ENST00000329536 | | 7 | 101576257 | 101576794 |
| A5 | OTTHUMT00007007842 | Hs_7_c1565 | 7 | 101581374 | 101583647 |
| A5 | ENST00000262936 | PRKRIP1 | 7 | 101597276 | 101627593 |
| A5 | ENSESTT00000038786 | | 7 | 101597306 | 101626253 |
| A5 | ENST00000292563 | C7orf19 | 7 | 101634483 | 101649629 |
| A5 | OTTHUMT00007006331 | CBCIP2 | 7 | 101634489 | 101649629 |
| A5 | ENSESTT00000038787 | | 7 | 101634512 | 101647966 |
| A5 | ENSESTT00000038788 | | 7 | 101637128 | 101647966 |
| A5 | OTTHUMT00007006536 | FLJ20013 | 7 | 101657151 | 101665754 |
| A5 | ENST00000292566 | NM_017621 | 7 | 101657178 | 101665774 |
| A5 | ENSESTT00000038837 | | 7 | 101658436 | 101665789 |
| A5 | OTTHUMT00007006660 | mbhmh_nh_h_100048510_100795952_m_1347021 | 7 | 101665582 | 101673962 |
| A5 | ENST00000292616 | NM_152892 | 7 | 101665847 | 101673962 |
| A5 | ENSESTT00000038789 | | 7 | 101665866 | 101669568 |
| A5 | ENSESTT00000038790 | | 7 | 101670502 | 101675765 |
| A5 | ENSESTT00000038791 | | 7 | 101670502 | 101675765 |
| A5 | ENSESTT00000038802 | | 7 | 101674085 | 101770880 |
| A5 | ENSESTT00000038803 | | 7 | 101674197 | 101679846 |
| A5 | OTTHUMT00007006868 | POLR2J | 7 | 101674370 | 101679823 |
| A5 | ENSESTT00000038807 | | 7 | 101674370 | 101869945 |
| A5 | ENST00000292614 | POLR2J | 7 | 101674562 | 101679773 |
| A5 | ENST00000326391 | | 7 | 101675112 | 101679773 |
| A5 | ENSESTT00000038806 | | 7 | 101675384 | 101872600 |
| A5 | OTTHUMT00007006642 | HSPC047.1 | 7 | 101680646 | 101681562 |
| A5 | ENSESTT00000038818 | | 7 | 101684052 | 101884280 |
| A5 | ENSESTT00000038815 | | 7 | 101684387 | 101887718 |
| A5 | ENSESTT00000038813 | | 7 | 101684414 | 101889940 |
| A5 | ENST00000306682 | NM_006989 | 7 | 101684505 | 101718623 |
| A5 | OTTHUMT00007006603 | mbhmh_gw5901958.100606911.100642795.1.6e | 7 | 101684508 | 101718623 |
| A5 | ENSESTT00000038814 | | 7 | 101685947 | 101889940 |
| A5 | ENSESTT00000038819 | | 7 | 101685981 | 101793412 |
| A5 | ENSESTT00000038831 | | 7 | 101691969 | 101794030 |
| A5 | ENSESTT00000038792 | | 7 | 101694343 | 101794786 |
| A5 | ENSESTT00000038793 | | 7 | 101694383 | 101794951 |
| A5 | ENSESTT00000038795 | | 7 | 101694776 | 101695508 |
| A5 | ENSESTT00000038829 | | 7 | 101697050 | 101702049 |
| A5 | ENSESTT00000038828 | | 7 | 101697479 | 101707749 |
| A5 | ENSESTT00000038826 | | 7 | 101697813 | 101801370 |
| A5 | ENSESTT00000038821 | | 7 | 101710309 | 101817727 |
| A5 | ENSESTT00000038822 | | 7 | 101713854 | 101813329 |
| A5 | ENSESTT00000038820 | | 7 | 101724207 | 101823338 |
| A5 | ENSESTT00000038810 | | 7 | 101739241 | 101839744 |
| A5 | ENSESTT00000038808 | | 7 | 101739246 | 101866719 |
| A5 | ENSESTT00000038809 | | 7 | 101739290 | 101866719 |
| A5 | ENST00000297278 | | 7 | 101739330 | 101744501 |
| A5 | ENSESTT00000038804 | | 7 | 101742184 | 101872640 |
| A5 | OTTHUMT00007007119 | POLR2J2 | 7 | 101742452 | 101773584 |
| A5 | ENST00000319405 | | 7 | 101755410 | 101861246 |
| A5 | OTTHUMT00007006426 | mbhmh_H_RG158O17_F218045.fgenesh2.3 | 7 | 101757047 | 101763166 |
| A5 | OTTHUMT00007008004 | Hs_7_c5034 | 7 | 101763162 | 101768147 |
| A5 | ENSESTT00000038796 | | 7 | 101766314 | 101869984 |
| A5 | ENSESTT00000038811 | | 7 | 101768689 | 101773566 |
| A5 | ENST00000323465 | NM_145325 | 7 | 101768862 | 101773534 |
| A5 | OTTHUMT00007006643 | HSPC047.2 | 7 | 101774402 | 101780795 |
| A5 | ENSESTT00000038817 | | 7 | 101783624 | 101884523 |
| A5 | ENSESTT00000038816 | | 7 | 101783749 | 101884558 |
| A5 | ENST00000262940 | RSG5_HUMAN | 7 | 101783754 | 101817670 |
| A5 | OTTHUMT00007006268 | CAPRI | 7 | 101783754 | 101817670 |
| A5 | ENSESTT00000038797 | | 7 | 101793580 | 101890696 |
| A5 | ENSESTT00000038794 | | 7 | 101794005 | 101794745 |
| A5 | ENSESTT00000038827 | | 7 | 101796283 | 101801278 |
| A5 | ENSESTT00000038825 | | 7 | 101796715 | 101806980 |
| A5 | OTTHUMT00007006314 | mbhmh_gw12844788.100760681.100765918.2.7 | 7 | 101838509 | 101841746 |
| A5 | OTTHUMT00007007045 | mbhmh_ts.101.018.a | 7 | 101853330 | 101862231 |
| A5 | ENST00000312297 | | 7 | 101855961 | 101858620 |
| A5 | OTTHUMT00007008008 | Hs_7_c5035 | 7 | 101862227 | 101867194 |
| A5 | ENSESTT00000038805 | | 7 | 101867736 | 101872630 |
| A5 | OTTHUMT00007006195 | mbhmh_h_100048510_100795952_m_134702119_{—} | 7 | 101867909 | 101872582 |
| A5 | OTTHUMT00007007904 | Hs_7_c1585 | 7 | 101879466 | 101879837 |
| A5 | OTTHUMT00007007905 | Hs_7_c1586 | 7 | 101882816 | 101891453 |
| A5 | ENST00000329942 | Q96C79 | 7 | 101889904 | 101890065 |
| A5 | ENSESTT00000038798 | | 7 | 101889915 | 101890655 |
| A5 | OTTHUMT00007007907 | Hs_7_c1587 | 7 | 101904290 | 101904451 |
| A5 | ENSESTT00000038812 | | 7 | 101904439 | 101949674 |
| A5 | ENSESTT00000038799 | | 7 | 101949942 | 101962382 |
| A5 | ENSESTT00000038800 | | 7 | 101949949 | 101988333 |
| A5 | ENST00000314526 | NM_147194 | 7 | 101950186 | 101950617 |
| A5 | ENST00000314157 | | 7 | 101956102 | 101956916 |
| A5 | OTTHUMT00007007908 | Hs_7_c1588 | 7 | 101956129 | 101956907 |
| A5 | OTTHUMT00007006547 | mbhmh_h_100815628_101274767_m_19823891_2 | 7 | 101960818 | 101982855 |
| A5 | ENSESTT00000038801 | | 7 | 101988311 | 102009612 |
| A5 | OTTHUMT00007007909 | Hs_7_c1589 | 7 | 102000041 | 102007712 |
| A5 | OTTHUMT00007006171 | MGC21636 | 7 | 102014212 | 102174163 |
| A5 | ENST00000313221 | NM_145032 | 7 | 102014214 | 102230396 |
| A5 | ENST00000313196 | Q8N1P0 | 7 | 102014320 | 102228534 |
| A5 | ENSESTT00000040069 | | 7 | 102113941 | 102146070 |
| A5 | ENST00000249377 | LRRC17 | 7 | 102113983 | 102145927 |
| A5 | OTTHUMT00007006209 | P37MB | 7 | 102113983 | 102145927 |
| A5 | ENSESTT00000040175 | | 7 | 102127277 | 102174180 |
| A5 | ENSESTT00000040070 | | 7 | 102140423 | 102146070 |
| A5 | ENST00000335370 | Q86UQ8 | 7 | 102174535 | 102177193 |
| A5 | ENSESTT00000040174 | | 7 | 102226175 | 102275821 |
| A5 | OTTHUMT00007007936 | Hs_7_c1593 | 7 | 102270250 | 102270369 |
| A5 | ENSESTT00000040076 | | 7 | 102276116 | 102288294 |
| A5 | ENSESTT00000040075 | | 7 | 102276116 | 102299941 |
| A5 | OTTHUMT00007006404 | MGC3195 | 7 | 102276139 | 102299655 |
| A5 | ENST00000323716 | NM_031905 | 7 | 102276251 | 102299531 |
| A5 | ENST00000306450 | Q8IZC1 | 7 | 102276251 | 102299531 |
| A5 | ENST00000323735 | Q8IZC2 | 7 | 102276251 | 102299531 |
| A5 | ENSESTT00000040171 | | 7 | 102303502 | 102321207 |
| A5 | ENSESTT00000040170 | | 7 | 102303502 | 102329508 |
| A5 | ENSESTT00000040173 | | 7 | 102304193 | 102316319 |
| A5 | ENSESTT00000040172 | | 7 | 102304334 | 102320671 |
| A5 | OTTHUMT00007006927 | mbhmh_h_100815628_101274767_m_19823891_2 | 7 | 102307967 | 102331431 |
| A5 | ENST00000292634 | | 7 | 102316038 | 102321120 |
| A5 | OTTHUMT00007007937 | Hs_7_c1596 | 7 | 102342330 | 102342917 |
| A5 | ENST00000327597 | | 7 | 102342504 | 102342917 |
| A5 | ENST00000333351 | | 7 | 102353043 | 102353323 |
| A5 | OTTHUMT00007007938 | Hs_7_c1597 | 7 | 102353043 | 102353323 |
| A5 | ENSESTT00000040163 | | 7 | 102376120 | 102396451 |
| A5 | ENSESTT00000040164 | | 7 | 102376238 | 102386518 |
| A5 | ENSESTT00000040161 | | 7 | 102376238 | 102411289 |
| A5 | OTTHUMT00007007939 | Hs_7_c1598 | 7 | 102376305 | 102481130 |
| A5 | ENST00000306389 | NM_182634 | 7 | 102398168 | 102444053 |
| A5 | ENSESTT00000040162 | | 7 | 102398194 | 102399966 |
| A5 | ENSESTT00000040160 | | 7 | 102399052 | 102411365 |
| A5 | ENST00000257741 | S100A11P | 7 | 102462978 | 102463286 |
| A5 | OTTHUMT00007006524 | S100A14 | 7 | 102462978 | 102463286 |
| A5 | ENSESTT00000040158 | | 7 | 102478355 | 102481237 |
| A5 | ENST00000320297 | Q8N7T0 | 7 | 102478580 | 102481130 |
| A5 | ENSESTT00000040082 | | 7 | 102498413 | 102511457 |
| A5 | OTTHUMT00007006222 | PMPCB | 7 | 102498424 | 102513390 |
| A5 | ENST00000249269 | PMPCB | 7 | 102498438 | 102513249 |
| A5 | ENSESTT00000040083 | | 7 | 102504818 | 102511457 |
| A5 | ENSESTT00000040095 | | 7 | 102513072 | 102513736 |
| A5 | OTTHUMT00007006445 | mpp11 | 7 | 102513452 | 102545644 |
| A5 | ENSESTT00000040149 | | 7 | 102513455 | 102520658 |
| A5 | ENSESTT00000040147 | | 7 | 102513455 | 102520824 |
| A5 | ENSESTT00000040145 | | 7 | 102513455 | 102528369 |
| A5 | ENSESTT00000040141 | | 7 | 102513455 | 102528679 |
| A5 | ENSESTT00000040142 | | 7 | 102513455 | 102528679 |
| A5 | ENSESTT00000040133 | | 7 | 102513455 | 102545745 |
| A5 | ENSESTT00000040134 | | 7 | 102513455 | 102545745 |
| A5 | ENSESTT00000040135 | | 7 | 102513455 | 102545745 |
| A5 | ENSESTT00000040136 | | 7 | 102513455 | 102545745 |
| A5 | ENSESTT00000040129 | | 7 | 102513455 | 102545791 |
| A5 | ENSESTT00000040130 | | 7 | 102513455 | 102545791 |
| A5 | ENSESTT00000040151 | | 7 | 102513480 | 102514323 |
| A5 | ENSESTT00000040150 | | 7 | 102513495 | 102517068 |
| A5 | ENST00000249270 | ZRF1 | 7 | 102513500 | 102545600 |
| A5 | ENST00000222539 | Q9BVX1 | 7 | 102513547 | 102523062 |
| A5 | ENSESTT00000040148 | | 7 | 102516740 | 102520824 |
| A5 | ENSESTT00000040146 | | 7 | 102517478 | 102528369 |
| A5 | ENSESTT00000040143 | | 7 | 102517478 | 102528679 |
| A5 | ENSESTT00000040144 | | 7 | 102517478 | 102528679 |
| A5 | ENSESTT00000040137 | | 7 | 102517478 | 102545745 |
| A5 | ENSESTT00000040138 | | 7 | 102517478 | 102545745 |
| A5 | ENSESTT00000040139 | | 7 | 102517478 | 102545745 |
| A5 | ENSESTT00000040140 | | 7 | 102517478 | 102545745 |
| A5 | ENSESTT00000040131 | | 7 | 102517478 | 102545791 |
| A5 | ENSESTT00000040132 | | 7 | 102517478 | 102545791 |
| A5 | ENSESTT00000040096 | | 7 | 102548636 | 102563744 |
| A5 | ENSESTT00000040097 | | 7 | 102548652 | 102569791 |
| A5 | ENSESTT00000040098 | | 7 | 102548654 | 102569791 |
| A5 | OTTHUMT00007006130 | PSMC2 | 7 | 102548658 | 102569187 |
| A5 | ENSESTT00000040100 | | 7 | 102548673 | 102565286 |
| A5 | ENSESTT00000040099 | | 7 | 102548673 | 102569791 |
| A5 | ENSESTT00000040101 | | 7 | 102548684 | 102565286 |
| A5 | ENST00000292644 | PSMC2 | 7 | 102548690 | 102569032 |
| A5 | OTTHUMT00007007711 | Hs_7_c1604 | 7 | 102549579 | 102549746 |
| A5 | ENSESTT00000040103 | | 7 | 102556671 | 102565286 |
| A5 | ENSESTT00000040104 | | 7 | 102556671 | 102565286 |
| A5 | ENSESTT00000040102 | | 7 | 102556671 | 102569791 |
| A5 | ENSESTT00000040106 | | 7 | 102562512 | 102565286 |
| A5 | ENSESTT00000040105 | | 7 | 102562512 | 102569791 |
| A5 | OTTHUMT00007007089 | mbhmh_h_101446068_102346067_m_20202649_2 | 7 | 102575377 | 102600632 |
| A5 | ENST00000306312 | PRES_HUMAN | 7 | 102575377 | 102622492 |
| A5 | OTTHUMT00007007256 | RELN | 7 | 102672768 | 103190494 |
| A5 | ENSESTT00000040126 | | 7 | 102673292 | 102684682 |
| A5 | ENSESTT00000040125 | | 7 | 102684757 | 102690743 |
| A5 | ENSESTT00000040124 | | 7 | 102691660 | 102698900 |
| A5 | ENSESTT00000040123 | | 7 | 102699088 | 102716370 |
| A5 | ENSESTT00000040122 | | 7 | 102721238 | 102741291 |
| A5 | ENSESTT00000040121 | | 7 | 102743823 | 102746233 |
| A5 | ENSESTT00000040120 | | 7 | 102795307 | 102812764 |
| A5 | ENSESTT00000040118 | | 7 | 102828853 | 102831012 |
| A5 | ENSESTT00000040117 | | 7 | 102836540 | 102853738 |
| A5 | ENSESTT00000040114 | | 7 | 102898905 | 102924166 |
| A5 | OTTHUMT00007006419 | PRO1598 | 7 | 103134831 | 103136533 |
| A5 | ENST00000314952 | NM_018503 | 7 | 103135443 | 103135619 |
| A5 | ENSESTT00000070876 | | 7 | 103327319 | 103337875 |
| A5 | OTTHUMT00007006177 | ORC5L | 7 | 103327321 | 103408971 |
| A5 | ENST00000297431 | ORC5L | 7 | 103327826 | 103408883 |
| A5 | ENSESTT00000070875 | | 7 | 103368963 | 103389283 |
| A5 | OTTHUMT00007007749 | Hs_7_c1615 | 7 | 103380669 | 103381272 |
| A5 | OTTHUMT00007006936 | mbhmh_h_102246067_103146066_m_21002648_2 | 7 | 103529801 | 103714756 |
| A5 | ENSESTT00000070872 | | 7 | 103529849 | 104107212 |
| A5 | ENST00000330383 | | 7 | 103868727 | 103869859 |
| A5 | OTTHUMT00007007754 | Hs_7_c1617 | 7 | 103868727 | 103870551 |
| A5 | ENSESTT00000070874 | | 7 | 103868774 | 103870161 |
| A5 | OTTHUMT00007007536 | Hs_7_c3016 | 7 | 103871565 | 103871676 |
| A5 | OTTHUMT00007007047 | mbhmh_h_102246067_103146066_m_21002648_2 | 7 | 103887281 | 103938199 |
| A5 | ENSESTT00000070873 | | 7 | 103939577 | 103945127 |
| A5 | OTTHUMT00007006239 | nh_nm_gi16307605 | 7 | 103997484 | 104005062 |
| A5 | OTTHUMT00007007758 | Hs_7_c1619 | 7 | 104027314 | 104027771 |
| A5 | ENSESTT00000041852 | | 7 | 104142399 | 104163317 |
| A5 | OTTHUMT00007007780 | Hs_7_c1620 | 7 | 104191028 | 104191180 |
| A5 | ENSESTT00000041867 | | 7 | 104215182 | 104242044 |
| A5 | ENSESTT00000041866 | | 7 | 104215182 | 104263257 |
| A5 | ENSESTT00000041864 | | 7 | 104215182 | 104265008 |
| A5 | ENSESTT00000041865 | | 7 | 104215182 | 104265008 |
| A5 | ENSESTT00000041862 | | 7 | 104215182 | 104275754 |
| A5 | ENSESTT00000041863 | | 7 | 104215182 | 104275754 |
| A5 | ENST00000311117 | MLL5 | 7 | 104215186 | 104314311 |
| A5 | ENSESTT00000041854 | | 7 | 104215192 | 104242044 |
| A5 | ENSESTT00000041853 | | 7 | 104215192 | 104263257 |
| A5 | ENSESTT00000041868 | | 7 | 104215192 | 104275754 |
| A5 | ENSESTT00000041855 | | 7 | 104215403 | 104275754 |
| A5 | OTTHUMT00007006515 | MLL5 | 7 | 104241847 | 104302458 |
| A5 | ENST00000257745 | O95038 | 7 | 104241931 | 104301566 |
| A5 | ENST00000333597 | Q8IWR5 | 7 | 104241931 | 104314311 |
| A5 | ENSESTT00000041857 | | 7 | 104264328 | 104303627 |
| A5 | ENSESTT00000041856 | | 7 | 104264328 | 104307572 |
| A5 | ENST00000222422 | Q9NS29 | 7 | 104264368 | 104291189 |
| A5 | ENSESTT00000041858 | | 7 | 104267501 | 104275739 |
| A5 | ENSESTT00000041859 | | 7 | 104278279 | 104291101 |
| A5 | ENST00000334914 | Q86W16 | 7 | 104278380 | 104290339 |
| A5 | ENSESTT00000041860 | | 7 | 104279822 | 104291098 |
| A5 | ENSESTT00000041861 | | 7 | 104302560 | 104307572 |
| A5 | ENST00000249297 | Q86W12 | 7 | 104302864 | 104308193 |
| A5 | ENSESTT00000041870 | | 7 | 104307682 | 104310494 |
| A5 | ENSESTT00000041869 | | 7 | 104307682 | 104313681 |
| A5 | OTTHUMT00007007782 | Hs_7_c1623 | 7 | 104308132 | 104313327 |
| A5 | ENSESTT00000041872 | | 7 | 104308136 | 104310494 |
| A5 | ENSESTT00000041871 | | 7 | 104308136 | 104313681 |
| A5 | ENSESTT00000041873 | | 7 | 104308939 | 104313681 |
| A5 | ENST00000334884 | Q86TI3 | 7 | 104310018 | 104311845 |
| A5 | ENSESTT00000041909 | | 7 | 104311672 | 104318457 |
| A5 | ENST00000334877 | Q86WG0 | 7 | 104312977 | 104314348 |
| A5 | OTTHUMT00007006319 | SRPK2 | 7 | 104317346 | 104469993 |
| A5 | ENST00000257701 | SRPK2 | 7 | 104317350 | 104470008 |
| A5 | ENSESTT00000041904 | | 7 | 104318221 | 104470012 |
| A5 | ENSESTT00000041900 | | 7 | 104318221 | 104589682 |
| A5 | ENSESTT00000041896 | | 7 | 104318221 | 104589703 |
| A5 | ENSESTT00000041910 | | 7 | 104318221 | 104589839 |
| A5 | ENSESTT00000041908 | | 7 | 104318327 | 104404634 |
| A5 | ENSESTT00000041905 | | 7 | 104318558 | 104470012 |
| A5 | ENSESTT00000041901 | | 7 | 104318558 | 104589682 |
| A5 | ENSESTT00000041897 | | 7 | 104318558 | 104589703 |
| A5 | ENSESTT00000041911 | | 7 | 104318558 | 104589839 |
| A5 | ENSESTT00000041906 | | 7 | 104346254 | 104470012 |
| A5 | ENSESTT00000041902 | | 7 | 104346254 | 104589682 |
| A5 | ENSESTT00000041898 | | 7 | 104346254 | 104589703 |
| A5 | ENSESTT00000041894 | | 7 | 104346254 | 104589839 |
| A5 | ENSESTT00000041907 | | 7 | 104361279 | 104470012 |
| A5 | ENSESTT00000041903 | | 7 | 104361279 | 104589682 |
| A5 | ENSESTT00000041899 | | 7 | 104361279 | 104589703 |
| A5 | ENSESTT00000041895 | | 7 | 104361279 | 104589839 |
| A5 | OTTHUMT00007007787 | Hs_7_c1625 | 7 | 104390180 | 104390804 |
| A5 | OTTHUMT00007007788 | Hs_7_c1626 | 7 | 104405611 | 104405835 |
| A5 | OTTHUMT00007007791 | Hs_7_c1627 | 7 | 104445633 | 104445945 |
| A5 | OTTHUMT00007007792 | Hs_7_c1628 | 7 | 104502500 | 104503061 |
| A5 | OTTHUMT00007007794 | Hs_7_c1629 | 7 | 104555221 | 104555496 |
| A5 | ENST00000257687 | NM_019042 | 7 | 104657493 | 104709424 |
| A5 | ENSESTT00000041893 | | 7 | 104658206 | 104660239 |
| A5 | ENSESTT00000041892 | | 7 | 104658241 | 104707036 |
| A5 | OTTHUMT00007006894 | FLJ20485 | 7 | 104658637 | 104723192 |
| A5 | ENSESTT00000041890 | | 7 | 104683290 | 104723218 |
| A5 | ENSESTT00000041891 | | 7 | 104706926 | 104723218 |
| A5 | ENST00000320648 | | 7 | 104731187 | 104731649 |
| A5 | ENSESTT00000041876 | | 7 | 104733157 | 104743633 |
| A5 | ENSESTT00000041875 | | 7 | 104733157 | 104764927 |
| A5 | ENSESTT00000041874 | | 7 | 104733157 | 104766577 |
| A5 | ENST00000257700 | NM_021930 | 7 | 104733207 | 104768660 |
| A5 | ENSESTT00000041877 | | 7 | 104743218 | 104747974 |
| A5 | OTTHUMT00007006406 | FLJ11785 | 7 | 104751134 | 104768660 |
| A5 | ENSESTT00000041887 | | 7 | 104766086 | 104770452 |
| A5 | ENSESTT00000041888 | | 7 | 104766102 | 104770414 |
| A5 | ENSESTT00000041886 | | 7 | 104766102 | 104770466 |
| A5 | ENSESTT00000041889 | | 7 | 104766110 | 104770281 |
| A5 | ENSESTT00000041885 | | 7 | 104768394 | 104782425 |
| A5 | ENSESTT00000041884 | | 7 | 104768394 | 104782668 |
| A5 | ENST00000327788 | | 7 | 104768432 | 104782432 |
| A5 | ENST00000310149 | | 7 | 104783163 | 104784060 |
| A5 | ENST00000329090 | | 7 | 104783236 | 104784089 |
| A5 | ENST00000332220 | | 7 | 104783236 | 104784134 |
| A5 | OTTHUMT00007007834 | Hs_7_c1634 | 7 | 104783239 | 104784179 |
| A5 | OTTHUMT00007006590 | mbhmh_h_103713457_104613456_m_26903715_2 | 7 | 104792229 | 104844029 |
| A5 | ENSESTT00000041883 | | 7 | 104808623 | 104811530 |
| A5 | ENST00000297416 | YC18_HUMAN | 7 | 104808830 | 105077559 |
| A5 | ENST00000275664 | Q9BTQ8 | 7 | 104814454 | 104825244 |
| A5 | ENSESTT00000041880 | | 7 | 104815496 | 104893101 |
| A5 | ENSESTT00000041878 | | 7 | 104816938 | 104818834 |
| A5 | ENSESTT00000041881 | | 7 | 104818847 | 104893101 |
| A5 | ENSESTT00000041882 | | 7 | 104321070 | 104893101 |
| A5 | ENSESTT00000041879 | | 7 | 104961923 | 105077563 |
| A5 | ENST00000318724 | NM_152749 | 7 | 104962355 | 105077535 |
| A5 | OTTHUMT00007007007 | mbhmh_nh_h_103713457_104613456_m_2690371 | 7 | 104989335 | 104993681 |
| A5 | OTTHUMT00007007837 | Hs_7_c1637 | 7 | 105020472 | 105021075 |
| A5 | ENST00000329846 | | 7 | 105020547 | 105021078 |
| A5 | ENSESTT00000035755 | | 7 | 105076067 | 105077551 |
| A5 | OTTHUMT00007007841 | Hs_7_c1638 | 7 | 105076766 | 105083558 |
| A5 | OTTHUMT00007006283 | mbhmh_h_103713457_104613456_m_26103716_2 | 7 | 105095260 | 105151278 |
| A5 | OTTHUMT00007006180 | mbhmh_H_DJ0568B10_F020305.fgenesh2.1 | 7 | 105175823 | 105223819 |
| A5 | ENSESTT00000035734 | | 7 | 105181971 | 105197312 |
| A5 | ENSESTT00000035735 | | 7 | 105202525 | 105205801 |
| A5 | ENST00000317716 | NM_152750 | 7 | 105205474 | 105231797 |
| A5 | ENSESTT00000035736 | | 7 | 105205482 | 105221463 |
| A5 | OTTHUMT00007006497 | mbhmh_nh_h_103713457_104613456_m_2690371 | 7 | 105224488 | 105232430 |
| A5 | ENSESTT00000035737 | | 7 | 105229534 | 105234760 |
| A5 | OTTHUMT00007006260 | SYPL | 7 | 105291482 | 105313528 |
| A5 | ENST00000011473 | SYPL | 7 | 105291489 | 105313588 |
| A5 | ENSESTT00000035754 | | 7 | 105292251 | 105294130 |
| A5 | ENSESTT00000035753 | | 7 | 105292251 | 105298877 |
| A5 | ENSESTT00000035750 | | 7 | 105292251 | 105313289 |
| A5 | ENSESTT00000035752 | | 7 | 105292673 | 105300262 |
| A5 | ENSESTT00000035751 | | 7 | 105300133 | 105313289 |
| A5 | OTTHUMT00007007872 | Hs_7_c1643 | 7 | 105326309 | 105327674 |
| A5 | OTTHUMT00007006155 | PBEF | 7 | 105451187 | 105485888 |
| A5 | ENSESTT00000035747 | | 7 | 105451529 | 105470301 |
| A5 | ENSESTT00000035746 | | 7 | 105451529 | 105471257 |
| A5 | ENSESTT00000035745 | | 7 | 105451529 | 105476028 |
| A5 | ENSESTT00000035740 | | 7 | 105451529 | 105486169 |
| A5 | ENSESTT00000035741 | | 7 | 105451529 | 105486169 |
| A5 | ENSESTT00000035738 | | 7 | 105451529 | 105486589 |
| A5 | ENSESTT00000035749 | | 7 | 105452034 | 105454595 |
| A5 | ENST00000222553 | PBEF_HUMAN | 7 | 105452060 | 105485898 |
| A5 | ENSESTT00000035748 | | 7 | 105462192 | 105464474 |
| A5 | ENSESTT00000035744 | | 7 | 105469472 | 105485522 |
| A5 | ENSESTT00000035742 | | 7 | 105473329 | 105486169 |
| A5 | ENSESTT00000035743 | | 7 | 105473329 | 105486169 |
| A5 | ENSESTT00000035739 | | 7 | 105473329 | 105486589 |
| A5 | OTTHUMT00007007874 | Hs_7_c1646 | 7 | 105516202 | 105516577 |
| A5 | OTTHUMT00007007875 | Hs_7_c1647 | 7 | 105831822 | 105832343 |
| A5 | OTTHUMT00007007586 | Hs_7_c3104 | 7 | 105832534 | 105833055 |
| A5 | OTTHUMT00007006262 | mbxx_nh_chr7.105.006.a | 7 | 105833369 | 105833704 |
| A5 | ENST00000315965 | NM_175884 | 7 | 105861166 | 105861861 |
| A5 | OTTHUMT00007007876 | Hs_7_c1648 | 7 | 105861484 | 105861765 |
| A6 | ENSESTT00000021279 | | 10 | 73471701 | 73512400 |
| A6 | ENST00000311182 | CBARA1 | 10 | 73471701 | 73730468 |
| A6 | ENSESTT00000021278 | | 10 | 73472141 | 73579660 |
| A6 | ENSESTT00000021277 | | 10 | 73581559 | 73730469 |
| A6 | ENSESTT00000021276 | | 10 | 73637423 | 73730476 |
| A6 | ENSESTT00000021271 | | 10 | 73668375 | 73670920 |
| A6 | ENST00000313314 | NM_138357 | 10 | 73796492 | 73992053 |
| A6 | ENST00000286508 | Q96FL3 | 10 | 73796537 | 73990183 |
| A6 | ENSESTT00000021273 | | 10 | 73797084 | 73988744 |
| A6 | ENSESTT00000021272 | | 10 | 73797084 | 73992055 |
| A6 | ENSESTT00000021275 | | 10 | 73964348 | 73988744 |
| A6 | ENSESTT00000021274 | | 10 | 73964348 | 73992055 |
| A6 | ENST00000260885 | NM_152635 | 10 | 73997942 | 74037390 |
| A6 | ENST00000334011 | Q8WWZ8 | 10 | 73998160 | 74036885 |
| A6 | ENSESTT00000021456 | | 10 | 74016118 | 74028872 |
| A6 | ENSESTT00000021457 | | 10 | 74034940 | 74046965 |
| A6 | ENSESTT00000021528 | | 10 | 74039868 | 74058975 |
| A6 | ENST00000260878 | PLA2G13 | 10 | 74039978 | 74059139 |
| A6 | ENST00000332968 | | 10 | 74110192 | 74110956 |
| A6 | ENST00000263556 | P4HA1 | 10 | 74112583 | 74179244 |
| A6 | ENST00000307116 | P4HA1 | 10 | 74112583 | 74179244 |
| A6 | ENSESTT00000021526 | | 10 | 74118611 | 74155608 |
| A6 | ENSESTT00000021527 | | 10 | 74121207 | 74155454 |
| A6 | ENSESTT00000021525 | | 10 | 74157783 | 74201227 |
| A6 | ENST00000299408 | NUDT13 | 10 | 74214816 | 74236183 |
| A6 | ENSESTT00000021458 | | 10 | 74214883 | 74236720 |
| A6 | ENST00000335635 | Q9Y3X2 | 10 | 74226553 | 74235264 |
| A6 | ENST00000325946 | NUDT13 | 10 | 74229464 | 74229628 |
| A6 | ENST00000263565 | SGT1_HUMAN | 10 | 74238886 | 74272420 |
| A6 | ENSESTT00000021521 | | 10 | 74243730 | 74272456 |
| A6 | ENSESTT00000021522 | | 10 | 74258724 | 74272456 |
| A6 | ENSESTT00000021524 | | 10 | 74260633 | 74272402 |
| A6 | ENSESTT00000021523 | | 10 | 74260633 | 74272456 |
| A6 | ENST00000242505 | Q9Y2I0 | 10 | 74279052 | 74346541 |
| A6 | ENSESTT00000021459 | | 10 | 74332501 | 74340393 |
| A6 | ENSESTT00000021460 | | 10 | 74332502 | 74345507 |
| A6 | ENSESTT00000021461 | | 10 | 74334657 | 74340393 |
| A6 | ENSESTT00000021463 | | 10 | 74338355 | 74338793 |
| A6 | ENSESTT00000021462 | | 10 | 74339356 | 74345515 |
| A6 | ENST00000299416 | DNAJC9 | 10 | 74347761 | 74351550 |
| A6 | ENST00000299418 | MRPS16 | 10 | 74353204 | 74357012 |
| A6 | ENSESTT00000021464 | | 10 | 74353210 | 74355109 |
| A6 | ENSESTT00000021465 | | 10 | 74357530 | 74358710 |
| A6 | ENSESTT00000021466 | | 10 | 74357561 | 74358710 |
| A6 | ENSESTT00000021520 | | 10 | 74358121 | 74379898 |
| A6 | ENST00000310715 | NM_145170 | 10 | 74358127 | 74463115 |
| A6 | ENST00000286530 | Q8N7D5 | 10 | 74358336 | 74397767 |
| A6 | ENST00000277916 | ANXA7 | 10 | 74479811 | 74518414 |
| A6 | ENST00000260852 | ANXA7 | 10 | 74480456 | 74505217 |
| A6 | ENSESTT00000021505 | | 10 | 74484518 | 74518436 |
| A6 | ENSESTT00000021506 | | 10 | 74484518 | 74518436 |
| A6 | ENSESTT00000021507 | | 10 | 74484518 | 74518436 |
| A6 | ENSESTT00000021467 | | 10 | 74485833 | 74487824 |
| A6 | ENSESTT00000021517 | | 10 | 74487551 | 74518431 |
| A6 | ENSESTT00000021508 | | 10 | 74487551 | 74518436 |
| A6 | ENSESTT00000021509 | | 10 | 74487551 | 74518436 |
| A6 | ENSESTT00000021518 | | 10 | 74487935 | 74518431 |
| A6 | ENSESTT00000021510 | | 10 | 74487935 | 74518436 |
| A6 | ENSESTT00000021511 | | 10 | 74487935 | 74518436 |
| A6 | ENSESTT00000021512 | | 10 | 74487935 | 74518436 |
| A6 | ENSESTT00000021513 | | 10 | 74487935 | 74518436 |
| A6 | ENSESTT00000021514 | | 10 | 74487935 | 74518436 |
| A6 | ENSESTT00000021519 | | 10 | 74487963 | 74518419 |
| A6 | ENSESTT00000021515 | | 10 | 74487976 | 74518436 |
| A6 | ENSESTT00000021516 | | 10 | 74492701 | 74518436 |
| A6 | ENST00000299432 | ZMYND17 | 10 | 74528914 | 74537973 |
| A6 | ENST00000265920 | PPP3CB | 10 | 74541167 | 74600362 |
| A6 | ENSESTT00000021500 | | 10 | 74542284 | 74575867 |
| A6 | ENSESTT00000021501 | | 10 | 74542284 | 74575867 |
| A6 | ENSESTT00000021502 | | 10 | 74542546 | 74575867 |
| A6 | ENSESTT00000021504 | | 10 | 74542559 | 74571979 |
| A6 | ENST00000320361 | Q8N3W4 | 10 | 74542603 | 74600250 |
| A6 | ENSESTT00000021503 | | 10 | 74548717 | 74575867 |
| A6 | ENSESTT00000021499 | | 10 | 74579279 | 74600362 |
| A6 | ENSESTT00000021468 | | 10 | 74600104 | 74601061 |
| A6 | ENST00000319786 | NM_152586 | 10 | 74601901 | 74621672 |
| A6 | ENSESTT00000021469 | | 10 | 74634518 | 74635149 |
| A6 | ENST00000318330 | MYOZ1 | 10 | 74736016 | 74746118 |
| A6 | ENST00000332382 | | 10 | 74736345 | 74742281 |
| A6 | ENST00000299404 | NM_024875 | 10 | 74749893 | 74755390 |
| A6 | ENST00000310381 | | 10 | 74778960 | 74802116 |
| A6 | ENSESTT00000021498 | | 10 | 74787103 | 74799146 |
| A6 | ENSESTT00000021470 | | 10 | 74834923 | 74835765 |
| A6 | ENST00000333366 | | 10 | 74836264 | 74838018 |
| A6 | ENST00000332341 | | 10 | 74836264 | 74838018 |
| A6 | ENSESTT00000021472 | | 10 | 74848734 | 74869952 |
| A6 | ENSESTT00000021471 | | 10 | 74848734 | 74875148 |
| A6 | ENSESTT00000021473 | | 10 | 74848778 | 74856191 |
| A6 | ENST00000313749 | SEC24C | 10 | 74851194 | 74875548 |
| A6 | ENSESTT00000021474 | | 10 | 74870160 | 74875148 |
| A6 | ENSESTT00000021475 | | 10 | 74872779 | 74875148 |
| A6 | ENSESTT00000021476 | | 10 | 74873363 | 74874530 |
| A6 | ENST00000326248 | NM_173540 | 10 | 74876477 | 74880577 |
| A6 | ENST00000299593 | Q96CJ6 | 10 | 74876947 | 74877339 |
| A6 | ENSESTT00000021478 | | 10 | 74877622 | 74880515 |
| A6 | ENSESTT00000021477 | | 10 | 74877622 | 74883436 |
| A6 | ENSESTT00000021479 | | 10 | 74886411 | 74888015 |
| A6 | ENST00000310182 | Q96BP2 | 10 | 74886424 | 74887727 |
| A6 | ENSESTT00000021480 | | 10 | 74886683 | 74888015 |
| A6 | ENST00000326185 | Q8NB34 | 10 | 74890240 | 74890617 |
| A6 | ENSESTT00000021481 | | 10 | 74893032 | 74894348 |
| A6 | ENSESTT00000021482 | | 10 | 74893456 | 74894353 |
| A6 | ENSESTT00000021483 | | 10 | 74893863 | 74894617 |
| A6 | ENST00000242558 | O94987 | 10 | 74894547 | 74903962 |
| A6 | ENSESTT00000021484 | | 10 | 74895484 | 74896595 |
| A6 | ENSESTT00000021485 | | 10 | 74897161 | 74898597 |
| A6 | ENST00000310153 | Q9H8F3 | 10 | 74897187 | 74906153 |
| A6 | ENSESTT00000021486 | | 10 | 74900732 | 74903751 |
| A6 | ENSESTT00000021487 | | 10 | 74900875 | 74903751 |
| A6 | ENSESTT00000021488 | | 10 | 74904375 | 74906153 |
| A6 | ENST00000325890 | Q8N420 | 10 | 74904393 | 74905880 |
| A6 | ENSESTT00000021489 | | 10 | 74905268 | 74906153 |
| A6 | ENST00000299641 | NDST2 | 10 | 74906812 | 74913092 |
| A6 | ENST00000309979 | Q8WV68 | 10 | 74915239 | 74916144 |
| A6 | ENST00000309967 | | 10 | 74916017 | 74916304 |
| A6 | ENST00000322680 | CAMK2G | 10 | 74916862 | 74978941 |
| A6 | ENST00000305762 | Q8NIA4 | 10 | 74919376 | 74977443 |
| A6 | ENST00000322635 | NM_172169 | 10 | 74919376 | 74978822 |
| A6 | ENST00000277853 | NM_001222 | 10 | 74919376 | 74978822 |
| A6 | ENSESTT00000021493 | | 10 | 74919386 | 74978883 |
| A6 | ENSESTT00000021490 | | 10 | 74919386 | 74978935 |
| A6 | ENSESTT00000021497 | | 10 | 74919578 | 74951712 |
| A6 | ENSESTT00000021495 | | 10 | 74921388 | 74978836 |
| A6 | ENSESTT00000021494 | | 10 | 74921388 | 74978883 |
| A6 | ENSESTT00000021491 | | 10 | 74921388 | 74978935 |
| A6 | ENSESTT00000021496 | | 10 | 74921432 | 74952651 |
| A6 | ENSESTT00000021492 | | 10 | 74953412 | 74978891 |
| A6 | ENSESTT00000021181 | | 10 | 75013538 | 75019592 |
| A6 | ENSESTT00000021180 | | 10 | 75013538 | 75019765 |
| A6 | ENSESTT00000021179 | | 10 | 75013538 | 75021858 |
| A6 | ENST00000317358 | Q8NAK4 | 10 | 75014337 | 75016591 |
| A6 | ENSESTT00000021174 | | 10 | 75015493 | 75019592 |
| A6 | ENSESTT00000021183 | | 10 | 75015493 | 75019765 |
| A6 | ENSESTT00000021182 | | 10 | 75015493 | 75021858 |
| A6 | ENST00000242464 | PLAU | 10 | 75015909 | 75020926 |
| A6 | ENSESTT00000021176 | | 10 | 75016395 | 75019765 |
| A6 | ENSESTT00000021175 | | 10 | 75016395 | 75021858 |
| A6 | ENSESTT00000021178 | | 10 | 75017648 | 75019765 |
| A6 | ENSESTT00000021177 | | 10 | 75017648 | 75021858 |
| A6 | ENSESTT00000021185 | | 10 | 75102475 | 75175189 |
| A6 | ENSESTT00000021184 | | 10 | 75102475 | 75177160 |
| A6 | ENSESTT00000021186 | | 10 | 75102477 | 75168197 |
| A6 | ENST00000277829 | NM_003373 | 10 | 75102569 | 75222530 |
| A6 | ENST00000211998 | VCL | 10 | 75102569 | 75224513 |
| A6 | ENSESTT00000021187 | | 10 | 75147443 | 75177116 |
| A6 | ENSESTT00000021189 | | 10 | 75179224 | 75219023 |
| A6 | ENSESTT00000021188 | | 10 | 75179224 | 75223339 |
| A6 | ENSESTT00000021209 | | 10 | 75200527 | 75206788 |
| A6 | ENSESTT00000021191 | | 10 | 75201559 | 75219023 |
| A6 | ENSESTT00000021190 | | 10 | 75201559 | 75223339 |
| A6 | ENSESTT00000021192 | | 10 | 75218050 | 75223339 |
| A6 | ENSESTT00000021193 | | 10 | 75219116 | 75222883 |
| A6 | ENSESTT00000021208 | | 10 | 75222927 | 75224394 |
| A6 | ENST00000330581 | AP3M1 | 10 | 75226134 | 75255181 |
| A6 | ENSESTT00000021206 | | 10 | 75227787 | 75255426 |
| A6 | ENST00000323546 | NM_030970 | 10 | 75229527 | 75229598 |
| A6 | ENSESTT00000021207 | | 10 | 75233235 | 75234365 |
| A6 | ENSESTT00000021195 | | 10 | 75255568 | 75632868 |
| A6 | ENSESTT00000021194 | | 10 | 75255568 | 75813656 |
| A6 | ENSESTT00000021196 | | 10 | 75255596 | 75328956 |
| A6 | ENST00000286621 | ADK | 10 | 75255640 | 75812806 |
| A6 | ENSESTT00000021199 | | 10 | 75280904 | 75632868 |
| A6 | ENSESTT00000021198 | | 10 | 75280904 | 75704867 |
| A6 | ENSESTT00000021197 | | 10 | 75280904 | 75813656 |
| A6 | ENST00000330453 | | 10 | 75527848 | 75528380 |
| A6 | ENST00000326278 | | 10 | 75631945 | 75632449 |
| A6 | ENSESTT00000021205 | | 10 | 75903848 | 75958752 |
| A6 | ENSESTT00000021201 | | 10 | 75929925 | 75947950 |
| A6 | ENSESTT00000021200 | | 10 | 75929925 | 76076904 |
| A6 | ENST00000287239 | MYST4 | 10 | 75930980 | 76135407 |
| A6 | ENSESTT00000021203 | | 10 | 75930982 | 75947950 |
| A6 | ENSESTT00000021202 | | 10 | 75930982 | 76076904 |
| A6 | ENSESTT00000021204 | | 10 | 75931001 | 75947270 |
| A6 | ENSESTT00000021123 | | 10 | 76083627 | 76086278 |
| A6 | ENSESTT00000021143 | | 10 | 76124157 | 76126508 |
| A6 | ENSESTT00000021142 | | 10 | 76198793 | 76199990 |
| A6 | ENST00000308475 | | 10 | 76198802 | 76213537 |
| A6 | ENSESTT00000021141 | | 10 | 76198943 | 76200127 |
| A6 | ENSESTT00000021139 | | 10 | 76202071 | 76213531 |
| A6 | ENSESTT00000021140 | | 10 | 76208362 | 76213559 |
| A6 | ENST00000330673 | Q96J67 | 10 | 76210030 | 76213518 |
| A6 | ENSESTT00000021124 | | 10 | 76215992 | 76255437 |
| A6 | ENSESTT00000021138 | | 10 | 76228974 | 76230298 |
| A6 | ENST00000287258 | NM_144660 | 10 | 76254890 | 76280615 |
| A6 | ENSESTT00000021125 | | 10 | 76280444 | 76281496 |
| A6 | ENSESTT00000021127 | | 10 | 76314523 | 76322599 |
| A6 | ENSESTT00000021126 | | 10 | 76314523 | 76335808 |
| A6 | ENST00000298468 | VDAC2 | 10 | 76315209 | 76335638 |
| A6 | ENSESTT00000021128 | | 10 | 76315395 | 76335808 |
| A6 | ENST00000304595 | VDAC2 | 10 | 76315945 | 76335465 |
| A6 | ENSESTT00000021129 | | 10 | 76333671 | 76335638 |
| A6 | ENSESTT00000021136 | | 10 | 76338330 | 76339540 |
| A6 | ENSESTT00000021137 | | 10 | 76338332 | 76339540 |
| A6 | ENSESTT00000021135 | | 10 | 76338332 | 76339908 |
| A6 | ENST00000298482 | NM_144589 | 10 | 76338434 | 76340289 |
| A6 | ENSESTT00000021134 | | 10 | 76340085 | 76340318 |
| A6 | ENST00000308111 | NM_032772 | 10 | 76502522 | 76506032 |
| A6 | ENSESTT00000021133 | | 10 | 76504121 | 76505779 |
| A6 | ENSESTT00000021130 | | 10 | 76505464 | 76511780 |
| A6 | ENST00000321905 | | 10 | 76507413 | 76512179 |
| A6 | ENSESTT00000021131 | | 10 | 76508372 | 76511814 |
| A6 | ENST00000260908 | Q9P1K6 | 10 | 76683657 | 76683884 |
| A6 | ENSESTT00000021132 | | 10 | 76875127 | 77140490 |
| A6 | ENST00000277847 | NM_032024 | 10 | 77140367 | 77163144 |
| A6 | ENSESTT00000021106 | | 10 | 77387031 | 77389445 |
| A6 | ENSESTT00000021100 | | 10 | 77428760 | 77661738 |
| A6 | ENSESTT00000021101 | | 10 | 77463793 | 77661593 |
| A6 | ENSESTT00000021098 | | 10 | 77507582 | 77661714 |
| A6 | ENSESTT00000021099 | | 10 | 77569175 | 77661701 |
| A6 | ENSESTT00000021105 | | 10 | 77981962 | 77992271 |
| A6 | ENST00000331566 | | 10 | 77982100 | 77982255 |
| A6 | ENST00000286628 | KCNMA1 | 10 | 77991627 | 78214698 |
| A6 | ENSESTT00000021104 | | 10 | 77991650 | 78019414 |
| A6 | ENSESTT00000021102 | | 10 | 77992403 | 78006633 |
| A6 | ENSESTT00000021103 | | 10 | 77992437 | 78082885 |
| A6 | ENSESTT00000021145 | | 10 | 78009186 | 78053824 |
| A6 | ENSESTT00000021172 | | 10 | 78014424 | 78053629 |
| A6 | ENSESTT00000021173 | | 10 | 78018433 | 78049275 |
| A6 | ENSESTT00000021171 | | 10 | 78053673 | 78116388 |
| A6 | ENSESTT00000021170 | | 10 | 78078354 | 78123424 |
| A6 | ENSESTT00000021168 | | 10 | 78099639 | 78143996 |
| A6 | ENSESTT00000021169 | | 10 | 78116559 | 78143977 |
| A6 | ENSESTT00000021167 | | 10 | 78177554 | 78212924 |
| A6 | ENSESTT00000021166 | | 10 | 78189055 | 78287832 |
| A6 | ENSESTT00000021146 | | 10 | 78204890 | 78205770 |
| A6 | ENSESTT00000021147 | | 10 | 78252653 | 78254461 |
| A6 | ENSESTT00000021162 | | 10 | 78287850 | 78742046 |
| A6 | ENSESTT00000021165 | | 10 | 78686459 | 78723017 |
| A6 | ENSESTT00000021163 | | 10 | 78740556 | 78741848 |
| A6 | ENSESTT00000021164 | | 10 | 78740566 | 78741829 |
| A6 | ENST00000334073 | | 10 | 78836952 | 78838490 |
| A6 | ENST00000320599 | | 10 | 78884695 | 78886237 |
| A6 | ENST00000320511 | DLG5 | 10 | 78895154 | 78961260 |
| A6 | ENSESTT00000021157 | | 10 | 78896519 | 78910150 |
| A6 | ENSESTT00000021161 | | 10 | 78896672 | 78898481 |
| A6 | ENSESTT00000021158 | | 10 | 78896672 | 78910150 |
| A6 | ENSESTT00000021159 | | 10 | 78898010 | 78910150 |
| A6 | ENSESTT00000021160 | | 10 | 78899194 | 78910150 |
| A6 | ENSESTT00000021155 | | 10 | 78911119 | 78913967 |
| A6 | ENSESTT00000021156 | | 10 | 78911160 | 78912313 |
| A6 | ENSESTT00000021154 | | 10 | 78915532 | 78916696 |
| A6 | ENSESTT00000021153 | | 10 | 78920387 | 78923893 |
| A6 | ENSESTT00000021151 | | 10 | 78925896 | 78935239 |
| A6 | ENSESTT00000021152 | | 10 | 78925896 | 78935239 |
| A6 | ENSESTT00000021149 | | 10 | 78925896 | 78946262 |
| A6 | ENSESTT00000021150 | | 10 | 78925896 | 78946262 |
| A6 | ENSESTT00000021148 | | 10 | 78948038 | 78958638 |
| A6 | ENST00000318641 | | 10 | 79032042 | 79032499 |
| A6 | ENST00000277783 | RPC1_HUMAN | 10 | 79080509 | 79133862 |
| A6 | ENSESTT00000021121 | | 10 | 79081352 | 79090348 |
| A6 | ENSESTT00000021122 | | 10 | 79086568 | 79089703 |
| A6 | ENSESTT00000021120 | | 10 | 79104456 | 79128979 |
| A6 | ENSESTT00000021112 | | 10 | 79138153 | 79141824 |
| A6 | ENSESTT00000021111 | | 10 | 79138153 | 79141833 |
| A6 | ENSESTT00000021110 | | 10 | 79138153 | 79144586 |
| A6 | ENSESTT00000021109 | | 10 | 79138153 | 79145062 |
| A6 | ENSESTT00000021108 | | 10 | 79138153 | 79153449 |
| A6 | ENST00000260896 | RPS24 | 10 | 79138226 | 79145063 |
| A6 | ENSESTT00000021114 | | 10 | 79139712 | 79145062 |
| A6 | ENSESTT00000021113 | | 10 | 79139712 | 79159037 |
| A6 | ENST00000311407 | Q9P1E1 | 10 | 79193716 | 79194732 |
| A6 | ENSESTT00000021115 | | 10 | 79353170 | 79457696 |
| A6 | ENSESTT00000021116 | | 10 | 79371686 | 79382425 |
| A6 | ENSESTT00000021117 | | 10 | 79371802 | 79434851 |
| A6 | ENSESTT00000021118 | | 10 | 79398200 | 79405363 |
| A6 | ENSESTT00000021119 | | 10 | 79800422 | 79801382 |
| A6 | ENSESTT00000021253 | | 10 | 80160384 | 80173420 |
| A6 | ENSESTT00000021230 | | 10 | 80244085 | 80395502 |
| A6 | ENST00000334512 | RAI17 | 10 | 80244114 | 80417109 |
| A6 | ENSESTT00000021231 | | 10 | 80348029 | 80395502 |
| A6 | ENST00000277788 | RAI17 | 10 | 80348029 | 80417109 |
| A6 | ENSESTT00000021232 | | 10 | 80410611 | 80417213 |
| A6 | ENSESTT00000021233 | | 10 | 80451828 | 80458345 |
| A6 | ENST00000225174 | PPIF | 10 | 80451837 | 80459684 |
| A6 | ENSESTT00000021234 | | 10 | 80486687 | 80513633 |
| A6 | ENST00000298180 | NM_153367 | 10 | 80486688 | 80549986 |
| A6 | ENSESTT00000021252 | | 10 | 80498696 | 80549886 |
| A6 | ENSESTT00000021251 | | 10 | 80608432 | 80610640 |
| A6 | ENST00000329262 | | 10 | 80617009 | 80617473 |
| A6 | ENST00000328784 | SFTPA2 | 10 | 80661568 | 80663842 |
| A6 | ENSESTT00000021246 | | 10 | 80661840 | 80664756 |
| A6 | ENSESTT00000021247 | | 10 | 80661841 | 80664756 |
| A6 | ENSESTT00000021248 | | 10 | 80661863 | 80664744 |
| A6 | ENSESTT00000021245 | | 10 | 80663244 | 80984138 |
| A6 | ENST00000334432 | SFTPA1 | 10 | 80715314 | 80718472 |
| A6 | ENST00000329658 | | 10 | 80716284 | 80718472 |
| A6 | ENSESTT00000021235 | | 10 | 80718201 | 81039562 |
| A6 | ENSESTT00000021237 | | 10 | 80718531 | 81039746 |
| A6 | ENSESTT00000021238 | | 10 | 80718764 | 81039731 |
| A6 | ENSESTT00000021241 | | 10 | 80718926 | 80719667 |
| A6 | ENSESTT00000021239 | | 10 | 80719112 | 81039731 |
| A6 | ENSESTT00000021240 | | 10 | 80719228 | 81039731 |
| A6 | ENSESTT00000021236 | | 10 | 80772270 | 81190839 |
| A6 | ENSESTT00000021250 | | 10 | 80789921 | 80795955 |
| A6 | ENST00000241878 | Q9H392 | 10 | 80852848 | 80853054 |
| A6 | ENSESTT00000021249 | | 10 | 80928323 | 80930532 |
| A6 | ENST00000333539 | | 10 | 80936971 | 80937273 |
| A6 | ENST00000242457 | SFTPA2 | 10 | 80981513 | 80983787 |
| A6 | ENSESTT00000021242 | | 10 | 80981785 | 80984701 |
| A6 | ENSESTT00000021243 | | 10 | 80981786 | 80984701 |
| A6 | ENSESTT00000021244 | | 10 | 80981808 | 80984689 |
| A6 | ENSESTT00000021401 | | 10 | 81035257 | 81038146 |
| A6 | ENST00000242455 | SFTPA1 | 10 | 81035260 | 81038418 |
| A6 | ENSESTT00000021402 | | 10 | 81035266 | 81038139 |
| A6 | ENSESTT00000021403 | | 10 | 81035780 | 81036737 |
| A6 | ENSESTT00000021455 | | 10 | 81038872 | 81039613 |
| A6 | ENSESTT00000021404 | | 10 | 81093936 | 81101184 |
| A6 | ENSESTT00000021454 | | 10 | 81110118 | 81116151 |
| A6 | ENSESTT00000021446 | | 10 | 81116552 | 81250849 |
| A6 | ENST00000335456 | | 10 | 81128338 | 81275386 |
| A6 | ENST00000334434 | Q9H392 | 10 | 81173024 | 81173230 |
| A6 | ENSESTT00000021451 | | 10 | 81190668 | 81230459 |
| A6 | ENSESTT00000021447 | | 10 | 81190746 | 81250724 |
| A6 | ENSESTT00000021453 | | 10 | 81202274 | 81202689 |
| A6 | ENSESTT00000021448 | | 10 | 81226317 | 81250724 |
| A6 | ENSESTT00000021450 | | 10 | 81228390 | 81238987 |
| A6 | ENSESTT00000021452 | | 10 | 81228392 | 81230459 |
| A6 | ENSESTT00000021449 | | 10 | 81228392 | 81250724 |
| A6 | ENST00000305740 | | 10 | 81268629 | 81274246 |
| A6 | ENST00000298189 | Q96LH7 | 10 | 81268792 | 81275205 |
| A6 | ENSESTT00000021445 | | 10 | 81294428 | 81295438 |
| A6 | ENSESTT00000021405 | | 10 | 81329237 | 81332141 |
| A6 | ENST00000312535 | | 10 | 81344660 | 81347359 |
| A6 | ENSESTT00000021406 | | 10 | 81346244 | 81347451 |
| A6 | ENSESTT00000021444 | | 10 | 81362073 | 81373418 |
| A6 | ENSESTT00000021443 | | 10 | 81362073 | 81373430 |
| A6 | ENST00000256035 | SFTPD | 10 | 81362085 | 81373438 |
| A6 | ENST00000302577 | | 10 | 81456301 | 81456726 |
| A6 | ENSESTT00000021407 | | 10 | 81503006 | 81516880 |
| A6 | ENSESTT00000021408 | | 10 | 81503009 | 81516880 |
| A6 | ENST00000256052 | NM_025125 | 10 | 81503033 | 81516880 |
| A6 | ENSESTT00000021409 | | 10 | 81503580 | 81516880 |
| A6 | ENSESTT00000021410 | | 10 | 81506036 | 81510774 |
| A6 | ENSESTT00000021411 | | 10 | 81506170 | 81515572 |
| A6 | ENSESTT00000021412 | | 10 | 81506477 | 81516880 |
| A6 | ENSESTT00000021442 | | 10 | 81515319 | 81516192 |
| A6 | ENSESTT00000021413 | | 10 | 81557063 | 81569687 |
| A6 | ENSESTT00000021414 | | 10 | 81566481 | 81568673 |
| A6 | ENSESTT00000021415 | | 10 | 81568379 | 81569370 |
| A6 | ENSESTT00000021416 | | 10 | 81579472 | 81582085 |
| A6 | ENSESTT00000021426 | | 10 | 81579821 | 81582361 |
| A6 | ENSESTT00000021430 | | 10 | 81579821 | 81583460 |
| A6 | ENSESTT00000021429 | | 10 | 81579821 | 81587747 |
| A6 | ENSESTT00000021427 | | 10 | 81579932 | 81590496 |
| A6 | ENST00000265447 | ANXA11 | 10 | 81580186 | 81597194 |
| A6 | ENSESTT00000021428 | | 10 | 81583422 | 81587941 |
| A6 | ENSESTT00000021440 | | 10 | 81591229 | 81629900 |
| A6 | ENSESTT00000021441 | | 10 | 81593529 | 81597204 |
| A6 | ENST00000316258 | | 10 | 81671552 | 81672016 |
| A6 | ENST00000280867 | MAT1A | 10 | 81696158 | 81713756 |
| A6 | ENSESTT00000021439 | | 10 | 81697070 | 81697478 |
| A6 | ENSESTT00000021438 | | 10 | 81697983 | 81699025 |
| A6 | ENSESTT00000021437 | | 10 | 81700853 | 81713692 |
| A6 | ENSESTT00000021435 | | 10 | 81700889 | 81714017 |
| A6 | ENSESTT00000021436 | | 10 | 81705012 | 81714017 |
| A6 | ENSESTT00000021433 | | 10 | 81760462 | 81781086 |
| A6 | ENST00000302526 | NM_138812 | 10 | 81762785 | 81776934 |
| A6 | ENSESTT00000021434 | | 10 | 81762846 | 81781047 |
| A6 | ENSESTT00000021417 | | 10 | 81781106 | 81787306 |
| A6 | ENST00000316132 | NM_032372 | 10 | 81781135 | 81792406 |
| A6 | ENSESTT00000021418 | | 10 | 81787282 | 81791494 |
| A6 | ENSESTT00000021419 | | 10 | 81832162 | 81856971 |
| A6 | ENSESTT00000021420 | | 10 | 81832829 | 81856971 |
| A6 | ENSESTT00000021421 | | 10 | 81832918 | 81856971 |
| A6 | ENSESTT00000021422 | | 10 | 81838176 | 81856971 |
| A6 | ENST00000241895 | NM_032333 | 10 | 81838189 | 81856968 |
| A6 | ENST00000312169 | Q9BU34 | 10 | 81913567 | 81942309 |
| A6 | ENST00000316064 | Q8N2P5 | 10 | 81913567 | 81945181 |
| A6 | ENST00000265450 | NM_030927 | 10 | 81913567 | 81946237 |
| A6 | ENSESTT00000021423 | | 10 | 81913573 | 81947518 |
| A6 | ENSESTT00000021432 | | 10 | 81939416 | 81943437 |
| A6 | ENSESTT00000021424 | | 10 | 81940535 | 81942599 |
| A6 | ENSESTT00000021425 | | 10 | 81940630 | 81956185 |
| A6 | ENSESTT00000021431 | | 10 | 81953930 | 81960275 |
| A6 | ENST00000329171 | | 10 | 81959343 | 81959717 |
| A6 | ENST00000313455 | Q8NB58 | 10 | 82067342 | 82068641 |
| A6 | ENSESTT00000021107 | | 10 | 82074130 | 82078067 |
| A7 | OTTHUMT00007008148 | Hs_7_c5082 | 7 | 71452603 | 71709685 |
| A7 | ENSESTT00000039973 | | 7 | 71571787 | 71621457 |
| A7 | OTTHUMT00007007334 | Hs_7_c1064 | 7 | 71599963 | 71600172 |
| A7 | ENST00000265301 | | 7 | 71605907 | 71606016 |
| A7 | OTTHUMT00007007336 | Hs_7_c1066 | 7 | 71645929 | 71646324 |
| A7 | ENSESTT00000039972 | | 7 | 71654577 | 71698179 |
| A7 | ENSESTT00000039971 | | 7 | 71689895 | 71710894 |
| A7 | ENSESTT00000039970 | | 7 | 71709544 | 71710900 |
| A7 | ENSESTT00000039903 | | 7 | 71712159 | 71716707 |
| A7 | ENSESTT00000039904 | | 7 | 71712178 | 71714460 |
| A7 | OTTHUMT00007006933 | LOC155370 | 7 | 71712203 | 71716703 |
| A7 | ENSESTT00000039905 | | 7 | 71712367 | 71716710 |
| A7 | OTTHUMT00007007337 | Hs_7_c1068 | 7 | 71746587 | 71753122 |
| A7 | ENSESTT00000039948 | | 7 | 71746639 | 71904642 |
| A7 | OTTHUMT00007007338 | Hs_7_c1069 | 7 | 71747922 | 71748002 |
| A7 | ENST00000323915 | | 7 | 71749050 | 71751686 |
| A7 | ENSESTT00000039906 | | 7 | 71762023 | 71773321 |
| A7 | ENSESTT00000039911 | | 7 | 71762045 | 71763010 |
| A7 | ENSESTT00000039910 | | 7 | 71762045 | 71822067 |
| A7 | ENSESTT00000039909 | | 7 | 71762045 | 71822522 |
| A7 | ENSESTT00000039908 | | 7 | 71762045 | 72120515 |
| A7 | ENSESTT00000039907 | | 7 | 71762045 | 72121873 |
| A7 | OTTHUMT00007006851 | POM121 | 7 | 71762053 | 71834096 |
| A7 | ENST00000275580 | O95746 | 7 | 71762053 | 71922346 |
| A7 | ENSESTT00000039912 | | 7 | 71773689 | 71796697 |
| A7 | ENST00000257622 | POM121 | 7 | 71809068 | 71828890 |
| A7 | ENSESTT00000039913 | | 7 | 71823101 | 72121996 |
| A7 | ENSESTT00000039914 | | 7 | 71823135 | 71830954 |
| A7 | ENSESTT00000039938 | | 7 | 71830947 | 71831469 |
| A7 | ENSESTT00000039937 | | 7 | 71830947 | 71831838 |
| A7 | ENSESTT00000039935 | | 7 | 71830947 | 71831880 |
| A7 | ENSESTT00000039933 | | 7 | 71830947 | 71831893 |
| A7 | ENSESTT00000039931 | | 7 | 71830947 | 71833202 |
| A7 | ENSESTT00000039929 | | 7 | 71830947 | 71837351 |
| A7 | ENSESTT00000039926 | | 7 | 71830947 | 71837371 |
| A7 | ENSESTT00000039925 | | 7 | 71830947 | 71837390 |
| A7 | ENSESTT00000039936 | | 7 | 71830954 | 71831875 |
| A7 | ENSESTT00000039934 | | 7 | 71830954 | 71831893 |
| A7 | ENSESTT00000039932 | | 7 | 71830954 | 71833202 |
| A7 | ENSESTT00000039930 | | 7 | 71830954 | 71837351 |
| A7 | ENSESTT00000039927 | | 7 | 71830954 | 71837371 |
| A7 | OTTHUMT00007007028 | WBSCR20A.1 | 7 | 71830955 | 71837376 |
| A7 | ENST00000330999 | NM_148936 | 7 | 71831040 | 71832800 |
| A7 | ENST00000222857 | NM_149379 | 7 | 71831040 | 71834307 |
| A7 | ENSESTT00000039923 | | 7 | 71831952 | 72131287 |
| A7 | ENSESTT00000039928 | | 7 | 71832127 | 71837371 |
| A7 | ENSESTT00000039924 | | 7 | 71836013 | 71837392 |
| A7 | ENST00000285805 | Q86UV6 | 7 | 71842133 | 71852114 |
| A7 | ENSESTT00000039939 | | 7 | 71842201 | 71849602 |
| A7 | OTTHUMT00007006839 | mfhmh_h_70400969_71300968_m_133605736_13 | 7 | 71842530 | 71848805 |
| A7 | ENSESTT00000039940 | | 7 | 71848707 | 72154649 |
| A7 | ENSESTT00000039915 | | 7 | 71851502 | 71854934 |
| A7 | ENST00000335315 | Q8N4N6 | 7 | 71852127 | 71852366 |
| A7 | OTTHUMT00007007357 | Hs_7_c1076 | 7 | 71852462 | 71854375 |
| A7 | OTTHUMT00007007220 | DKFZP434A0131.3 | 7 | 71857195 | 71882155 |
| A7 | ENST00000305954 | NM_018991 | 7 | 71857213 | 71882155 |
| A7 | ENSESTT00000039969 | | 7 | 71876851 | 71877435 |
| A7 | ENSESTT00000039916 | | 7 | 71877080 | 72107101 |
| A7 | ENSESTT00000039962 | | 7 | 71880796 | 71888562 |
| A7 | ENSESTT00000039963 | | 7 | 71880796 | 71888562 |
| A7 | ENSESTT00000039949 | | 7 | 71880796 | 71888584 |
| A7 | ENSESTT00000039950 | | 7 | 71880796 | 71888584 |
| A7 | ENSESTT00000039964 | | 7 | 71881128 | 71888562 |
| A7 | ENSESTT00000039965 | | 7 | 71881128 | 71888562 |
| A7 | ENSESTT00000039951 | | 7 | 71881128 | 71888584 |
| A7 | ENSESTT00000039952 | | 7 | 71881128 | 71888584 |
| A7 | ENSESTT00000039953 | | 7 | 71881128 | 71888584 |
| A7 | ENSESTT00000039966 | | 7 | 71881144 | 71888562 |
| A7 | ENSESTT00000039954 | | 7 | 71881144 | 71888584 |
| A7 | ENSESTT00000039955 | | 7 | 71881144 | 71888584 |
| A7 | ENSESTT00000039956 | | 7 | 71881144 | 71888584 |
| A7 | ENSESTT00000039957 | | 7 | 71881144 | 71888584 |
| A7 | ENSESTT00000039967 | | 7 | 71881902 | 71888562 |
| A7 | ENSESTT00000039958 | | 7 | 71881902 | 71888584 |
| A7 | ENSESTT00000039959 | | 7 | 71881902 | 71888584 |
| A7 | ENSESTT00000039960 | | 7 | 71882400 | 71888584 |
| A7 | ENSESTT00000039961 | | 7 | 71882400 | 71888584 |
| A7 | ENSESTT00000039968 | | 7 | 71882996 | 71888562 |
| A7 | OTTHUMT00007007358 | Hs_7_c1079 | 7 | 71888246 | 71931788 |
| A7 | ENSESTT00000039917 | | 7 | 71888736 | 71922142 |
| A7 | ENSESTT00000039918 | | 7 | 71888768 | 71932926 |
| A7 | ENSESTT00000039920 | | 7 | 71888780 | 71904881 |
| A7 | ENSESTT00000039919 | | 7 | 71888780 | 71932926 |
| A7 | OTTHUMT00007006363 | mbhmh_gw1304124.71119255.71153128.3.2e−3 | 7 | 71892093 | 71895794 |
| A7 | ENSESTT00000039921 | | 7 | 71894107 | 71932926 |
| A7 | ENST00000334824 | Q86WY7 | 7 | 71902561 | 71908486 |
| A7 | ENSESTT00000039944 | | 7 | 71903628 | 71905036 |
| A7 | ENSESTT00000039943 | | 7 | 71904798 | 71932687 |
| A7 | ENSESTT00000039947 | | 7 | 71908198 | 71909384 |
| A7 | ENSESTT00000039946 | | 7 | 71910560 | 71912409 |
| A7 | ENSESTT00000039945 | | 7 | 71918103 | 71919942 |
| A7 | ENST00000323689 | | 7 | 71920032 | 71931791 |
| A7 | ENST00000306533 | PMS2L5 | 7 | 71922114 | 71931791 |
| A7 | ENST00000335506 | Q86WY7 | 7 | 71930603 | 71936531 |
| A7 | ENSESTT00000039942 | | 7 | 71931673 | 71933081 |
| A7 | OTTHUMT00007006797 | mfhmh_H_NH0396K03_F218045.fgenesh2.5 | 7 | 71931784 | 71940793 |
| A7 | ENSESTT00000039941 | | 7 | 71936243 | 71937429 |
| A7 | ENSESTT00000039922 | | 7 | 71981407 | 72009414 |
| A7 | OTTHUMT00007007381 | Hs_7_c1083 | 7 | 72001548 | 72031575 |
| A7 | ENSESTT00000041207 | | 7 | 72001575 | 72012822 |
| A7 | ENSESTT00000041210 | | 7 | 72016228 | 72028278 |
| A7 | ENSESTT00000041209 | | 7 | 72016228 | 72031964 |
| A7 | ENSESTT00000041208 | | 7 | 72016228 | 72032675 |
| A7 | ENSESTT00000041225 | | 7 | 72016228 | 72032723 |
| A7 | ENSESTT00000041224 | | 7 | 72016228 | 72032724 |
| A7 | ENSESTT00000041215 | | 7 | 72017507 | 72023278 |
| A7 | ENSESTT00000041214 | | 7 | 72017507 | 72031964 |
| A7 | ENSESTT00000041213 | | 7 | 72017507 | 72032675 |
| A7 | ENSESTT00000041212 | | 7 | 72017507 | 72032723 |
| A7 | ENSESTT00000041211 | | 7 | 72017507 | 72032724 |
| A7 | ENSESTT00000041220 | | 7 | 72018632 | 72028278 |
| A7 | ENSESTT00000041219 | | 7 | 72018632 | 72031964 |
| A7 | ENSESTT00000041218 | | 7 | 72018632 | 72032675 |
| A7 | ENSESTT00000041217 | | 7 | 72018632 | 72032723 |
| A7 | ENSESTT00000041216 | | 7 | 72018632 | 72032724 |
| A7 | ENSESTT00000041221 | | 7 | 72020761 | 72028278 |
| A7 | ENSESTT00000041222 | | 7 | 72028242 | 72032724 |
| A7 | ENSESTT00000041223 | | 7 | 72029512 | 72032724 |
| A7 | ENSESTT00000041228 | | 7 | 72046727 | 72056376 |
| A7 | ENSESTT00000041226 | | 7 | 72046727 | 72062034 |
| A7 | ENSESTT00000041227 | | 7 | 72046727 | 72062034 |
| A7 | OTTHUMT00007006731 | NCF1.1 | 7 | 72046768 | 72062076 |
| A7 | ENSESTT00000041229 | | 7 | 72046771 | 72056068 |
| A7 | ENST00000330925 | | 7 | 72046778 | 72061921 |
| A7 | ENSESTT00000041230 | | 7 | 72057999 | 72062076 |
| A7 | ENSESTT00000041231 | | 7 | 72058029 | 72062076 |
| A7 | ENST00000297906 | | 7 | 72069401 | 72070888 |
| A7 | ENSESTT00000041281 | | 7 | 72077500 | 72079722 |
| A7 | OTTHUMT00007008151 | Hs_7_c5085 | 7 | 72085452 | 72106243 |
| A7 | OTTHUMT00007006556 | mbhmh_h_71200968_72100967_m_133605736_13 | 7 | 72111678 | 72127258 |
| A7 | ENST00000308082 | | 7 | 72119594 | 72129318 |
| A7 | OTTHUMT00007007030 | WBSCR20A.2 | 7 | 72129323 | 72134901 |
| A7 | ENST00000310326 | WBSCR20A | 7 | 72129324 | 72134920 |
| A7 | ENSESTT00000041279 | | 7 | 72129920 | 72134917 |
| A7 | ENSESTT00000041278 | | 7 | 72130393 | 72133598 |
| A7 | ENSESTT00000041280 | | 7 | 72130841 | 72134862 |
| A7 | ENST00000333149 | NM_178125 | 7 | 72138632 | 72154182 |
| A7 | OTTHUMT00007007384 | Hs_7_c1089 | 7 | 72139056 | 72150837 |
| A7 | ENSESTT00000041277 | | 7 | 72139434 | 72143038 |
| A7 | ENSESTT00000041276 | | 7 | 72139434 | 72144953 |
| A7 | ENSESTT00000041275 | | 7 | 72139434 | 72151653 |
| A7 | OTTHUMT00007007413 | Hs_7_c1090 | 7 | 72140207 | 72141310 |
| A7 | ENST00000252037 | FKBP6 | 7 | 72154529 | 72168994 |
| A7 | OTTHUMT00007006557 | mbhmh_h_71200968_72100967_m_133605736_13 | 7 | 72154529 | 72168994 |
| A7 | ENSESTT00000041233 | | 7 | 72156394 | 72184728 |
| A7 | ENSESTT00000041232 | | 7 | 72156394 | 72184733 |
| A7 | ENSESTT00000041234 | | 7 | 72157790 | 72168998 |
| A7 | OTTHUMT00007006375 | FZD9 | 7 | 72260410 | 72262589 |
| A7 | ENST00000265756 | BAZ1B | 7 | 72266830 | 72348646 |
| A7 | OTTHUMT00007007171 | BAZ1B | 7 | 72266830 | 72348712 |
| A7 | ENSESTT00000041274 | | 7 | 72268726 | 72273720 |
| A7 | ENSESTT00000041273 | | 7 | 72277272 | 72303421 |
| A7 | ENSESTT00000041272 | | 7 | 72304601 | 72348524 |
| A7 | ENSESTT00000041271 | | 7 | 72304601 | 72348733 |
| A7 | ENSESTT00000041266 | | 7 | 72362783 | 72383988 |
| A7 | ENST00000223368 | BCL7B | 7 | 72362783 | 72384121 |
| A7 | OTTHUMT00007006736 | BCL7B | 7 | 72362783 | 72384121 |
| A7 | ENSESTT00000041269 | | 7 | 72363456 | 72383648 |
| A7 | ENSESTT00000041264 | | 7 | 72363456 | 72384093 |
| A7 | ENSESTT00000041263 | | 7 | 72363469 | 72384120 |
| A7 | ENSESTT00000041267 | | 7 | 72363476 | 72383988 |
| A7 | ENSESTT00000041270 | | 7 | 72363528 | 72383646 |
| A7 | ENSESTT00000041268 | | 7 | 72363620 | 72383668 |
| A7 | ENSESTT00000041265 | | 7 | 72363620 | 72384016 |
| A7 | ENSESTT00000041262 | | 7 | 72363722 | 72384156 |
| A7 | OTTHUMT00007006751 | TBL2 | 7 | 72396096 | 72405069 |
| A7 | ENST00000275621 | TBL2 | 7 | 72396099 | 72405018 |
| A7 | ENSESTT00000041260 | | 7 | 72396857 | 72405034 |
| A7 | ENSESTT00000041261 | | 7 | 72396857 | 72405034 |
| A7 | ENST00000305632 | NM_032988 | 7 | 72403031 | 72404976 |
| A7 | ENST00000243720 | WBSCR14 | 7 | 72419621 | 72450967 |
| A7 | OTTHUMT00007006613 | WBSCR14 | 7 | 72419621 | 72450967 |
| A7 | ENSESTT00000041259 | | 7 | 72420796 | 72422929 |
| A7 | ENST00000313375 | WBSCR14 | 7 | 72422850 | 72450919 |
| A7 | ENSESTT00000041257 | | 7 | 72424072 | 72450970 |
| A7 | ENSESTT00000041258 | | 7 | 72433738 | 72450946 |
| A7 | OTTHUMT00007007252 | mbhmh_h_71200968_72100967_m_133605736_13 | 7 | 72478242 | 72507686 |
| A7 | ENST00000324941 | WBSCR24 | 7 | 72494272 | 72497803 |
| A7 | ENSESTT00000041235 | | 7 | 72494282 | 72497608 |
| A7 | OTTHUMT00007006614 | WBSCR18 | 7 | 72508698 | 72509869 |
| A7 | ENST00000324842 | WBSCR18 | 7 | 72509170 | 72509850 |
| A7 | ENSESTT00000041236 | | 7 | 72510028 | 72524583 |
| A7 | ENST00000265758 | WBSCR22 | 7 | 72510034 | 72524313 |
| A7 | OTTHUMT00007006630 | WBSCR22 | 7 | 72510034 | 72524639 |
| A7 | ENSESTT00000041237 | | 7 | 72510055 | 72524583 |
| A7 | ENSESTT00000041238 | | 7 | 72510072 | 72524583 |
| A7 | ENSESTT00000041239 | | 7 | 72510232 | 72519061 |
| A7 | ENSESTT00000041240 | | 7 | 72517339 | 72524579 |
| A7 | ENSESTT00000041241 | | 7 | 72519822 | 72524424 |
| A7 | ENSESTT00000041242 | | 7 | 72520410 | 72524569 |
| A7 | ENST00000222812 | STX1A | 7 | 72525637 | 72546059 |
| A7 | OTTHUMT00007006498 | STX1A | 7 | 72525637 | 72546086 |
| A7 | ENSESTT00000041256 | | 7 | 72526715 | 72530923 |
| A7 | ENSESTT00000041252 | | 7 | 72526715 | 72546118 |
| A7 | ENSESTT00000041253 | | 7 | 72526718 | 72546118 |
| A7 | ENSESTT00000041254 | | 7 | 72530608 | 72546099 |
| A7 | ENSESTT00000041255 | | 7 | 72531576 | 72546069 |
| A7 | OTTHUMT00007006628 | WBSCR21 | 7 | 72562521 | 72565258 |
| A7 | ENST00000322862 | NM_148914 | 7 | 72562544 | 72565281 |
| A7 | ENST00000222800 | WBSCR21 | 7 | 72562986 | 72565224 |
| A7 | OTTHUMT00007006748 | CLDN3 | 7 | 72595424 | 72596673 |
| A7 | ENST00000297926 | CLDN3 | 7 | 72595814 | 72596476 |
| A7 | OTTHUMT00007006403 | nh_nm_gi18182840 | 7 | 72655639 | 72656526 |
| A7 | OTTHUMT00007006749 | CLDN4 | 7 | 72657433 | 72659112 |
| A7 | ENSESTT00000041251 | | 7 | 72661015 | 72666499 |
| A7 | ENST00000297873 | NM_152559 | 7 | 72661023 | 72668960 |
| A7 | OTTHUMT00007007226 | mbhmh_nh_h_71200968_72100967_m_132805737 | 7 | 72661138 | 72668567 |
| A7 | ENSESTT00000041243 | | 7 | 72687586 | 72692202 |
| A7 | ENST00000320531 | NM_182504 | 7 | 72687586 | 72692314 |
| A7 | OTTHUMT00007007227 | mbhmh_nh_h_71200968_72100967_m_132805737 | 7 | 72691651 | 72707065 |
| A7 | ENSESTT00000041244 | | 7 | 72854539 | 72869441 |
| A7 | ENST00000320425 | ELN | 7 | 72854615 | 72895127 |
| A7 | ENST00000309678 | Q14235 | 7 | 72854615 | 72895127 |
| A7 | ENST00000320492 | Q8NBI4 | 7 | 72854615 | 72895127 |
| A7 | OTTHUMT00007006288 | ELN | 7 | 72854615 | 72895127 |
| A7 | ENST00000320399 | Q8N2G0 | 7 | 72854615 | 72896103 |
| A7 | ENST00000252034 | O15337 | 7 | 72861793 | 72887565 |
| A7 | ENSESTT00000041245 | | 7 | 72879278 | 72882774 |
| A7 | ENSESTT00000041246 | | 7 | 72883099 | 72889621 |
| A7 | ENSESTT00000041247 | | 7 | 72892119 | 72895391 |
| A7 | ENST00000265761 | LIMK1 | 7 | 72910253 | 72948951 |
| A7 | OTTHUMT00007006772 | LIMK1 | 7 | 72910253 | 72948951 |
| A7 | ENSESTT00000041248 | | 7 | 72919602 | 72925577 |
| A7 | ENSESTT00000041249 | | 7 | 72932555 | 72947826 |
| A7 | ENSESTT00000041250 | | 7 | 72938074 | 72947826 |
| A7 | ENSESTT00000036020 | | 7 | 73000780 | 73021942 |
| A7 | ENSESTT00000036019 | | 7 | 73000780 | 73023522 |
| A7 | ENSESTT00000036021 | | 7 | 73000783 | 73016740 |
| A7 | ENSESTT00000036016 | | 7 | 73000792 | 73021897 |
| A7 | ENSESTT00000036017 | | 7 | 73000792 | 73021897 |
| A7 | ENST00000265754 | WBSCR1 | 7 | 73000803 | 73023526 |
| A7 | OTTHUMT00007006349 | WBSCR1 | 7 | 73000803 | 73023526 |
| A7 | ENST00000265753 | WBSCR1 | 7 | 73000811 | 73021735 |
| A7 | ENSESTT00000036018 | | 7 | 73000834 | 73023522 |
| A7 | ENSESTT00000036027 | | 7 | 73036361 | 73046683 |
| A7 | ENST00000309368 | WBSCR5 | 7 | 73036372 | 73056254 |
| A7 | OTTHUMT00007006353 | WBSCR5 | 7 | 73036372 | 73056260 |
| A7 | ENSESTT00000036028 | | 7 | 73036409 | 73047047 |
| A7 | ENSESTT00000036029 | | 7 | 73036413 | 73055741 |
| A7 | ENSESTT00000036030 | | 7 | 73036479 | 73055741 |
| A7 | ENSESTT00000036031 | | 7 | 73036487 | 73056261 |
| A7 | ENSESTT00000036033 | | 7 | 73041247 | 73055741 |
| A7 | ENSESTT00000036032 | | 7 | 73041247 | 73056261 |
| A7 | ENSESTT00000036034 | | 7 | 73042370 | 73055741 |
| A7 | ENST00000315652 | WBSCR5 | 7 | 73042403 | 73051169 |
| A7 | ENSESTT00000036035 | | 7 | 73046885 | 73055741 |
| A7 | ENST00000055077 | RFC2 | 7 | 73057931 | 73080835 |
| A7 | OTTHUMT00007006563 | RFC2 | 7 | 73058100 | 73080829 |
| A7 | ENSESTT00000036108 | | 7 | 73058332 | 73076209 |
| A7 | ENSESTT00000036107 | | 7 | 73058332 | 73080717 |
| A7 | ENSESTT00000036106 | | 7 | 73058332 | 73080816 |
| A7 | ENSESTT00000036105 | | 7 | 73058332 | 73080827 |
| A7 | ENSESTT00000036103 | | 7 | 73058332 | 73080835 |
| A7 | ENST00000275627 | RFC2 | 7 | 73058533 | 73080810 |
| A7 | ENSESTT00000036104 | | 7 | 73058566 | 73080828 |
| A7 | OTTHUMT00007006304 | CYLN2 | 7 | 73115902 | 73232362 |
| A7 | ENST00000275634 | CYLN2 | 7 | 73143935 | 73227994 |
| A7 | ENST00000223398 | CYLN2 | 7 | 73143974 | 73227994 |
| A7 | ENSESTT00000036039 | | 7 | 73183000 | 73202399 |
| A7 | ENSESTT00000036040 | | 7 | 73183883 | 73202625 |
| A7 | ENSESTT00000036041 | | 7 | 73202736 | 73227995 |
| A7 | ENSESTT00000036042 | | 7 | 73203042 | 73227995 |
| A7 | ENSESTT00000036043 | | 7 | 73212952 | 73230806 |
| A7 | OTTHUMT00007007106 | GTF2IRD1 | 7 | 73280217 | 73429013 |
| A7 | ENST00000265755 | GTF2IRD1 | 7 | 73334508 | 73428857 |
| A7 | ENSESTT00000036044 | | 7 | 73346006 | 73381903 |
| A7 | ENSESTT00000036045 | | 7 | 73350521 | 73364601 |
| A7 | OTTHUMT00007006631 | WBSCR23 | 7 | 73358718 | 73361335 |
| A7 | OTTHUMT00007007275 | Hs_7_c1118 | 7 | 73360975 | 73361085 |
| A7 | ENSESTT00000036046 | | 7 | 73373585 | 73429028 |
| A7 | ENSESTT00000036047 | | 7 | 73427384 | 73429022 |
| A7 | ENSESTT00000036048 | | 7 | 73484123 | 73517534 |
| A7 | OTTHUMT00007006793 | GTF2I | 7 | 73484127 | 73587111 |
| A7 | ENSESTT00000036102 | | 7 | 73515362 | 73526731 |
| A7 | ENSESTT00000036051 | | 7 | 73515542 | 73564552 |
| A7 | ENSESTT00000036052 | | 7 | 73515542 | 73564552 |
| A7 | ENSESTT00000036049 | | 7 | 73515542 | 73566495 |
| A7 | ENSESTT00000036050 | | 7 | 73515542 | 73566495 |
| A7 | ENST00000324924 | NM_033000 | 7 | 73515552 | 73585257 |
| A7 | ENST00000324906 | GTF2I | 7 | 73515552 | 73585257 |
| A7 | ENST00000324896 | GTF2I | 7 | 73515552 | 73587109 |
| A7 | ENSESTT00000036053 | | 7 | 73517393 | 73555329 |
| A7 | ENSESTT00000036063 | | 7 | 73569898 | 73575881 |
| A7 | ENSESTT00000036062 | | 7 | 73569898 | 73581959 |
| A7 | ENSESTT00000036061 | | 7 | 73569898 | 73585643 |
| A7 | ENSESTT00000036060 | | 7 | 73569898 | 73586353 |
| A7 | ENSESTT00000036059 | | 7 | 73569898 | 73586387 |
| A7 | ENSESTT00000036058 | | 7 | 73569898 | 73586401 |
| A7 | ENSESTT00000036069 | | 7 | 73571185 | 73575881 |
| A7 | ENSESTT00000036068 | | 7 | 73571185 | 73581959 |
| A7 | ENSESTT00000036067 | | 7 | 73571185 | 73585643 |
| A7 | ENSESTT00000036066 | | 7 | 73571185 | 73586353 |
| A7 | ENSESTT00000036065 | | 7 | 73571185 | 73586387 |
| A7 | ENSESTT00000036064 | | 7 | 73571185 | 73586401 |
| A7 | ENSESTT00000036074 | | 7 | 73572309 | 73581959 |
| A7 | ENSESTT00000036073 | | 7 | 73572309 | 73585643 |
| A7 | ENSESTT00000036072 | | 7 | 73572309 | 73586353 |
| A7 | ENSESTT00000036071 | | 7 | 73572309 | 73586387 |
| A7 | ENSESTT00000036070 | | 7 | 73572309 | 73586401 |
| A7 | ENSESTT00000036075 | | 7 | 73574439 | 73581959 |
| A7 | ENSESTT00000036076 | | 7 | 73583165 | 73585027 |
| A7 | ENSESTT00000036077 | | 7 | 73584379 | 73586387 |
| A7 | OTTHUMT00007006732 | NCF1.2 | 7 | 73600398 | 73615746 |
| A7 | ENSESTT00000036086 | | 7 | 73600417 | 73610049 |
| A7 | ENST00000289473 | NCF1 | 7 | 73600468 | 73615593 |
| A7 | ENSESTT00000036087 | | 7 | 73611674 | 73615748 |
| A7 | ENSESTT00000036088 | | 7 | 73611704 | 73615748 |
| A7 | ENSESTT00000036089 | | 7 | 73614408 | 73615753 |
| A7 | ENST00000302215 | NM_032203 | 7 | 73622573 | 73679914 |
| A7 | OTTHUMT00007006446 | mbhmh_H_NH0813J07_F171046.fgenesh2.2 | 7 | 73623090 | 73663589 |
| A7 | ENSESTT00000036101 | | 7 | 73659841 | 73679927 |
| A7 | OTTHUMT00007007215 | DKFZP434A0131.1 | 7 | 73706764 | 73718764 |
| A7 | ENST00000308103 | NM_018991 | 7 | 73710352 | 73713295 |
| A7 | OTTHUMT00007008153 | Hs_7_c5086 | 7 | 73711129 | 73713351 |
| A7 | OTTHUMT00007007303 | Hs_7_c1127 | 7 | 73718511 | 73733865 |
| A7 | ENST00000318547 | PMS2L5 | 7 | 73718985 | 73733868 |
| A7 | ENSESTT00000036090 | | 7 | 73718990 | 73726032 |
| A7 | ENSESTT00000036091 | | 7 | 73719013 | 73733949 |
| A7 | ENST00000318568 | Q16673 | 7 | 73722332 | 73729180 |
| A7 | ENSESTT00000036092 | | 7 | 73726925 | 73728321 |
| A7 | ENST00000333385 | Q86WY7 | 7 | 73732679 | 73739325 |
| A7 | OTTHUMT00007006291 | mfhmh_chr7.73.013.a | 7 | 73733861 | 73770943 |
| A7 | ENST00000328350 | | 7 | 73737708 | 73740340 |
| A7 | ENST00000330313 | | 7 | 73791140 | 73844306 |
| A7 | ENST00000332301 | | 7 | 73791172 | 73850892 |
| A7 | ENSESTT00000036097 | | 7 | 73868813 | 73883752 |
| A7 | ENST00000329959 | WBSCR16 | 7 | 73869229 | 73901788 |
| A7 | ENSESTT00000036098 | | 7 | 73882190 | 73901764 |
| A7 | ENSESTT00000036099 | | 7 | 73889107 | 73901764 |
| A7 | ENSESTT00000036100 | | 7 | 73892480 | 73901764 |
| A7 | ENST00000334260 | Q86WX4 | 7 | 73920467 | 73954376 |
| A7 | ENSESTT00000036093 | | 7 | 73920470 | 73940594 |
| A7 | ENST00000312575 | NM_032203 | 7 | 73962893 | 73977192 |
| A7 | ENSESTT00000036094 | | 7 | 73966809 | 73969279 |
| A7 | ENST00000297905 | | 7 | 73984689 | 73999836 |
| A7 | ENSESTT00000036095 | | 7 | 73990260 | 73999885 |
| A7 | ENSESTT00000036096 | | 7 | 73990542 | 73999843 |
| A7 | ENSESTT00000037870 | | 7 | 74013902 | 74027990 |
| A7 | ENSESTT00000037865 | | 7 | 74013902 | 74029114 |
| A7 | ENSESTT00000037876 | | 7 | 74013902 | 74030393 |
| A7 | ENSESTT00000037871 | | 7 | 74013903 | 74027990 |
| A7 | ENSESTT00000037866 | | 7 | 74013903 | 74029114 |
| A7 | ENSESTT00000037877 | | 7 | 74013903 | 74030393 |
| A7 | ENSESTT00000037872 | | 7 | 74013951 | 74027990 |
| A7 | ENSESTT00000037867 | | 7 | 74013951 | 74029114 |
| A7 | ENSESTT00000037878 | | 7 | 74013951 | 74030393 |
| A7 | ENSESTT00000037873 | | 7 | 74014662 | 74027990 |
| A7 | ENSESTT00000037868 | | 7 | 74014662 | 74029114 |
| A7 | ENSESTT00000037879 | | 7 | 74014662 | 74030393 |
| A7 | ENSESTT00000037875 | | 7 | 74018346 | 74025862 |
| A7 | ENSESTT00000037874 | | 7 | 74018346 | 74027990 |
| A7 | ENSESTT00000037869 | | 7 | 74018346 | 74029114 |
| A7 | ENSESTT00000037880 | | 7 | 74018346 | 74030393 |
| A7 | ENSESTT00000037864 | | 7 | 74033799 | 74065179 |
| A7 | ENST00000335657 | Q86WY7 | 7 | 74111817 | 74114021 |
| A7 | ENSESTT00000037828 | | 7 | 74114121 | 74528229 |
| A7 | ENSESTT00000037860 | | 7 | 74114936 | 74600365 |
| A7 | ENST00000329909 | PMS2L5 | 7 | 74115017 | 74124654 |
| A7 | ENST00000311576 | | 7 | 74115017 | 74126741 |
| A7 | ENSESTT00000037831 | | 7 | 74378046 | 74402224 |
| A7 | ENSESTT00000037829 | | 7 | 74386841 | 74402224 |
| A7 | ENSESTT00000037830 | | 7 | 74400341 | 74402224 |
| A7 | ENSESTT00000037832 | | 7 | 74412873 | 74413761 |
| A7 | ENSESTT00000037833 | | 7 | 74415176 | 74417728 |
| A7 | ENST00000317042 | Q9P1E6 | 7 | 74415789 | 74416214 |
| A7 | OTTHUMT00007006787 | mbhmh_h_72800966_73394042_m_132005738_13 | 7 | 74418388 | 74470222 |
| A7 | ENST00000311251 | | 7 | 74419694 | 74479430 |
| A7 | OTTHUMT00007007356 | Hs_7_c1145 | 7 | 74523575 | 74584324 |
| A7 | ENST00000333996 | Q86WY7 | 7 | 74524542 | 74556308 |
| A7 | ENST00000335396 | Q86WY7 | 7 | 74526082 | 74528285 |
| A7 | ENST00000302439 | PMS2L6 | 7 | 74526852 | 74541042 |
| A7 | ENSESTT00000037834 | | 7 | 74528385 | 74556252 |
| A7 | ENSESTT00000037862 | | 7 | 74529200 | 74566962 |
| A7 | ENST00000311139 | PMS2L5 | 7 | 74529281 | 74538934 |
| A7 | ENST00000314850 | | 7 | 74529281 | 74541015 |
| A7 | OTTHUMT00007008169 | Hs_7_c5090 | 7 | 74529284 | 74600754 |
| A7 | ENSESTT00000037861 | | 7 | 74538952 | 74567012 |
| A7 | ENST00000251624 | PMS2L6 | 7 | 74554875 | 74569067 |
| A7 | ENSESTT00000037835 | | 7 | 74556408 | 74584271 |
| A7 | ENST00000305928 | | 7 | 74557304 | 74569040 |
| A7 | ENST00000335010 | Q86WY7 | 7 | 74582125 | 74584327 |
| A7 | ENSESTT00000037836 | | 7 | 74584427 | 74743294 |
| A7 | ENSESTT00000037863 | | 7 | 74585242 | 74594942 |
| A7 | ENST00000310939 | | 7 | 74585323 | 74600345 |
| A7 | ENSESTT00000037837 | | 7 | 74600539 | 74603386 |
| A7 | ENSESTT00000037838 | | 7 | 74600635 | 74607984 |
| A7 | OTTHUMT00007008170 | Hs_7_c5091 | 7 | 74605989 | 74608444 |
| A7 | ENST00000325462 | NM_018991 | 7 | 74606045 | 74609003 |
| A7 | OTTHUMT00007007218 | DKFZP434A0131.2 | 7 | 74606957 | 74631908 |
| A7 | ENSESTT00000037840 | | 7 | 74607712 | 74637304 |
| A7 | ENSESTT00000037839 | | 7 | 74607712 | 74640405 |
| A7 | ENSESTT00000037841 | | 7 | 74611418 | 74612259 |
| A7 | ENST00000275590 | Q8WW08 | 7 | 74633749 | 74636644 |
| A7 | ENSESTT00000037859 | | 7 | 74634716 | 74636774 |
| A7 | OTTHUMT00007006277 | mbhmh_h_73557902_74457901_m_133948896_13 | 7 | 74634728 | 74636644 |
| A7 | ENST00000323819 | Q86UV7 | 7 | 74636992 | 74646977 |
| A7 | OTTHUMT00007006661 | mfhmh_h_73557902_74457901_m_133948896_13 | 7 | 74640307 | 74649026 |
| A7 | ENSESTT00000037842 | | 7 | 74640495 | 74645112 |
| A7 | ENSESTT00000037843 | | 7 | 74651721 | 74653100 |
| A7 | OTTHUMT00007007377 | Hs_7_c1152 | 7 | 74651740 | 74657781 |
| A7 | ENSESTT00000037844 | | 7 | 74651742 | 74656591 |
| A7 | ENSESTT00000037845 | | 7 | 74652026 | 74657514 |
| A7 | ENST00000323788 | NM_145645 | 7 | 74654800 | 74657968 |
| A7 | ENSESTT00000037846 | | 7 | 74655026 | 74657893 |
| A7 | ENSESTT00000037847 | | 7 | 74656958 | 74658035 |
| A7 | ENSESTT00000037848 | | 7 | 74657213 | 74657787 |
| A7 | ENST00000257665 | POM121 | 7 | 74658837 | 74684082 |
| A7 | ENSESTT00000037858 | | 7 | 74659912 | 74663188 |
| A7 | OTTHUMT00007006280 | mbhmh_h_73557902_74457901_m_133948896_13 | 7 | 74660168 | 74684082 |
| A7 | ENSESTT00000037857 | | 7 | 74664350 | 74666568 |
| A7 | ENSESTT00000037856 | | 7 | 74666904 | 74679035 |
| A7 | ENSESTT00000037855 | | 7 | 74682449 | 74716115 |
| A7 | ENSESTT00000037854 | | 7 | 74716469 | 74769374 |
| A7 | ENST00000301990 | | 7 | 74736524 | 74745533 |
| A7 | OTTHUMT00007007168 | mbhmh_ts.74.012.a | 7 | 74738139 | 74744350 |
| A7 | OTTHUMT00007007383 | Hs_7_c1157 | 7 | 74744346 | 74752527 |
| A7 | ENST00000248606 | PMS2L3 | 7 | 74749246 | 74756200 |
| A7 | ENST00000301956 | PMS2L9 | 7 | 74752342 | 74769228 |
| A7 | OTTHUMT00007007380 | Hs_7_c1154 | 7 | 74753806 | 74769228 |
| A7 | ENSESTT00000037853 | | 7 | 74757541 | 74769401 |
| A7 | OTTHUMT00007006447 | HIP1 | 7 | 74775947 | 74840649 |
| A7 | ENSESTT00000037852 | | 7 | 74779537 | 74786565 |
| A7 | ENST00000320938 | HIP1 | 7 | 74779582 | 74980306 |
| A7 | ENSESTT00000037851 | | 7 | 74788329 | 74797481 |
| A7 | ENSESTT00000037850 | | 7 | 74799047 | 74804723 |
| A7 | ENSESTT00000037849 | | 7 | 74895820 | 74980379 |
| A7 | OTTHUMT00007007406 | Hs_7_c1160 | 7 | 74980208 | 74980327 |
| A7 | ENST00000005180 | CCL26 | 7 | 75010931 | 75013663 |
| A7 | ENSESTT00000040258 | | 7 | 75011028 | 75031153 |
| A7 | OTTHUMT00007006539 | SCYA26 | 7 | 75011100 | 75013583 |
| A7 | ENST00000222902 | CCL24 | 7 | 75053203 | 75055122 |
| A7 | OTTHUMT00007006535 | SCYA24 | 7 | 75053203 | 75055122 |
| A7 | OTTHUMT00007007412 | Hs_7_c1163 | 7 | 75077073 | 75077548 |
| A7 | ENST00000006777 | NM_020684 | 7 | 75120355 | 75130328 |
| A7 | OTTHUMT00007007126 | NPD007 | 7 | 75120355 | 75134177 |
| A7 | ENSESTT00000040185 | | 7 | 75120424 | 75130279 |
| A7 | ENSESTT00000040186 | | 7 | 75120432 | 75130279 |
| A7 | ENSESTT00000040257 | | 7 | 75120464 | 75130107 |
| A7 | ENST00000318622 | Q9UDT1 | 7 | 75120490 | 75122833 |
| A7 | ENSESTT00000040187 | | 7 | 75120579 | 75129992 |
| A7 | ENSESTT00000040195 | | 7 | 75156536 | 75222052 |
| A7 | ENSESTT00000040194 | | 7 | 75156536 | 75225046 |
| A7 | ENSESTT00000040192 | | 7 | 75156536 | 75225268 |
| A7 | ENSESTT00000040193 | | 7 | 75156536 | 75225268 |
| A7 | ENSESTT00000040188 | | 7 | 75156536 | 75226369 |
| A7 | ENSESTT00000040189 | | 7 | 75156536 | 75226369 |
| A7 | ENSESTT00000040190 | | 7 | 75156536 | 75226369 |
| A7 | ENSESTT00000040191 | | 7 | 75156536 | 75226369 |
| A7 | ENSESTT00000040202 | | 7 | 75156536 | 75226773 |
| A7 | ENSESTT00000040203 | | 7 | 75156536 | 75226773 |
| A7 | OTTHUMT00007007414 | Hs_7_c1165 | 7 | 75164520 | 75164746 |
| A7 | OTTHUMT00007006487 | mbhmh_h_73557902_74457901_m_133948896_13 | 7 | 75176809 | 75227888 |
| A7 | ENSESTT00000040200 | | 7 | 75195386 | 75225046 |
| A7 | ENSESTT00000040199 | | 7 | 75195386 | 75225268 |
| A7 | ENSESTT00000040197 | | 7 | 75195386 | 75226369 |
| A7 | ENSESTT00000040198 | | 7 | 75195386 | 75226369 |
| A7 | ENSESTT00000040196 | | 7 | 75195386 | 75226773 |
| A7 | ENST00000265302 | POR | 7 | 75195400 | 75227888 |
| A7 | ENSESTT00000040201 | | 7 | 75223628 | 75226773 |
| A7 | OTTHUMT00007007077 | TMPIT | 7 | 75228396 | 75236042 |
| A7 | ENSESTT00000040252 | | 7 | 75229120 | 75236046 |
| A7 | ENSESTT00000040253 | | 7 | 75229129 | 75236046 |
| A7 | ENSESTT00000040254 | | 7 | 75229182 | 75236046 |
| A7 | ENSESTT00000040255 | | 7 | 75229333 | 75236046 |
| A7 | ENSESTT00000040256 | | 7 | 75229371 | 75236046 |
| A7 | ENSESTT00000040248 | | 7 | 75237744 | 75255296 |
| A7 | ENSESTT00000040244 | | 7 | 75237744 | 75289349 |
| A7 | ENSESTT00000040245 | | 7 | 75237744 | 75289349 |
| A7 | ENSESTT00000040238 | | 7 | 75237744 | 75289395 |
| A7 | ENSESTT00000040239 | | 7 | 75237744 | 75289395 |
| A7 | ENSESTT00000040240 | | 7 | 75237744 | 75289395 |
| A7 | ENSESTT00000040236 | | 7 | 75237744 | 75295682 |
| A7 | ENSESTT00000040251 | | 7 | 75237749 | 75242410 |
| A7 | ENSESTT00000040250 | | 7 | 75237749 | 75246817 |
| A7 | ENSESTT00000040249 | | 7 | 75237749 | 75255296 |
| A7 | ENSESTT00000040247 | | 7 | 75237749 | 75263402 |
| A7 | ENSESTT00000040246 | | 7 | 75237749 | 75289349 |
| A7 | ENSESTT00000040241 | | 7 | 75237749 | 75289395 |
| A7 | ENSESTT00000040242 | | 7 | 75237749 | 75289395 |
| A7 | OTTHUMT00007006727 | MK-STYX | 7 | 75237749 | 75289410 |
| A7 | ENSESTT00000040237 | | 7 | 75237749 | 75295682 |
| A7 | ENST00000248600 | MSTY_HUMAN | 7 | 75237875 | 75271930 |
| A7 | ENSESTT00000040243 | | 7 | 75255146 | 75289370 |
| A7 | ENST00000315790 | | 7 | 75288063 | 75288355 |
| A7 | ENSESTT00000040204 | | 7 | 75289457 | 75308009 |
| A7 | ENST00000315758 | MDH2 | 7 | 75289482 | 75308017 |
| A7 | OTTHUMT00007007151 | MDH2 | 7 | 75289482 | 75308020 |
| A7 | ENSESTT00000040205 | | 7 | 75289536 | 75308009 |
| A7 | ENSESTT00000040206 | | 7 | 75305745 | 75308009 |
| A7 | OTTHUMT00007007750 | Hs_7_c3073 | 7 | 75312957 | 75313204 |
| A7 | OTTHUMT00007007439 | Hs_7_c1171 | 7 | 75315857 | 75316216 |
| A7 | OTTHUMT00007008045 | Hs_7_c5123 | 7 | 75340845 | 75342813 |
| A7 | OTTHUMT00007007443 | Hs_7_c1174 | 7 | 75349841 | 75373549 |
| A7 | ENST00000332057 | | 7 | 75354317 | 75354842 |
| A7 | OTTHUMT00007007445 | Hs_7_c1175 | 7 | 75354317 | 75354842 |
| A7 | OTTHUMT00007007446 | Hs_7_c1176 | 7 | 75390863 | 75390964 |
| A7 | OTTHUMT00007007447 | Hs_7_c1177 | 7 | 75415144 | 75418535 |
| A7 | ENSESTT00000040208 | | 7 | 75443300 | 75501454 |
| A7 | ENSESTT00000040207 | | 7 | 75443300 | 75506790 |
| A7 | ENSESTT00000040209 | | 7 | 75443307 | 75506790 |
| A7 | ENSESTT00000040210 | | 7 | 75476389 | 75501454 |
| A7 | ENST00000326382 | | 7 | 75476473 | 75522894 |
| A7 | OTTHUMT00007006504 | mbhmh_h_73557902_74457901_m_133948896_13 | 7 | 75476474 | 75527249 |
| A7 | ENSESTT00000040211 | | 7 | 75514460 | 75522893 |
| A7 | ENSESTT00000040212 | | 7 | 75523140 | 75527181 |
| A7 | ENST00000326284 | NM_153043 | 7 | 75524053 | 75528692 |
| A7 | ENSESTT00000040213 | | 7 | 75543994 | 75545679 |
| A7 | OTTHUMT00007006552 | HSPB1 | 7 | 75544012 | 75545701 |
| A7 | ENST00000248553 | HSPB1 | 7 | 75544012 | 75545702 |
| A7 | OTTHUMT00007006186 | YWHAG | 7 | 75568205 | 75600405 |
| A7 | ENST00000307630 | YWHAG | 7 | 75570983 | 75600214 |
| A7 | ENSESTT00000040235 | | 7 | 75570997 | 75600397 |
| A7 | ENST00000325070 | | 7 | 75602536 | 75603507 |
| A7 | ENST00000275560 | SRCRB4D | 7 | 75630735 | 75651095 |
| A7 | OTTHUMT00007006188 | SRCRB4D | 7 | 75630735 | 75651101 |
| A7 | ENSESTT00000040234 | | 7 | 75631056 | 75638966 |
| A7 | ENST00000297799 | Q96BF5 | 7 | 75631465 | 75635032 |
| A7 | OTTHUMT00007006555 | ZP3A | 7 | 75666341 | 75683471 |
| A7 | ENST00000257652 | ZP3 | 7 | 75666371 | 75683468 |
| A7 | ENSESTT00000040214 | | 7 | 75670977 | 75683476 |
| A7 | ENSESTT00000040215 | | 7 | 75674328 | 75683368 |
| A7 | ENSESTT00000040216 | | 7 | 75703078 | 75724019 |
| A7 | ENSESTT00000040217 | | 7 | 75703114 | 75724170 |
| A7 | ENSESTT00000040218 | | 7 | 75703116 | 75722103 |
| A7 | ENSESTT00000040219 | | 7 | 75703123 | 75724122 |
| A7 | ENSESTT00000040220 | | 7 | 75703136 | 75724190 |
| A7 | OTTHUMT00007006196 | DTX2 | 7 | 75703141 | 75747397 |
| A7 | ENST00000324432 | DTX2 | 7 | 75703143 | 75747007 |
| A7 | ENSESTT00000040221 | | 7 | 75703158 | 75721985 |
| A7 | OTTHUMT00007007472 | Hs_7_c1183 | 7 | 75711502 | 75712557 |
| A7 | ENST00000329896 | | 7 | 75711568 | 75712530 |
| A7 | ENSESTT00000040222 | | 7 | 75743571 | 75747401 |
| A7 | ENSESTT00000040223 | | 7 | 75751969 | 75756864 |
| A7 | ENSESTT00000040224 | | 7 | 75751972 | 75755467 |
| A7 | ENSESTT00000040225 | | 7 | 75752017 | 75756483 |
| A7 | ENST00000334348 | UPK3B | 7 | 75752059 | 75756610 |
| A7 | ENST00000257632 | UPK3B | 7 | 75752059 | 75756657 |
| A7 | ENSESTT00000040226 | | 7 | 75752161 | 75755394 |
| A7 | ENSESTT00000040227 | | 7 | 75752941 | 75756621 |
| A7 | ENST00000333674 | | 7 | 75763339 | 75774103 |
| A7 | OTTHUMT00007007476 | Hs_7_c1187 | 7 | 75765921 | 75774100 |
| A7 | ENST00000332397 | | 7 | 75772915 | 75781708 |
| A7 | OTTHUMT00007007156 | mbhmh_H_DJ1158B01_F218045.fgenesh2.2 | 7 | 75774096 | 75782865 |
| A7 | ENSESTT00000040233 | | 7 | 75775379 | 75781751 |
| A7 | ENST00000328339 | | 7 | 75777575 | 75780226 |
| A7 | OTTHUMT00007007474 | Hs_7_c1186 | 7 | 75791024 | 75792928 |
| A7 | ENSESTT00000040229 | | 7 | 75851392 | 75867091 |
| A7 | ENSESTT00000040228 | | 7 | 75851392 | 75867499 |
| A7 | ENSESTT00000040232 | | 7 | 75851392 | 75867499 |
| A7 | OTTHUMT00007006838 | POMZP3 | 7 | 75851394 | 75868655 |
| A7 | ENST00000310842 | POMZP3 | 7 | 75851570 | 75868652 |
| A7 | ENSESTT00000040230 | | 7 | 75852858 | 75867011 |
| A7 | ENSESTT00000040231 | | 7 | 75859587 | 75868162 |
| A7 | OTTHUMT00007007515 | Hs_7_c1194 | 7 | 75891805 | 75892303 |
| A7 | OTTHUMT00007007518 | Hs_7_c1196 | 7 | 76201256 | 76245716 |
| A7 | OTTHUMT00007007520 | Hs_7_c1197 | 7 | 76209601 | 76210656 |
| A7 | ENST00000331556 | | 7 | 76209667 | 76210629 |
| A7 | ENSESTT00000037296 | | 7 | 76214085 | 76218367 |
| A7 | ENST00000307569 | | 7 | 76220023 | 76231777 |
| A7 | ENST00000162863 | PMS2L11 | 7 | 76243584 | 76257202 |
| A7 | ENSESTT00000037258 | | 7 | 76243673 | 76245780 |
| A7 | ENSESTT00000037261 | | 7 | 76255577 | 76265170 |
| A7 | ENSESTT00000037259 | | 7 | 76257204 | 76440006 |
| A7 | OTTHUMT00007007328 | Hs_7_c1202 | 7 | 76260312 | 76295598 |
| A7 | ENST00000285792 | Q86WY7 | 7 | 76263908 | 76269847 |
| A7 | ENSESTT00000037292 | | 7 | 76264978 | 76266386 |
| A7 | OTTHUMT00007006602 | mfhmh_gw11359887.75188365.75365376.7.9e− | 7 | 76266095 | 76300760 |
| A7 | ENSESTT00000037291 | | 7 | 76266148 | 76294084 |
| A7 | ENSESTT00000037295 | | 7 | 76269559 | 76270744 |
| A7 | ENSESTT00000037294 | | 7 | 76271927 | 76273767 |
| A7 | ENSESTT00000037293 | | 7 | 76279424 | 76281262 |
| A7 | ENSESTT00000037290 | | 7 | 76294463 | 76300803 |
| A7 | ENST00000330572 | | 7 | 76297956 | 76299277 |
| A7 | OTTHUMT00007007330 | Hs_7_c1203 | 7 | 76313155 | 76313732 |
| A7 | ENSESTT00000037289 | | 7 | 76325407 | 76363754 |
| A7 | OTTHUMT00007006666 | mbhmh_h_75248517_76148516_m_19731738_198 | 7 | 76330887 | 76352916 |
| A7 | ENSESTT00000037288 | | 7 | 76351350 | 76363761 |
| A7 | ENST00000327285 | | 7 | 76356805 | 76357619 |
| A7 | OTTHUMT00007007332 | Hs_7_c1204 | 7 | 76356814 | 76357592 |
| A7 | ENSESTT00000037260 | | 7 | 76364104 | 76409308 |
| A7 | OTTHUMT00007006412 | mbax_nh_gi17389564 | 7 | 76437484 | 76441197 |
| A7 | ENST00000248598 | FGL2 | 7 | 76437495 | 76441207 |
| A7 | ENSESTT00000037287 | | 7 | 76437634 | 76441213 |
| A7 | OTTHUMT00007006667 | mbhmh_h_75248517_76148516_m_19731738_198 | 7 | 76466089 | 76536234 |
| A7 | ENST00000285871 | Q96MS1 | 7 | 76478324 | 76520191 |
| A7 | ENST00000257657 | Q9P223 | 7 | 76501336 | 76536578 |
| A7 | ENSESTT00000037262 | | 7 | 76501508 | 76523986 |
| A7 | ENSESTT00000037264 | | 7 | 76523852 | 76536589 |
| A7 | ENSESTT00000037263 | | 7 | 76523852 | 76571386 |
| A7 | ENSESTT00000037284 | | 7 | 76552119 | 76571745 |
| A7 | ENST00000257626 | Q9Y4L9 | 7 | 76552120 | 76568852 |
| A7 | OTTHUMT00007007104 | mbhmh_nh_h_75248517_76148516_m_18931739_{—} | 7 | 76552726 | 76605693 |
| A7 | ENSESTT00000037285 | | 7 | 76552993 | 76571745 |
| A7 | ENSESTT00000037286 | | 7 | 76562091 | 76567945 |
| A7 | ENST00000334003 | Q8ND73 | 7 | 76571601 | 76647477 |
| A7 | ENSESTT00000037283 | | 7 | 76571643 | 76596756 |
| A7 | OTTHUMT00007007105 | mbhmh_nh_h_75248517_76148516_m_18931739_{—} | 7 | 76611431 | 76653274 |
| A7 | ENSESTT00000037282 | | 7 | 76638369 | 76657235 |
| A7 | ENST00000310324 | Q9BXE6 | 7 | 76751393 | 76751767 |
| A7 | ENSESTT00000037265 | | 7 | 76778862 | 76839272 |
| A7 | OTTHUMT00007006825 | PTPN12 | 7 | 76778886 | 76881437 |
| A7 | ENSESTT00000037266 | | 7 | 76778907 | 76842330 |
| A7 | ENST00000248594 | PTPN12 | 7 | 76778915 | 76880648 |
| A7 | ENSESTT00000037267 | | 7 | 76805409 | 76842330 |
| A7 | ENSESTT00000037269 | | 7 | 76848601 | 76881437 |
| A7 | ENSESTT00000037270 | | 7 | 76848601 | 76881437 |
| A7 | ENSESTT00000037271 | | 7 | 76848601 | 76881437 |
| A7 | ENSESTT00000037268 | | 7 | 76848601 | 76895005 |
| A7 | ENSESTT00000037272 | | 7 | 76873632 | 76881437 |
| A7 | ENSESTT00000037281 | | 7 | 76875004 | 76889253 |
| A7 | ENSESTT00000037273 | | 7 | 76878133 | 76881437 |
| A7 | ENSESTT00000037274 | | 7 | 76878340 | 76880309 |
| A7 | ENSESTT00000037278 | | 7 | 76900557 | 76937634 |
| A7 | ENSESTT00000037275 | | 7 | 76910887 | 76912750 |
| A7 | ENSESTT00000037279 | | 7 | 76925217 | 76937634 |
| A7 | ENSESTT00000037280 | | 7 | 76925311 | 76937620 |
| A7 | ENST00000334955 | Q86X48 | 7 | 76937838 | 76977836 |
| A7 | OTTHUMT00007006307 | mbhmh_h_75248517_76148516_m_18931739_198 | 7 | 76937838 | 77020536 |
| A7 | ENSESTT00000037277 | | 7 | 76977776 | 76991120 |
| A7 | ENSESTT00000037276 | | 7 | 76990885 | 77010048 |
| A7 | ENSESTT00000031431 | | 7 | 77010043 | 77021059 |
| A7 | OTTHUMT00007006265 | DC32 | 7 | 77035083 | 77039701 |
| A7 | ENST00000257663 | C7orf35 | 7 | 77035084 | 77039798 |
| A7 | ENSESTT00000031444 | | 7 | 77035096 | 77039946 |
| A7 | ENSESTT00000031445 | | 7 | 77035258 | 77039797 |
| A7 | OTTHUMT00007006310 | mbhmh_h_75248517_76148516_m_18931739_198 | 7 | 77081624 | 77196246 |
| A7 | ENST00000248550 | Q8TBW4 | 7 | 77096101 | 77195265 |
| A8 | ENST00000256653 | MAN1A2 | 1 | 117256452 | 117415542 |
| A8 | ENSESTT00000003501 | | 1 | 117256479 | 117412324 |
| A8 | ENSESTT00000003500 | | 1 | 117256479 | 117414355 |
| A8 | ENSESTT00000003502 | | 1 | 117331232 | 117385841 |
| A8 | ENSESTT00000003523 | | 1 | 117485833 | 117494713 |
| A8 | ENSESTT00000003503 | | 1 | 117494976 | 117512577 |
| A8 | ENST00000328500 | NM_017709 | 1 | 117495052 | 117517367 |
| A8 | ENST00000313132 | | 1 | 117529727 | 117530632 |
| A8 | ENST00000334351 | PNRC2 | 1 | 117667090 | 117667509 |
| A8 | ENSESTT00000003522 | | 1 | 117667118 | 117667900 |
| A8 | ENSESTT00000003520 | | 1 | 117759186 | 117818631 |
| A8 | ENSESTT00000003521 | | 1 | 117759281 | 117818631 |
| A8 | ENST00000263166 | GDAP2 | 1 | 117759572 | 117818591 |
| A8 | ENSESTT00000003504 | | 1 | 117818779 | 117823687 |
| A8 | ENST00000309112 | Q9H141 | 1 | 117822324 | 117848451 |
| A8 | ENST00000183319 | WDR3 | 1 | 117822324 | 117849059 |
| A8 | ENSESTT00000003505 | | 1 | 117831482 | 117849104 |
| A8 | ENSESTT00000003518 | | 1 | 117842855 | 117853814 |
| A8 | ENSESTT00000003515 | | 1 | 117842859 | 117859122 |
| A8 | ENSESTT00000003519 | | 1 | 117842865 | 117852907 |
| A8 | ENSESTT00000003517 | | 1 | 117842865 | 117855703 |
| A8 | ENST00000286203 | Q8NAZ1 | 1 | 117842866 | 118074161 |
| A8 | ENSESTT00000003516 | | 1 | 117842868 | 117855764 |
| A8 | ENSESTT00000003513 | | 1 | 117861020 | 117880531 |
| A8 | ENSESTT00000003514 | | 1 | 117862486 | 117876996 |
| A8 | ENSESTT00000003512 | | 1 | 117885713 | 117905184 |
| A8 | ENSESTT00000003510 | | 1 | 117917336 | 117943048 |
| A8 | ENSESTT00000003511 | | 1 | 117920750 | 117928350 |
| A8 | ENSESTT00000003509 | | 1 | 117943055 | 117962920 |
| A8 | ENSESTT00000003507 | | 1 | 117943058 | 117970490 |
| A8 | ENSESTT00000003508 | | 1 | 117962945 | 117970300 |
| A8 | ENSESTT00000003506 | | 1 | 117974982 | 117976166 |
| A8 | ENSESTT00000003436 | | 1 | 118039391 | 118074185 |
| A8 | ENST00000334368 | Q9UN81 | 1 | 118742261 | 118743277 |
| A8 | ENST00000207157 | TBX15 | 1 | 118772051 | 118820834 |
| A8 | ENSESTT00000003435 | | 1 | 118889344 | 118890396 |
| A8 | ENSESTT00000003434 | | 1 | 118889622 | 118890409 |
| A8 | ENST00000235521 | WARS2 | 1 | 118920227 | 119029659 |
| A8 | ENSESTT00000003433 | | 1 | 118921825 | 118934670 |
| A8 | ENSESTT00000003432 | | 1 | 118922024 | 119029623 |
| A8 | ENST00000333224 | | 1 | 119015816 | 119016295 |
| A8 | ENSESTT00000003526 | | 1 | 119035413 | 119036037 |
| A8 | ENST00000330630 | | 1 | 119108318 | 119108923 |
| A8 | ENSESTT00000003527 | | 1 | 119217196 | 119219818 |
| A8 | ENSESTT00000003528 | | 1 | 119217256 | 119245186 |
| A8 | ENSESTT00000003529 | | 1 | 119257783 | 119275698 |
| A8 | ENSESTT00000003531 | | 1 | 119257783 | 119281249 |
| A8 | ENSESTT00000003530 | | 1 | 119269568 | 119281249 |
| A8 | ENST00000325945 | HAO2 | 1 | 119270090 | 119282844 |
| A8 | ENST00000331050 | Q8TDP9 | 1 | 119304149 | 119403649 |
| A8 | ENSESTT00000003533 | | 1 | 119304154 | 119311277 |
| A8 | ENSESTT00000003532 | | 1 | 119304154 | 119311779 |
| A8 | ENSESTT00000003534 | | 1 | 119304167 | 119308609 |
| A8 | ENST00000303184 | HSD3B2 | 1 | 119304424 | 119311624 |
| A8 | ENST00000333709 | Q8TDP9 | 1 | 119304427 | 119403649 |
| A8 | ENST00000332017 | Q8TDP9 | 1 | 119304427 | 119404056 |
| A8 | ENST00000256586 | Q9H1N0 | 1 | 119328005 | 119334823 |
| A8 | ENST00000286193 | Q9H1M9 | 1 | 119356225 | 119362218 |
| A8 | ENST00000331024 | | 1 | 119385611 | 119385839 |
| A8 | ENSESTT00000003535 | | 1 | 119396243 | 119404058 |
| A8 | ENSESTT00000003536 | | 1 | 119396244 | 119397374 |
| A8 | ENSESTT00000003537 | | 1 | 119396322 | 119404058 |
| A8 | ENST00000235547 | HSD3B1 | 1 | 119396481 | 119403649 |
| A8 | ENST00000335580 | Q9UDK8 | 1 | 119456897 | 119461071 |
| A8 | ENST00000331009 | | 1 | 119485270 | 119485838 |
| A8 | ENST00000335229 | Q9UD07 | 1 | 119494238 | 119494381 |
| A8 | ENST00000271263 | Q96IT2 | 1 | 119511709 | 119512401 |
| A8 | ENSESTT00000003538 | | 1 | 119600896 | 119633222 |
| A8 | ENSESTT00000003539 | | 1 | 119600896 | 119633222 |
| A8 | ENST00000263167 | PHGDH | 1 | 119601027 | 119633206 |
| A8 | ENSESTT00000003540 | | 1 | 119615847 | 119633222 |
| A8 | ENSESTT00000003541 | | 1 | 119615847 | 119633222 |
| A8 | ENSESTT00000003542 | | 1 | 119616052 | 119619075 |
| A8 | ENSESTT00000003543 | | 1 | 119626114 | 119633222 |
| A8 | ENST00000256633 | HMGCS2 | 1 | 119637386 | 119657898 |
| A8 | ENSESTT00000003552 | | 1 | 119637543 | 119657890 |
| A8 | ENSESTT00000003553 | | 1 | 119648894 | 119657887 |
| A8 | ENSESTT00000003544 | | 1 | 119653323 | 119657877 |
| A8 | ENST00000324032 | Q8NER6 | 1 | 119683168 | 119700499 |
| A8 | ENSESTT00000003551 | | 1 | 119683421 | 119700465 |
| A8 | ENSESTT00000003550 | | 1 | 119683593 | 119692170 |
| A8 | ENST00000256585 | REG4 | 1 | 119683622 | 119697773 |
| A8 | ENSESTT00000003549 | | 1 | 119687553 | 119697870 |
| A9 | OTTHUMT00006006260 | SLC26A8-001 | 6 | 35958152 | 36039212 |
| A9 | ENST00000229784 | SLC26A8 | 6 | 35958327 | 36034339 |
| A9 | ENST00000310888 | SLC26A8 | 6 | 35958532 | 36034339 |
| A9 | ENSESTT00000033005 | | 6 | 36012429 | 36039125 |
| A9 | ENSESTT00000032935 | | 6 | 36042425 | 36067456 |
| A9 | OTTHUMT00006006277 | MAPK14-002 | 6 | 36042428 | 36123079 |
| A9 | OTTHUMT00006006276 | MAPK14-001 | 6 | 36042428 | 36125390 |
| A9 | ENST00000229794 | NM_139014 | 6 | 36042790 | 36122248 |
| A9 | ENST00000229795 | MAPK14 | 6 | 36042790 | 36123079 |
| A9 | ENST00000310795 | MAPK14 | 6 | 36042790 | 36123079 |
| A9 | ENSESTT00000032936 | | 6 | 36090530 | 36124509 |
| A9 | OTTHUMT00006006258 | dJ179N16.3-001 | 6 | 36106623 | 36107278 |
| A9 | OTTHUMT00006006270 | MAPK13-005 | 6 | 36142441 | 36150464 |
| A9 | ENSESTT00000032938 | | 6 | 36142441 | 36154698 |
| A9 | ENSESTT00000032937 | | 6 | 36142441 | 36155902 |
| A9 | OTTHUMT00006006268 | MAPK13-003 | 6 | 36144953 | 36154312 |
| A9 | OTTHUMT00006006266 | MAPK13-001 | 6 | 36144953 | 36154697 |
| A9 | ENST00000211287 | MAPK13 | 6 | 36145117 | 36154697 |
| A9 | ENSESTT00000032940 | | 6 | 36145142 | 36154698 |
| A9 | ENSESTT00000032939 | | 6 | 36145142 | 36155902 |
| A9 | ENSESTT00000032941 | | 6 | 36145145 | 36151536 |
| A9 | ENSESTT00000032943 | | 6 | 36145202 | 36154698 |
| A9 | ENSESTT00000032942 | | 6 | 36145202 | 36155902 |
| A9 | ENSESTT00000032944 | | 6 | 36145273 | 36146034 |
| A9 | OTTHUMT00006006269 | MAPK13-004 | 6 | 36145295 | 36153839 |
| A9 | OTTHUMT00006006267 | MAPK13-002 | 6 | 36145501 | 36151147 |
| A9 | OTTHUMT00006006280 | BRPF3-001 | 6 | 36211405 | 36247418 |
| A9 | ENST00000322766 | BRPF3 | 6 | 36211405 | 36247421 |
| A9 | ENSESTT00000032945 | | 6 | 36212028 | 36215240 |
| A9 | ENSESTT00000032946 | | 6 | 36215902 | 36224498 |
| A9 | OTTHUMT00006006281 | BRPF3-002 | 6 | 36225130 | 36247418 |
| A9 | ENST00000211291 | Q9NWM1 | 6 | 36225982 | 36245352 |
| A9 | ENSESTT00000032947 | | 6 | 36228665 | 36232584 |
| A9 | ENSESTT00000032948 | | 6 | 36239919 | 36246148 |
| A9 | OTTHUMT00006006284 | dJ50J22.1-001 | 6 | 36285116 | 36310051 |
| A9 | ENST00000312917 | PNPLA1 | 6 | 36306032 | 36323227 |
| A9 | OTTHUMT00006006294 | dJ50J22.5-001 | 6 | 36317034 | 36327443 |
| A9 | OTTHUMT00006006290 | dJ50J22.3-001 | 6 | 36331805 | 36334066 |
| A9 | OTTHUMT00006006286 | dJ50J22.2-001 | 6 | 36380826 | 36402415 |
| A9 | OTTHUMT00006006287 | dJ50J22.2-002 | 6 | 36380826 | 36402415 |
| A9 | ENST00000229480 | ETV7 | 6 | 36380827 | 36402349 |
| A9 | ENSESTT00000033001 | | 6 | 36390551 | 36402400 |
| A9 | OTTHUMT00006006292 | dJ50J22.4-001 | 6 | 36401463 | 36406626 |
| A9 | ENST00000316266 | NM_152990 | 6 | 36405183 | 36415166 |
| A9 | OTTHUMT00006006296 | dJ347L7.1-001 | 6 | 36415095 | 36457521 |
| A9 | ENSESTT00000032949 | | 6 | 36457399 | 36458352 |
| A9 | ENST00000265344 | C6orf69 | 6 | 36457399 | 36505168 |
| A9 | OTTHUMT00006006298 | dJ108K11.3-001 | 6 | 36457619 | 36505775 |
| A9 | ENSESTT00000032950 | | 6 | 36484759 | 36499460 |
| A9 | ENSESTT00000032952 | | 6 | 36499410 | 36503191 |
| A9 | ENSESTT00000032951 | | 6 | 36499410 | 36505772 |
| A9 | ENSESTT00000032953 | | 6 | 36501514 | 36505772 |
| A9 | OTTHUMT00006006300 | STK38-001 | 6 | 36508524 | 36562102 |
| A9 | ENST00000229812 | STK38 | 6 | 36508531 | 36562102 |
| A9 | ENSESTT00000032999 | | 6 | 36510468 | 36522221 |
| A9 | ENSESTT00000032996 | | 6 | 36530077 | 36562102 |
| A9 | ENSESTT00000032955 | | 6 | 36608994 | 36616435 |
| A9 | ENSESTT00000032954 | | 6 | 36608994 | 36617545 |
| A9 | OTTHUMT00006006302 | SFRS3-001 | 6 | 36609000 | 36618064 |
| A9 | OTTHUMT00006006303 | SFRS3-002 | 6 | 36609023 | 36616672 |
| A9 | ENST00000244437 | SFRS3 | 6 | 36611395 | 36617408 |
| A9 | ENST00000317631 | | 6 | 36688401 | 36689903 |
| A9 | OTTHUMT00006006306 | dJ193M11.1-001 | 6 | 36688449 | 36689902 |
| A9 | OTTHUMT00006012688 | CDKN1A-005 | 6 | 36691160 | 36699143 |
| A9 | ENSESTT00000032956 | | 6 | 36692420 | 36701950 |
| A9 | OTTHUMT00006012684 | CDKN1A-001 | 6 | 36693290 | 36701971 |
| A9 | ENST00000244741 | CDKN1A | 6 | 36693342 | 36701963 |
| A9 | OTTHUMT00006012685 | CDKN1A-002 | 6 | 36693353 | 36700556 |
| A9 | ENSESTT00000032957 | | 6 | 36693354 | 36701950 |
| A9 | OTTHUMT00006012687 | CDKN1A-004 | 6 | 36693358 | 36699130 |
| A9 | OTTHUMT00006012686 | CDKN1A-003 | 6 | 36693403 | 36695312 |
| A9 | ENSESTT00000032958 | | 6 | 36693403 | 36695312 |
| A9 | OTTHUMT00006011804 | dJ431A14.3-001 | 6 | 36737227 | 36743433 |
| A9 | ENST00000229824 | | 6 | 36737257 | 36745385 |
| A9 | ENST00000310390 | Q8TDV1 | 6 | 36751637 | 36752338 |
| A9 | OTTHUMT00006006308 | dJ431A14.4-001 | 6 | 36751682 | 36752618 |
| A9 | OTTHUMT00006006311 | dJ431A14.5-002 | 6 | 36755407 | 36772013 |
| A9 | ENST00000244751 | CPNE5 | 6 | 36755410 | 36854008 |
| A9 | OTTHUMT00006006310 | dJ431A14.5-001 | 6 | 36755410 | 36854633 |
| A9 | ENSESTT00000032989 | | 6 | 36758313 | 36772015 |
| A9 | OTTHUMT00006006312 | dJ431A14.5-003 | 6 | 36760019 | 36772013 |
| A9 | ENSESTT00000032990 | | 6 | 36760019 | 36772013 |
| A9 | ENSESTT00000032987 | | 6 | 36760019 | 36780337 |
| A9 | ENSESTT00000032988 | | 6 | 36760024 | 36772025 |
| A9 | OTTHUMT00006006351 | PPIL1-002 | 6 | 36869458 | 36873266 |
| A9 | OTTHUMT00006006350 | PPIL1-001 | 6 | 36869458 | 36889655 |
| A9 | ENST00000244367 | PPIL1 | 6 | 36869463 | 36889629 |
| A9 | ENSESTT00000032983 | | 6 | 36870099 | 36889655 |
| A9 | ENSESTT00000032984 | | 6 | 36870254 | 36886506 |
| A9 | OTTHUMT00006006316 | dJ90K10.2-001 | 6 | 36886501 | 36939186 |
| A9 | OTTHUMT00006006319 | dJ90K10.2-004 | 6 | 36900485 | 36931139 |
| A9 | OTTHUMT00006006317 | dJ90K10.2-002 | 6 | 36900495 | 36938153 |
| A9 | OTTHUMT00006006318 | dJ90K10.2-003 | 6 | 36900495 | 36938153 |
| A9 | ENST00000314503 | C6orf89 | 6 | 36900495 | 36941175 |
| A9 | ENSESTT00000032959 | | 6 | 36900540 | 36938610 |
| A9 | OTTHUMT00006006320 | dJ90K10.2-005 | 6 | 36900544 | 36938203 |
| A9 | ENSESTT00000032960 | | 6 | 36900558 | 36929229 |
| A9 | ENSESTT00000032961 | | 6 | 36909132 | 36938610 |
| A9 | OTTHUMT00006006326 | dJ90K10.3-001 | 6 | 36943210 | 36943499 |
| A9 | OTTHUMT00006006328 | dJ90K10.4-001 | 6 | 36954718 | 36959306 |
| A9 | ENST00000297048 | PI16 | 6 | 36969064 | 36979463 |
| A9 | OTTHUMT00006006330 | dJ90K10.5-001 | 6 | 36969064 | 36979468 |
| A9 | ENSESTT00000032962 | | 6 | 36969360 | 36974006 |
| A9 | ENSESTT00000032963 | | 6 | 36969368 | 36978833 |
| A9 | ENSESTT00000032964 | | 6 | 36969383 | 36978833 |
| A9 | OTTHUMT00006006331 | dJ90K10.5-002 | 6 | 36977621 | 36979298 |
| A9 | OTTHUMT00006006335 | dJ90K10.6-002 | 6 | 36982772 | 36991863 |
| A9 | OTTHUMT00006006341 | dJ90K10.6-008 | 6 | 36982772 | 37000929 |
| A9 | OTTHUMT00006006334 | dJ90K10.6-001 | 6 | 36982772 | 37000929 |
| A9 | ENSESTT00000032969 | | 6 | 36983213 | 36992788 |
| A9 | ENSESTT00000032965 | | 6 | 36983213 | 37000795 |
| A9 | ENSESTT00000032966 | | 6 | 36983310 | 37000795 |
| A9 | ENSESTT00000032967 | | 6 | 36983310 | 37000795 |
| A9 | OTTHUMT00006006340 | dJ90K10.6-007 | 6 | 36983368 | 37000612 |
| A9 | ENST00000259958 | MTCH1 | 6 | 36983368 | 37000747 |
| A9 | OTTHUMT00006006337 | dJ90K10.6-004 | 6 | 36983391 | 36985547 |
| A9 | OTTHUMT00006006336 | dJ90K10.6-003 | 6 | 36983543 | 36992304 |
| A9 | OTTHUMT00006006338 | dJ90K10.6-005 | 6 | 36984097 | 36987385 |
| A9 | ENSESTT00000032968 | | 6 | 36984669 | 37000795 |
| A9 | OTTHUMT00006006339 | dJ90K10.6-006 | 6 | 36984687 | 36987307 |
| A9 | OTTHUMT00006006356 | FGD2-001 | 6 | 37020277 | 37042929 |
| A9 | ENSESTT00000035539 | | 6 | 37020289 | 37026654 |
| A9 | ENSESTT00000035540 | | 6 | 37020301 | 37028317 |
| A9 | ENST00000274963 | FGD2 | 6 | 37020330 | 37043169 |
| A9 | ENSESTT00000035541 | | 6 | 37040439 | 37042882 |
| A9 | OTTHUMT00006006354 | dJ405J24.2-001 | 6 | 37059462 | 37060032 |
| A9 | ENST00000297147 | O95101 | 6 | 37059560 | 37059820 |
| A9 | OTTHUMT00006006358 | dJ441G21.1-001 | 6 | 37105853 | 37106493 |
| A9 | ENST00000310055 | | 6 | 37105943 | 37106437 |
| A9 | ENSESTT00000035542 | | 6 | 37184786 | 37185779 |
| A9 | ENSESTT00000035543 | | 6 | 37184786 | 37185779 |
| A9 | OTTHUMT00006012708 | PIM1-003 | 6 | 37184834 | 37190057 |
| A9 | ENST00000259722 | PIM1 | 6 | 37184841 | 37190057 |
| A9 | ENSESTT00000035544 | | 6 | 37185789 | 37190059 |
| A9 | OTTHUMT00006012709 | PIM1-004 | 6 | 37187099 | 37188878 |
| A9 | ENSESTT00000035545 | | 6 | 37187103 | 37190059 |
| A9 | OTTHUMT00006012706 | PIM1-001 | 6 | 37187125 | 37188943 |
| A9 | ENSESTT00000035546 | | 6 | 37187125 | 37190059 |
| A9 | OTTHUMT00006012707 | PIM1-002 | 6 | 37187627 | 37190057 |
| A9 | OTTHUMT00006006360 | dJ355M6.2-001 | 6 | 37226811 | 37272786 |
| A9 | ENST00000316899 | Q8TC54 | 6 | 37226812 | 37233661 |
| A9 | OTTHUMT00006006361 | dJ355M6.2-002 | 6 | 37227067 | 37272267 |
| A9 | ENST00000316909 | NM_145316 | 6 | 37229829 | 37233661 |
| A9 | ENSESTT00000035577 | | 6 | 37233261 | 37272786 |
| A9 | OTTHUMT00006006364 | dJ744I24.2-001 | 6 | 37272403 | 37347601 |
| A9 | ENSESTT00000035547 | | 6 | 37272498 | 37294209 |
| A9 | ENST00000229492 | C6orf197 | 6 | 37298967 | 37347600 |
| A9 | ENSESTT00000035548 | | 6 | 37331324 | 37347601 |
| A9 | ENSESTT00000035549 | | 6 | 37331816 | 37339289 |
| A9 | OTTHUMT00006006366 | RNF8-001 | 6 | 37368684 | 37409364 |
| A9 | ENSESTT00000035550 | | 6 | 37368716 | 37386205 |
| A9 | ENST00000229866 | RNF8 | 6 | 37368796 | 37395990 |
| A9 | ENSESTT00000035551 | | 6 | 37383509 | 37405872 |
| A9 | OTTHUMT00006006367 | RNF8-002 | 6 | 37383520 | 37391647 |
| A9 | ENSESTT00000035554 | | 6 | 37383557 | 37405862 |
| A9 | ENSESTT00000035552 | | 6 | 37383557 | 37405872 |
| A9 | ENSESTT00000035553 | | 6 | 37383557 | 37405872 |
| A9 | ENSESTT00000035555 | | 6 | 37391555 | 37405872 |
| A9 | ENSESTT00000035556 | | 6 | 37447848 | 37474233 |
| A9 | OTTHUMT00006006384 | dJ153P14.1-009 | 6 | 37447850 | 37458714 |
| A9 | ENSESTT00000035557 | | 6 | 37447850 | 37474233 |
| A9 | OTTHUMT00006006377 | dJ153P14.1-002 | 6 | 37447851 | 37476692 |
| A9 | OTTHUMT00006006376 | dJ153P14.1-001 | 6 | 37447851 | 37496137 |
| A9 | ENST00000259729 | NM_015050 | 6 | 37450261 | 37496137 |
| A9 | OTTHUMT00006006383 | dJ153P14.1-008 | 6 | 37467109 | 37473320 |
| A9 | ENSESTT00000035558 | | 6 | 37474283 | 37488203 |
| A9 | OTTHUMT00006006378 | dJ153P14.1-003 | 6 | 37474290 | 37476703 |
| A9 | ENSESTT00000035559 | | 6 | 37474290 | 37476703 |
| A9 | OTTHUMT00006006380 | dJ153P14.1-005 | 6 | 37477502 | 37495903 |
| A9 | OTTHUMT00006006379 | dJ153P14.1-004 | 6 | 37488199 | 37493826 |
| A9 | ENSESTT00000035560 | | 6 | 37489154 | 37496138 |
| A9 | ENSESTT00000035561 | | 6 | 37489159 | 37493872 |
| A9 | OTTHUMT00006006382 | dJ153P14.1-007 | 6 | 37489950 | 37497458 |
| A9 | ENSESTT00000035562 | | 6 | 37489950 | 37497460 |
| A9 | OTTHUMT00006006381 | dJ153P14.1-006 | 6 | 37489976 | 37495777 |
| A9 | OTTHUMT00006006394 | dJ153P14.2-001 | 6 | 37497551 | 37514553 |
| A9 | ENSESTT00000035575 | | 6 | 37497563 | 37514525 |
| A9 | ENST00000259975 | Q9P0B6 | 6 | 37497563 | 37514553 |
| A9 | ENSESTT00000035576 | | 6 | 37497569 | 37499495 |
| A9 | ENSESTT00000035574 | | 6 | 37497716 | 37514544 |
| A9 | OTTHUMT00006006395 | dJ153P14.2-002 | 6 | 37497716 | 37514553 |
| A9 | OTTHUMT00006006370 | dJ153P14.3-001 | 6 | 37558184 | 37561386 |
| A9 | ENSESTT00000035573 | | 6 | 37558184 | 37561393 |
| A9 | OTTHUMT00006006372 | dJ153P14.4-001 | 6 | 37561183 | 37562345 |
| A9 | ENSESTT00000035563 | | 6 | 37564634 | 37565497 |
| A9 | OTTHUMT00006006374 | dJ153P14.5-001 | 6 | 37564635 | 37565491 |
| A9 | ENSESTT00000035571 | | 6 | 37651734 | 37660878 |
| A9 | OTTHUMT00006006400 | dJ402N21.2-001 | 6 | 37651734 | 37669174 |
| A9 | ENST00000297153 | MDGA1 | 6 | 37651999 | 37711442 |
| A9 | ENST00000229875 | Q8NBE3 | 6 | 37652690 | 37660859 |
| A9 | ENSESTT00000035572 | | 6 | 37653259 | 37656528 |
| A9 | ENSESTT00000035568 | | 6 | 37663817 | 37669088 |
| A9 | ENSESTT00000035570 | | 6 | 37664502 | 37666973 |
| A9 | ENSESTT00000035569 | | 6 | 37664502 | 37669088 |
| A9 | OTTHUMT00006006398 | dJ402N21.1-001 | 6 | 37670396 | 37711576 |
| A9 | ENSESTT00000035567 | | 6 | 37672943 | 37711576 |
| A9 | OTTHUMT00006006402 | dJ441A12.1-001 | 6 | 37830408 | 37833849 |
| A9 | ENSESTT00000035566 | | 6 | 37833212 | 37833973 |
| A9 | ENSESTT00000035564 | | 6 | 37834162 | 37944634 |
| A9 | OTTHUMT00006006406 | TEX27-001 | 6 | 37834162 | 38169252 |
| A9 | ENSESTT00000035565 | | 6 | 37834188 | 38166902 |
| A9 | ENST00000287218 | TEX27 | 6 | 37834577 | 38167020 |
| A9 | OTTHUMT00006006407 | TEX27-002 | 6 | 37944570 | 38097088 |
| A9 | ENSESTT00000028267 | | 6 | 38016900 | 38018551 |
| A9 | OTTHUMT00006006404 | bA420A21.1-001 | 6 | 38017463 | 38017944 |
| A9 | OTTHUMT00006006408 | TEX27-003 | 6 | 38076242 | 38077291 |
| A9 | ENSESTT00000028247 | | 6 | 38076350 | 38168417 |
| A9 | OTTHUMT00006006409 | TEX27-004 | 6 | 38131203 | 38156962 |
| A9 | OTTHUMT00006006414 | dJ295F6.2-001 | 6 | 38177432 | 38178435 |
| A9 | OTTHUMT00006006425 | dJ322I12.1-004 | 6 | 38185948 | 38654445 |
| A9 | OTTHUMT00006006416 | dJ322I12.2-001 | 6 | 38188304 | 38191924 |
| A9 | OTTHUMT00006006426 | dJ322I12.1-005 | 6 | 38189588 | 38359724 |
| A9 | ENSESTT00000028266 | | 6 | 38189682 | 38271074 |
| A9 | ENST00000320902 | Q8NAH5 | 6 | 38193995 | 38194495 |
| A9 | OTTHUMT00006006423 | dJ322I12.1-002 | 6 | 38302912 | 38594901 |
| A9 | ENSESTT00000023248 | | 6 | 38496227 | 38497741 |
| A9 | OTTHUMT00006006418 | bA430C17.1-001 | 6 | 38496323 | 38497162 |
| A9 | OTTHUMT00006006422 | dJ322I12.1-001 | 6 | 38592231 | 38610698 |
| A9 | OTTHUMT00006006420 | dJ319M7.2-001 | 6 | 38601954 | 38603160 |
| A9 | ENST00000328403 | BTBD9 | 6 | 38607118 | 38612725 |
| A9 | OTTHUMT00006006424 | dJ322I12.1-003 | 6 | 38608899 | 38654542 |
| A9 | OTTHUMT00006006435 | GLO1-002 | 6 | 38690574 | 38697846 |
| A9 | OTTHUMT00006006434 | GLO1-001 | 6 | 38690574 | 38717772 |
| A9 | ENST00000244746 | GLO1 | 6 | 38690575 | 38717772 |
| A9 | ENSESTT00000028264 | | 6 | 38690577 | 38717784 |
| A9 | ENSESTT00000028262 | | 6 | 38691212 | 38699147 |
| A9 | ENSESTT00000028258 | | 6 | 38691212 | 38717784 |
| A9 | ENSESTT00000028265 | | 6 | 38691212 | 38717784 |
| A9 | ENSESTT00000028263 | | 6 | 38691365 | 38696733 |
| A9 | ENSESTT00000028259 | | 6 | 38696639 | 38717784 |
| A9 | ENSESTT00000028260 | | 6 | 38696641 | 38717784 |
| A9 | ENSESTT00000028261 | | 6 | 38697434 | 38717784 |
| A9 | OTTHUMT00006006432 | dJ503A6.2-001 | 6 | 38728682 | 38729848 |
| A9 | ENSESTT00000028257 | | 6 | 38728682 | 38729848 |
| A9 | ENST00000327475 | Q8IU65 | 6 | 38729972 | 38749145 |
| A9 | OTTHUMT00006012038 | DNAH8-003 | 6 | 38737477 | 38986711 |
| A9 | OTTHUMT00006012037 | DNAH8-002 | 6 | 38737477 | 39045150 |
| A9 | OTTHUMT00006012036 | DNAH8-001 | 6 | 38737753 | 39045156 |
| A9 | ENST00000244699 | DNAH8 | 6 | 38749146 | 39045422 |
| A9 | OTTHUMT00006011850 | dJ217P22.2-001 | 6 | 38777536 | 38779325 |
| A9 | ENSESTT00000028249 | | 6 | 38872332 | 38878623 |
| A9 | OTTHUMT00006012039 | DNAH8-004 | 6 | 38878600 | 38885121 |
| A9 | ENSESTT00000028250 | | 6 | 38887623 | 38888176 |
| A9 | OTTHUMT00006006438 | dJ207H1.3-001 | 6 | 38937660 | 38946002 |
| A9 | OTTHUMT00006006439 | dJ207H1.3-002 | 6 | 38937660 | 38967730 |
| A9 | ENSESTT00000028255 | | 6 | 38939657 | 38948048 |
| A9 | ENSESTT00000028251 | | 6 | 38940722 | 38944241 |
| A9 | OTTHUMT00006011974 | dJ207H1.2-001 | 6 | 38942662 | 38942784 |
| A9 | OTTHUMT00006006440 | dJ207H1.3-003 | 6 | 38943981 | 38947548 |
| A9 | ENSESTT00000028256 | | 6 | 38943981 | 38947548 |
| A9 | ENSESTT00000028254 | | 6 | 38958559 | 38967720 |
| A9 | ENSESTT00000028252 | | 6 | 38966101 | 38988421 |
| A9 | ENSESTT00000028253 | | 6 | 38998885 | 39027120 |
| A9 | ENSESTT00000028268 | | 6 | 39027083 | 39045160 |
| A9 | OTTHUMT00006006452 | dJ202I21.3-001 | 6 | 39054234 | 39054616 |
| A9 | OTTHUMT00006006444 | GLP1R-001 | 6 | 39063429 | 39102374 |
| A9 | ENST00000229900 | GLP1R | 6 | 39063472 | 39100704 |
| A9 | ENSESTT00000028298 | | 6 | 39118691 | 39124040 |
| A9 | ENSESTT00000028296 | | 6 | 39118691 | 39129820 |
| A9 | OTTHUMT00006006446 | dJ202I21.1-001 | 6 | 39118695 | 39124203 |
| A9 | OTTHUMT00006006448 | dJ202I21.1-003 | 6 | 39118695 | 39129820 |
| A9 | ENST00000229903 | C6orf64 | 6 | 39119524 | 39129720 |
| A9 | OTTHUMT00006006454 | dJ202I21.5-001 | 6 | 39124952 | 39127583 |
| A9 | OTTHUMT00006006447 | dJ202I21.1-002 | 6 | 39127706 | 39129702 |
| A9 | ENSESTT00000028297 | | 6 | 39127885 | 39129702 |
| A9 | OTTHUMT00006006456 | KCNK5-001 | 6 | 39203604 | 39244081 |
| A9 | ENST00000297169 | KCNK5 | 6 | 39205521 | 39243742 |
| A9 | ENSESTT00000028294 | | 6 | 39205943 | 39243759 |
| A9 | ENSESTT00000028295 | | 6 | 39208772 | 39243759 |
| A9 | OTTHUMT00006006464 | KCNK17-001 | 6 | 39313632 | 39329053 |
| A9 | ENSESTT00000028293 | | 6 | 39314030 | 39315137 |
| A9 | ENSESTT00000028292 | | 6 | 39314058 | 39319209 |
| A9 | ENST00000244759 | KCNK17 | 6 | 39314058 | 39328951 |
| A9 | OTTHUMT00006006462 | KCNK16-001 | 6 | 39329336 | 39337171 |
| A9 | ENSESTT00000028290 | | 6 | 39329579 | 39337599 |
| A9 | ENST00000211196 | KCNK16 | 6 | 39329633 | 39337171 |
| A9 | ENSESTT00000028291 | | 6 | 39332507 | 39337185 |
| A9 | ENSESTT00000028289 | | 6 | 39350785 | 39358362 |
| A9 | OTTHUMT00006006460 | dJ137F1.4-001 | 6 | 39350785 | 39400304 |
| A9 | ENST00000297170 | C6orf102 | 6 | 39358338 | 39445790 |
| A9 | ENST00000229913 | Q86T87 | 6 | 39358338 | 39554716 |
| A9 | OTTHUMT00006006458 | dJ137F1.3-001 | 6 | 39368378 | 39368803 |
| A9 | OTTHUMT00006006466 | dJ188D3.1-001 | 6 | 39434570 | 39445946 |
| A9 | OTTHUMT00006006470 | dJ1043E3.1-001 | 6 | 39554634 | 39740037 |
| A9 | ENSESTT00000028286 | | 6 | 39554831 | 39599605 |
| A9 | ENSESTT00000028284 | | 6 | 39554831 | 39601027 |
| A9 | OTTHUMT00006006472 | dJ1043E3.1-003 | 6 | 39559134 | 39592907 |
| A9 | ENST00000287152 | | 6 | 39559160 | 39739941 |
| A9 | ENSESTT00000028288 | | 6 | 39559179 | 39592907 |
| A9 | ENSESTT00000028285 | | 6 | 39559179 | 39600971 |
| A9 | OTTHUMT00006006468 | dJ1043E3.2-001 | 6 | 39568448 | 39569574 |
| A9 | ENSESTT00000028287 | | 6 | 39597804 | 39599586 |
| A9 | OTTHUMT00006006471 | dJ1043E3.1-002 | 6 | 39597806 | 39610891 |
| A9 | ENSESTT00000028283 | | 6 | 39610746 | 39689117 |
| A9 | OTTHUMT00006006473 | dJ1043E3.1-004 | 6 | 39705830 | 39729590 |
| A9 | ENSESTT00000028282 | | 6 | 39706266 | 39739928 |
| A9 | ENSESTT00000028269 | | 6 | 39807005 | 39879702 |
| A9 | ENST00000274867 | DAAM2 | 6 | 39807649 | 39919503 |
| A9 | ENSESTT00000028270 | | 6 | 39836736 | 39879669 |
| A9 | ENSESTT00000028271 | | 6 | 39863403 | 39875800 |
| A9 | OTTHUMT00006006489 | dJ278E11.1-006 | 6 | 39870878 | 39876106 |
| A9 | OTTHUMT00006006485 | dJ278E11.1-002 | 6 | 39870878 | 39882152 |
| A9 | OTTHUMT00006006484 | dJ278E11.1-001 | 6 | 39870878 | 39919499 |
| A9 | OTTHUMT00006006486 | dJ278E11.1-003 | 6 | 39882351 | 39919496 |
| A9 | ENSESTT00000028272 | | 6 | 39884968 | 39893094 |
| A9 | OTTHUMT00006006487 | dJ278E11.1-004 | 6 | 39887977 | 39893404 |
| A9 | OTTHUMT00006006488 | dJ278E11.1-005 | 6 | 39902036 | 39905992 |
| A9 | OTTHUMT00006006480 | bA61I13.3-001 | 6 | 39903421 | 39911984 |
| A9 | OTTHUMT00006006481 | bA61I13.3-002 | 6 | 39903505 | 39912011 |
| A9 | ENSESTT00000028281 | | 6 | 39903505 | 39912011 |
| A9 | ENSESTT00000028273 | | 6 | 39911507 | 39913571 |
| A9 | ENSESTT00000028274 | | 6 | 39911802 | 39919761 |
| A9 | OTTHUMT00006006478 | bA61I13.2-001 | 6 | 39911971 | 39914702 |
| A9 | ENSESTT00000028279 | | 6 | 39917315 | 39919496 |
| A9 | ENSESTT00000028280 | | 6 | 39917519 | 39918030 |
| A9 | OTTHUMT00006006504 | MOCS1-005 | 6 | 39919690 | 39926973 |
| A9 | OTTHUMT00006006505 | MOCS1-006 | 6 | 39919690 | 39927603 |
| A9 | OTTHUMT00006006506 | MOCS1-007 | 6 | 39919690 | 39927603 |
| A9 | OTTHUMT00006006502 | MOCS1-003 | 6 | 39919690 | 39941994 |
| A9 | OTTHUMT00006006500 | MOCS1-001 | 6 | 39919690 | 39942310 |
| A9 | OTTHUMT00006006501 | MOCS1-002 | 6 | 39919690 | 39949091 |
| A9 | OTTHUMT00006006507 | MOCS1-008 | 6 | 39919690 | 39949106 |
| A9 | ENSESTT00000028275 | | 6 | 39920144 | 39926919 |
| A9 | ENST00000274884 | MOCS1 | 6 | 39920154 | 39949011 |
| A9 | ENST00000308559 | MOCS1 | 6 | 39920988 | 39942172 |
| A9 | ENSESTT00000028278 | | 6 | 39921368 | 39928029 |
| A9 | ENSESTT00000028276 | | 6 | 39924433 | 39949106 |
| A9 | OTTHUMT00006006503 | MOCS1-004 | 6 | 39926863 | 39947026 |
| A9 | ENSESTT00000028277 | | 6 | 39941918 | 39949056 |
| A9 | ENST00000320371 | | 6 | 39973005 | 39973427 |
| A9 | OTTHUMT00006006496 | dJ278E11.3-001 | 6 | 39973008 | 39973427 |
| A9 | OTTHUMT00006006498 | dJ278E11.5-001 | 6 | 40007409 | 40014827 |
| A9 | ENST00000333628 | | 6 | 40014193 | 40014863 |
| A9 | OTTHUMT00006006516 | bA552E20.1-001 | 6 | 40286160 | 40290831 |
| A9 | OTTHUMT00006006524 | bA535K1.1-003 | 6 | 40349548 | 40394479 |
| A9 | OTTHUMT00006006525 | bA535K1.1-004 | 6 | 40355059 | 40394479 |
| A9 | ENSESTT00000026515 | | 6 | 40358936 | 40360627 |
| A9 | OTTHUMT00006006518 | bA552E20.3-001 | 6 | 40358938 | 40360745 |
| A9 | OTTHUMT00006006520 | bA552E20.4-001 | 6 | 40373338 | 40384068 |
| A9 | OTTHUMT00006006522 | bA535K1.1-001 | 6 | 40392931 | 40394479 |
| A9 | OTTHUMT00006006523 | bA535K1.1-002 | 6 | 40392931 | 40394479 |
| A9 | ENSESTT00000026510 | | 6 | 40392944 | 40394492 |
| A9 | ENSESTT00000026509 | | 6 | 40393305 | 40394492 |
| A9 | OTTHUMT00006006532 | bA535K1.2-001 | 6 | 40406180 | 40602059 |
| A9 | ENST00000287126 | Q9ULH4 | 6 | 40406228 | 40601981 |
| A9 | ENSESTT00000026512 | | 6 | 40447652 | 40601916 |
| A9 | OTTHUMT00006006530 | bA121P10.1-001 | 6 | 40516225 | 40516987 |
| A9 | ENSESTT00000026514 | | 6 | 40516225 | 40516987 |
| A9 | OTTHUMT00006006534 | dJ462C17.1-001 | 6 | 40530930 | 40538527 |
| A9 | ENSESTT00000026513 | | 6 | 40530930 | 40538527 |
| A9 | OTTHUMT00006006536 | bA570K4.1-001 | 6 | 40728005 | 40729957 |
| A9 | ENSESTT00000026511 | | 6 | 40728005 | 40729957 |
| A10 | ENSESTT00000052482 | | 18 | 71312402 | 71313353 |
| A10 | ENSESTT00000052481 | | 18 | 71536395 | 71551301 |
| A10 | ENSESTT00000052480 | | 18 | 71962357 | 71963077 |
| A10 | ENSESTT00000056790 | | 18 | 72048442 | 72054756 |
| A10 | ENSESTT00000056791 | | 18 | 72098098 | 72099051 |
| A10 | ENST00000217537 | Y222_HUMAN | 18 | 72199207 | 72334123 |
| A10 | ENSESTT00000056807 | | 18 | 72201199 | 72217929 |
| A10 | ENSESTT00000056806 | | 18 | 72201199 | 72218100 |
| A10 | ENSESTT00000056792 | | 18 | 72276438 | 72279133 |
| A10 | ENSESTT00000056793 | | 18 | 72326067 | 72326639 |
| A10 | ENSESTT00000056794 | | 18 | 72367851 | 72401147 |
| A10 | ENSESTT00000056795 | | 18 | 72688458 | 72707773 |
| A10 | ENST00000253159 | ZNF236 | 18 | 72688458 | 72774998 |
| A10 | ENST00000320610 | ZNF236 | 18 | 72688458 | 72807272 |
| A10 | ENSESTT00000056797 | | 18 | 72717002 | 72734201 |
| A10 | ENSESTT00000056796 | | 18 | 72717002 | 72734313 |
| A10 | ENSESTT00000056798 | | 18 | 72737983 | 72747435 |
| A10 | ENSESTT00000056799 | | 18 | 72815875 | 72819321 |
| A10 | ENST00000318747 | MBP | 18 | 72817767 | 72855988 |
| A10 | ENSESTT00000056804 | | 18 | 72819098 | 72855989 |
| A10 | ENSESTT00000056803 | | 18 | 72819230 | 72856028 |
| A10 | ENSESTT00000056805 | | 18 | 72819273 | 72855988 |
| A10 | ENST00000281193 | | 18 | 72819360 | 72828993 |
| A10 | ENSESTT00000056800 | | 18 | 72820171 | 72823085 |
| A10 | ENSESTT00000056801 | | 18 | 72820171 | 72823085 |
| A10 | ENSESTT00000056802 | | 18 | 72855561 | 72905291 |
| A10 | ENST00000309607 | | 18 | 72867119 | 72867493 |
| A10 | ENST00000299727 | GALR1 | 18 | 73088710 | 73109070 |
| A10 | ENSESTT00000052501 | | 18 | 73089280 | 73095131 |
| A10 | ENSESTT00000052502 | | 18 | 73092673 | 73095150 |
| A10 | ENSESTT00000052503 | | 18 | 73461485 | 73463448 |
| A10 | ENSESTT00000052478 | | 18 | 74655974 | 74657295 |
| A10 | ENSESTT00000052477 | | 18 | 74836231 | 74837820 |
| A10 | ENST00000299466 | SALL3 | 18 | 74839252 | 74857165 |
| A10 | ENSESTT00000052474 | | 18 | 74853768 | 74856489 |
| A10 | ENSESTT00000052475 | | 18 | 74854402 | 74861654 |
| A10 | ENST00000307671 | ATP9B | 18 | 74928369 | 75236360 |
| A10 | ENSESTT00000052476 | | 18 | 74928431 | 74972951 |
| A10 | ENSESTT00000065967 | | 18 | 75162658 | 75191977 |
| A10 | ENSESTT00000065966 | | 18 | 75162658 | 75191981 |
| A10 | ENSESTT00000065968 | | 18 | 75195603 | 75237133 |
| A10 | ENSESTT00000065969 | | 18 | 75203116 | 75204817 |
| A10 | ENSESTT00000065970 | | 18 | 75203163 | 75237133 |
| A10 | ENST00000253506 | NFATC1 | 18 | 75254749 | 75345913 |
| A10 | ENSESTT00000065971 | | 18 | 75255250 | 75270171 |
| A10 | ENST00000329101 | NM_172387 | 18 | 75259369 | 75345913 |
| A10 | ENSESTT00000065975 | | 18 | 75270434 | 75311108 |
| A10 | ENSESTT00000065973 | | 18 | 75270434 | 75327154 |
| A10 | ENSESTT00000065974 | | 18 | 75270434 | 75327154 |
| A10 | ENSESTT00000065972 | | 18 | 75270434 | 75345394 |
| A10 | ENSESTT00000065976 | | 18 | 75306857 | 75310062 |
| A10 | ENSESTT00000065977 | | 18 | 75307549 | 75310062 |
| A10 | ENSESTT00000065978 | | 18 | 75310647 | 75327154 |
| A10 | ENST00000334423 | | 18 | 75314345 | 75314808 |
| A10 | ENST00000334083 | | 18 | 75363755 | 75810501 |
| A10 | ENST00000333925 | | 18 | 75363758 | 75550986 |
| A10 | ENSESTT00000065979 | | 18 | 75386139 | 75387291 |
| A10 | ENSESTT00000066012 | | 18 | 75386888 | 75388300 |
| A10 | ENSESTT00000066011 | | 18 | 75403966 | 75404501 |
| A10 | ENST00000327986 | | 18 | 75415199 | 75415865 |
| A10 | ENST00000317008 | NM_182570 | 18 | 75500963 | 75538593 |
| A10 | ENST00000299543 | CTDP1 | 18 | 75538778 | 75613484 |
| A10 | ENST00000075430 | NM_048368 | 18 | 75538925 | 75595497 |
| A10 | ENSESTT00000066010 | | 18 | 75561698 | 75562628 |
| A10 | ENSESTT00000065980 | | 18 | 75563836 | 75573932 |
| A10 | ENSESTT00000065981 | | 18 | 75573941 | 75613484 |
| A10 | ENSESTT00000065982 | | 18 | 75588015 | 75613484 |
| A10 | ENSESTT00000065983 | | 18 | 75594535 | 75613484 |
| A10 | ENST00000316249 | KCNG2 | 18 | 75722645 | 75758793 |
| A10 | ENSESTT00000066009 | | 18 | 75761442 | 75762272 |
| A10 | ENSESTT00000066008 | | 18 | 75761446 | 75762510 |
| A10 | ENST00000316111 | NM_025078 | 18 | 75761465 | 75810007 |
| A10 | ENSESTT00000066004 | | 18 | 75762569 | 75809829 |
| A10 | ENSESTT00000066005 | | 18 | 75762569 | 75809829 |
| A10 | ENSESTT00000066002 | | 18 | 75762569 | 75809842 |
| A10 | ENSESTT00000065999 | | 18 | 75762569 | 75809843 |
| A10 | ENSESTT00000066000 | | 18 | 75762569 | 75809843 |
| A10 | ENSESTT00000066006 | | 18 | 75762650 | 75809829 |
| A10 | ENSESTT00000066001 | | 18 | 75762650 | 75809843 |
| A10 | ENST00000262199 | Q9H6D0 | 18 | 75762953 | 75802393 |
| A10 | ENSESTT00000066003 | | 18 | 75763093 | 75809836 |
| A10 | ENSESTT00000066007 | | 18 | 75774508 | 75775293 |
| A10 | ENSESTT00000065984 | | 18 | 75823637 | 75826139 |
| A10 | ENSESTT00000065998 | | 18 | 75825557 | 75831889 |
| A10 | ENST00000269601 | DIM1_HUMAN | 18 | 75831846 | 75847511 |
| A10 | ENSESTT00000065996 | | 18 | 75832383 | 75836894 |
| A10 | ENSESTT00000065991 | | 18 | 75832383 | 75847550 |
| A10 | ENSESTT00000065993 | | 18 | 75832384 | 75847452 |
| A10 | ENSESTT00000065995 | | 18 | 75832396 | 75847330 |
| A10 | ENSESTT00000065994 | | 18 | 75832490 | 75847391 |
| A10 | ENSESTT00000065997 | | 18 | 75832541 | 75835766 |
| A10 | ENSESTT00000065992 | | 18 | 75832715 | 75847514 |
| A10 | ENST00000306735 | NM_024805 | 18 | 75893335 | 75905364 |
| A10 | ENSESTT00000065986 | | 18 | 75893389 | 75901198 |
| A10 | ENSESTT00000065985 | | 18 | 75893389 | 75905374 |
| A10 | ENSESTT00000065990 | | 18 | 75893434 | 75905357 |
| A10 | ENST00000262197 | Q8WZ65 | 18 | 75893473 | 75904914 |
| A10 | ENSESTT00000065987 | | 18 | 75896424 | 75905374 |
| A10 | ENSESTT00000065988 | | 18 | 75926233 | 75938117 |
| A10 | ENST00000262198 | NM_014913 | 18 | 75966162 | 75997201 |
| A10 | ENSESTT00000065989 | | 18 | 75989961 | 75992868 |
| A10 | ENSESTT00000052575 | | 18 | 76004909 | 76006133 |
| A10 | ENST00000314741 | PARD6G | 18 | 76016631 | 76104208 |
| A10 | ENSESTT00000052576 | | 18 | 76016997 | 76104406 |
| A10 | ENSESTT00000052577 | | 18 | 76039710 | 76059638 |
| A11 | ENST00000319217.1 | MPDZ | 9 | 13096497 | 13240357 |
| A11 | ENST00000319198.3 | MPDZ | 9 | 13096497 | 13240357 |
| A11 | ENST00000276902.1 | NFIB | 9 | 14077605 | 14297550 |
| A11 | ENST00000331870.1 | | 9 | 14194247 | 14194570 |
| A11 | ENST00000324876.2 | NM_178566 | 9 | 14607036 | 14683474 |
| A11 | ENST00000276911.1 | CER1 | 9 | 14710088 | 14712670 |
| A11 | ENST00000297595.3 | NM_144966 | 9 | 14727207 | 14900993 |
| A11 | ENST00000324457.3 | NM_144966 | 9 | 14727207 | 14900993 |
| A11 | ENST00000297593.1 | NM_144966 | 9 | 14727207 | 14900993 |
| A11 | ENST00000297615.2 | NM_152574 | 9 | 15161561 | 15297250 |
| A11 | ENST00000336042.1 | NM_152574 | 9 | 15161561 | 15297250 |
| A11 | ENST00000297627.1 | SNAPC3 | 9 | 15412732 | 15455830 |
| A11 | ENST00000336277.1 | SNAPC3 | 9 | 15412732 | 15455830 |
| A11 | ENST00000297635.1 | PSIP2 | 9 | 15454067 | 15500982 |
| A11 | ENST00000285482.4 | | 9 | 15542895 | 15613411 |
| A11 | ENST00000297641.1 | NM_173550 | 9 | 15734586 | 15961895 |
| A11 | ENST00000318677.2 | NM_173550 | 9 | 15734586 | 15961895 |
| A11 | ENST00000309604.2 | NM_017637 | 9 | 16408579 | 16427061 |
| A11 | ENST00000317612.2 | NM_017637 | 9 | 16408579 | 16427061 |
| A11 | ENST00000316584.1 | NM_152576 | 9 | 16517183 | 16517287 |
| A11 | ENST00000297642.1 | NM_017738 | 9 | 17125064 | 17485003 |
| A11 | ENST00000262360.2 | NM_017738 | 9 | 17125064 | 17485003 |

The application's sequence listing, which the Patent Office published only in electronic form, follows.

SEQUENCE LISTING (3049 sequences)

SEQ ID NO: 1 - DNA, 1836 bp, Artificial
  cDNA Sequence
acgcagggccggggcagttggtcgcggccttcagtcccctggcttggtcctgtggggtccccggcccggcacctcctcccgcgagccgtgcgcccccatcctgggcctgcgcccccttcccccgagccgtgcgcccccatgctaggccctgtgaccctcccccgaacagtgcgccccgatcctgggccctgcgccccctcccccaccccatcccggggcgcgcgtggacccccgccggctaagcgcacccgggcggtgaccccaggggcttcgcccgtcctcgaccccggcgctgggacccctccccagccccctccgggagcgtctcgggacccccagacacccccccggctccctgtgcctcccagccccgcacctcctccctctggaccggctcccacaaggccacctggtcagcagcccacggaggctcccgtgcagggaccaccccctccccgtgctgggccggctccggggccaccccctcctccctgctgcccccagagctgctcaccctggggatcttccccccatcctcttctggctcaccgagctcgcaacccccacactcccgtcccagctgggctgctccgaccaccccaccccgtggacatgagaccgcccagcactcagcgcccacccctaggtgcctgtagcccccacactcccatcccagccgggctgctccgaccaccctgccctgcagacatgaggccgcccagcactcagcacccgcccctagcaccacctcctcccacgcagcagtctcctgcctcttccctcacccaagggcctccagcaccacctcctcccacacagcagtctcctgcctcttccctcacccaagggtctcatccaccacctcctcccacacagcagtctcctgcctcttccctcacccaagggcctccagcaccacctcctcccacacagcagtctcctgcctcttccatcacccaagggtctcgtccaccacctcctcccacgcagcagtctcctgcctcttccatcacccaagggtctcatccaccacctcctcccacacagcagtctcctgcctcttccctcacccaagggcctccagcaccacctcctcccacacagcagtctcctgcctcttccatcacccaagggcctccagcatcacctcctcccacgcagcagtctcctgcctcttctctcacccaagggcctccagcaccacctcctcccacgcagcagtctcctgcctcttccatcacccaagggcctccagcatcacctcctcccacgcagcagtctcctgcctcttccctcacccaagggcctccagcaccacctcctcccacgcagcagtctcctgcctcttccatcacccaagggtctcatccaccacctcctcccacacagcagtctcctgcctcttccctcacccaagggcctccagcaccacctcctcccacgcagcagtctcctgcctcttccctcacccaagggcctccagcaccacctcctcccacgcagcagtctcctgcctcttccatcacccaagggcctccagcatcacctcctcccacgcagcagtctcctgcctcttccctcacccaagggcctccagcaccacctcctcccacgcagcagtctcctgcctcttccatcacccaagggtctcatccaccacctcctcccacacagcagtctcctgcctcttccctcacccaagggcctccagcaccacctcctcccacgcagcagtctcctgcctcttccctcacccaagggcctccagcaccacctcctcccacacagcagtctcctgcctcttccctcacccaagggcctccagcaccacctcct

SEQ ID NO: 2 - DNA, 1656 bp, Artificial
  cDNA Sequence
gtccactcctcccccaccccgagtccaccctgggagccgtccactcctcccccaccccgagtccaccctgggagccgtccactcctcccccaccccaagtccaccctgggagccgtccactcctcccccaccccgagtccaccctgggagccgtccactcctccccaccccgagtccaccctgggagccgtccactcttctcccaccccgagtccaccctgggagccgtccactcctccccaccccgagtccaccctgggagccgtccactcctcccccaccccgagtccaccctgggagccgtccactcctcccccaccccgagtccaccctgggagccgtccactcctccccaccccgagtccaccctgggagccgtccactcctccccaccccgagtccaccctgggagccgtccactcctcccccaccccgagtccaccctgggagccgtccactcctcccccaccccgagtccaccctgggagccgtccactcctccccaccccgagtccaccctgggagctgtccactgttccccagcccgagtcctgcctgggaagctcaccacctcctcccacgcagcagtctcctgcctcttccctcacccaagggcctccagcaccacctcctcccacacagcagtctcctgcctcttccctcacccaagggtctcatccaccacctcctcccacacagcagtctcctgcctcttccctcacccaagggcctccagcaccacctcctcccacacagcagtctcctgcctcttccatcacccaagggtctcgtccaccacctcctcccacgcagcagtctcctgcctcttccatcacccaagggtctcatccaccacctcctcccacacagcagtctcctgcctcttccctcacccaagggcctccagcaccacctcctcccacacagcagtctcctgcctcttccatcacccaagggcctccagcatcacctcctcccacgcagcagtctcctgcctcttctctcacccaagggcctccagcaccacctcctcccacgcagcagtctcctgcctcttccatcacccaagggcctccagcatcacctcctcccacgcagcagtctcctgcctcttccctcacccaagggcctccagcaccacctcctcccacgcagcagtctcctgcctcttccatcacccaagggtctcatccaccacctcctcccacacagcagtctcctgcctcttccctcacccaagggcctccagcaccacctcctcccacgcagcagtctcctgcctcttccctcacccaagggcctccagcaccacctcctcccacgcagcagtctcctgcctcttccatcacccaagggcctccagcatcacctcctcccacgcagcagtctcctgcctcttccctcacccaagggcctccagcaccacctcctcccacgcagcagtctcctgcctcttccatcacccaagggtctcatccaccacctcctcccacacagcagtctcctgcctcttccctcacccaagggcctccagcaccacctcctcccacgcagcagtctcctgcctcttccctcacccaagggcctccagcaccacctcctcccacacagcagtctcctgcctcttccctcacccaagggcctccagcaccacct

SEQ ID NO: 3 - DNA, 3523 bp, Artificial
  cDNA Sequence
ctgggttgtgtcgccgcggtaggcgctgcgctctgagcgcagcgcaggccccgtaccgaccgcccgcccgccctctgtccgcgatggaggtgccggccgcgggtcgcgttcctgccgagggcgccccgacggcggctgtggccgaggtgcgctgcccggggcccgcgccgctgcgcctgctggagtggagggtggcggcgggcgcggccgtgcgcatcggctcggtgctggccgtgttcgaggccgccgcctccgcgcagtcctccggggcctctcagtcccgtgtagcctccgggggctgcgtgcgccccgcgcggccggaacgcaggctgaggtcggagcgcgcgggcgtggtgcgggagctgtgcgcgcagccgggccaggtggtcgccccaggagcggttctggtgaggttggaaggatgcagccacccggttgtcatgaaaggcctgtgtgctgaatgtggccaagacctcacccagttgcagagtaagaacgggaagcagcaggtgccgctgtccacggcgaccgtgtccatggtgcacagcgtgccggagttgatggtgagctccgagcaagctgaacagctgggaagagaagaccagcagcgactgcaccgaaaccggaagctggtgctcatggtggacttggaccagacgttgattcacacaaccgagcagcactgtcagcagatgtcgaataaaggcatctttcacttccagctgggccggggtgagcccatgctgcacacgcgcctgcgtccacactgcaaggacttcctggagaagatcgccaagctgtacgagctgcacgtcttcaccttcggcagccggctgtacgcacacaccatcgcaggctttttagaccccgagaagaagcttttttctcaccgaatattatcaagggatgaatgtattgacccattttctaaaacgggaaaccttagaaatctctttccttgtggagactcaatggtttgcattattgatgatcgagaagatgtctggaagtttgcccccaatctgataactgtgaagaaatatgtatacttccagggcacgggtgatatgaatgcgccccctgggtcccgagaatctcagacgagaaagaaagtaaatcattctcgaggcactgaggtctcagagccatctccgcccgtgagagaccctgagggggtaacgcaggcccctggagtggagcccagcaatggcctggagaagcctgcacgggagctgaacggcagcgaggccgccaccccgcgggactcaccccgccccgggaagccagacgagagggacatctggccccctgcccaggcccccaccagcagccaagagctggcaggcgctcctgagccccagggatcctgtgcgcagggtggccgggtggcaccgggacagcggcctgcccagggtgccacgggcactgacctggactttgacttatccagcgacagcgagagcagcagtgagtccgagggcacgaagtcctcctcctccgcctctgatggcgaaagcgaggggaaaagaggccggcagaagccgaaggctgccccagagggagccggggcgctggcacagggcagttccctggagccggggcggcctgcagcaccgagtctccccggagaggccgagcctggcgcgcatgccccggacaaggagcctgagctgggtgggcaggaggagggcgagcgggatggcctctgcggcctgggcaacggctgtgccgacaggaaggaggcggagaccgagtcacagaacagcgagctgtcgggggtcactgcgggtgagtccctggaccagagcatggaggaggaggaggaggaggacacggatgaggatgaccacctcatctacctggaggagatcctggtccgtgtacacactgactactatgccaagtatgaccgctacctcaacaaggagatcgaggaggcgccggacatccgcaagatcgtgccggagctcaagagcaaggtgctggcagacgtggccataattttcagtgggctacacccgacaaacttcccgatagagaagacgcgggagcattaccacgccacggcgctgggagcgaagatcctcactcggctggtgctgagccccgacgcccctgacagggccacgcacctgatcgccgcgcgagctggcacagagaaggtgctgcaggcacaggagtgcggacacctgcacgtggtcaaccctgactggctgtggagctgcctggagcgctgggacaaggtggaggagcagctcttcccgctcagggacgatcacaccaaggcacagagggagaacagccctgcggcctttcccgaccgggagggtgtgccccccaccgccttgttccacccgatgccggttcttcccaaggcccagcctggccccgaggttcggatctacgactccaacacggggaagctcatcaggacgggcgcccgggggcccccagcaccctccagctccctacccatccgccaggagccctcttccttcaggtggacgacatccttggagaaggcagcgacgacagcgacagcgagaagaggaggcctgaggagcaggaggaggagccccagccccggaagccagggacccgcagggagcggacgctcggggcacctgcgtccagcgagaggagcgcggcagggggccgggggcccagaggccacaagaggaagctgaatgaagaggacgccgccagcgagtccagcagggagtccagcaacgaggatgagggcagcagctccgaggccgacgagatggccaaggcgctggaggcggagctcaacgacctcatgtgagcgcgggcagcgggcagggactgaagcctgaccgacctccagcagcactcggacgtccccggaccagccctcagtctcggtccacgctgctttcttcccaaaggacatgtatatttgcagagctccacatacagaaacacattattttgcagaaataggtgtttttaagaagttttactacaggaatgtctacttttgtaagtgacaggtgttaaaggcccaggtgtgctgtgccaaagagctcagcagaggctcacgtggcccaggctggtgcgcccgctgtctcggtaaggggcgggttggtgtgttttccccttgtgtaccagagcacattccttaggggacggctttgggggtcccacgagacatggactaggagtttaagcaggacagtgtgcgtgcacgagctccgagcccagcacagacatgcctggaacccccgccgcctgctgctccctcctagggaacccatttccggggaacgccgtgactgtcgggcagcctggagcttcctgcagcctcctacgcagggtccacgccacgtggcctgggctgccatcctgccgtcctcccactggcatcctggcaagggggcgttgcttttcctgggcggccttttatgtcttggagacacctgatgtaaagtttctgtaaatctatttcatatctgacccaccaaacagatttctctttaataaaaatcctttttgtaagttc

SEQ ID NO: 4 - DNA, 3744 bp, Artificial
  cDNA Sequence
ggaagtcggcgcgggctaggcgacgggtggaagccggtaccgagaggaactacagcgtcgccgcctgggttgtgtcgccgcggtaggcgctgcgctctgagcgcagcgcaggccccgtaccgaccgcccgcccgccctctgtccgcgatggaggtgccggccgcgggtcgcgttcctgccgagggcgccccgacggcggctgtggccgaggtgcgctgcccggggcccgcgccgctgcgcctgctggagtggagggtggcggcgggcgcggccgtgcgcatcggctcggtgctggccgtgttcgaggccgccgcctccgcgcagtcctccggggcctctcagtcccgtgtagcctccgggggctgcgtgcgccccgcgcggccggaacgcaggctgaggtcggagcgcgcgggcgtggtgcgggagctgtgcgcgcagccgggccaggtggtcgccccaggagcggttctggtgaggttggaaggatgcagccacccggttgtcatgaaaggcctgtgtgctgaatgtggccaagacctcacccagttgcagagtaagaacgggaagcagcaggtgccgctgtccacggcgaccgtgtccatggtgcacagcgtgccggagttgatggtgagctccgagcaagctgaacagctgggaagagaagaccagcagcgactgcaccgaaaccggaagctggtgctcatggtggacttggaccagacgttgattcacacaaccgagcagcactgtcagcagatgtcgaataaaggcatctttcacttccagctgggccggggtgagcccatgctgcacacgcgcctgcgtccacactgcaaggacttcctggagaagatcgccaagctgtacgagctgcacgtcttcaccttcggcagccggctgtacgcacacaccatcgcaggctttttagaccccgagaagaagcttttttctcaccgaatattatcaagggatgaatgtattgacccattttctaaaacgggaaaccttagaaatctctttccttgtggagactcaatggtttgcattattgatgatcgagaagatgtctggaagtttgcccccaatctgataactgtgaagaaatatgtatacttccagggcacgggtgatatgaatgcgccccctgggtcccgagaatctcagacgagaaagaaagtaaatcattctcgaggcactgaggtctcagagccatctccgcccgtgagagaccctgagggggtaacgcaggcccctggagtggagcccagcaatggcctggagaagcctgcacgggagctgaacggcagcgaggccgccaccccgcgggactcaccccgccccgggaagccagacgagagggacatctggccccctgcccaggcccccaccagcagccaagagctggcaggcgctcctgagccccagggatcctgtgcgcagggtggccgggtggcaccgggacagcggcctgcccagggtgccacgggcactgacctggactttgacttatccagcgacagcgagagcagcagtgagtccgagggcacgaagtcctcctcctccgcctctgatggcgaaagcgaggggaaaagaggccggcagaagccgaaggctgccccagagggagccggggcgctggcacagggcagttccctggagccggggcggcctgcagcaccgagtctccccggagaggccgagcctggcgcgcatgccccggacaaggagcctgagctgggtgggcaggaggagggcgagcgggatggcctctgcggcctgggcaacggctgtgccgacaggaaggaggcggagaccgagtcacagaacagcgagctgtcgggggtcactgcgggtgagtccctggaccagagcatggaggaggaggaggaggaggacacggatgaggatgaccacctcatctacctggaggagatcctggtccgtgtacacactgactactatgccaagtatgaccgctacctcaacaaggagatcgaggaggcgccggacatccgcaagatcgtgccggagctcaagagcaaggtgctggcagacgtggccataattttcagtgggctacacccgacaaacttcccgatagagaagacgcgggagcattaccacgccacggcgctgggagcgaagatcctcactcggctggtgctgagccccgacgcccctgacagggccacgcacctgatcgccgcgcgagctggcacagagaaggtgctgcaggcacaggagtgcggacacctgcacgtggtcaaccctgactggctgtggagctgcctggagcgctgggacaaggtggaggagcagctcttcccgctcagggacgatcacaccaaggcacagagggagaacagccctgcggcctttcccgaccgggagggtgtgccccccaccgccttgttccacccgatgccggttcttcccaaggcccagcctggccccgaggttcggatctacgactccaacacggggaagctcatcaggacgggcgcccgggggcccccagcaccctccagctccctacccatccgccaggagccctcttccttcagagcggttccgccaccccagccgcagatgtttggtgaagagctgcctgacgctcaggacggagagcagcctggcccttctagaagaaagcgacagcccagtatgtctgagacaatgccgctgtacactctttgtaaggaggatttagagagtatggacaaagaggtggacgacatccttggagaaggcagcgacgacagcgacagcgagaagaggaggcctgaggagcaggaggaggagccccagccccggaagccagggacccgcagggagcggacgctcggggcacctgcgtccagcgagaggagcgcggcagggggccgggggcccagaggccacaagaggaagctgaatgaagaggacgccgccagcgagtccagcagggagtccagcaacgaggatgagggcagcagctccgaggccgacgagatggccaaggcgctggaggcggagctcaacgacctcatgtgagcgcgggcagcgggcagggactgaagcctgaccgacctccagcagcactcggacgtccccggaccagccctcagtctcggtccacgctgctttcttcccaaaggacatgtatatttgcagagctccacatacagaaacacattattttgcagaaataggtgtttttaagaagttttactacaggaatgtctacttttgtaagtgacaggtgttaaaggcccaggtgtgctgtgccaaagagctcagcagaggctcacgtggcccaggctggtgcgcccgctgtctcggtaaggggcgggttggtgtgttttccccttgtgtaccagagcacattccttaggggacggctttgggggtcccacgagacatggactaggagtttaagcaggacagtgtgcgtgcacgagctccgagcccagcacagacatgcctggaacccccgccgcctgctgctccctcctagggaacccatttccggggaacgccgtgactgtcgggcagcctggagcttcctgcagcctcctacgcagggtccacgccacgtggcctgggctgccatcctgccgtcctcccactggcatcctggcaagggggcgttgcttttcctgggcggccttttatgtcttggagacacctgatgtaaagtttctgtaaatctatttcatatctgacccaccaaacagatttctctttaataaaaatcctttttgt

SEQ ID NO: 5 - DNA, 3697 bp, Artificial
  cDNA Sequence
aacacatgaatttggaggggacaaaaacatttcaaccgtagcaccatttgtctcctttgctgctattggagggagagtcccaatttctcattagtttatgcagcttgctgcttagtaatgacttatcaatgacagttgaaacttgtagttgtatttgatgaaggaaatatgcacatttctttatagcacttagttttttgctttgtttttctactttattaacatgcaggcaaagtgggagtgtttatttttaaagaagctttgagcattagacatgttttaaatctatttcttcgtttaatatcagttgtcttctaagaagtgtttctcatcaaaatggaaacaataaggcttagatatttaagataaaatgtaccagctggaggatgagtctgcgcatttggatgaaatgccactaatgatgtctgaagaaggctttgagaatgaggaaagtgattaccacaccttaccacgagccaggataatgcaaaggaaaagaggactggagtggtttgtctgtgatggctggaagttcctctgtaccagttgctgtggttggctgataaatatttgtcgaagaaagaaagagctgaaagctcgcacagtatggcttggatgtcctgaaaagtgtgaagaaaaacatcccaggaattctataaaaaatcaaaaatacaatgtgtttacctttatacctggggttttgtatgaacaattcaagtttttcttgaatctctattttctagtaatatcctgctcacagtttgtaccagcattgaaaataggctatctctacacctactgggctcctctgggatttgtcttggctgttactatgacacgggaagcaattgatgaatttcggcgttttcagcgtgacaaggaagtgaattcacaactatatagcaagcttacagtaagaggtaaagtgcaagttaagagttcagacatacaagttggagacctcatcatagtggaaaagaatcaaagaattccatcggacatggtgtttcttaggacttcagaaaaagcaggttcgtgttttattcgaactgatcaactagatggtgaaactgactggaagctgaaggtggcagtgagctgcacgcaacagctgccggctctgggggaccttttttctatcagtgcttatgtttatgctcagaaaccacaaatggacattcacagtttcgaaggcacatttaccagggaagacagtgacccgcccattcatgaaagtctcagcatagaaaatacattgtgggcaagcaccattgttgcatcaggtactgtaataggtgttgtcatttataccggaaaagagactcgaagtgtaatgaacacatccaatccaaaaaataaggttggtttgttggaccttgaactcaatcggctgacgaaagcgctatttttggctttagttgctctttccattgttatggtaaccttacaaggatttgtgggtccatggtaccgcaatctttttcggttccttctcctcttttcttacatcattcccataagtttgcgtgtgaacttggacatgggcaaagcggtgtatggatggatgatgatgaaagatgagaacatccctggcacggtcgttcggaccagcactatcccagaggaacttgggcgcctggtgtatttattgacagacaaaacaggaaccctcacccagaatgaaatgatatttaagcggctgcacctgggcaccgtgtcctatggcgccgacacgatggatgagatccagagccatgtcagggactcctactcacagatgcagtctcaagctggtggaaacaatactggttcaactccactaagaaaagcccaatcttcagctcccaaagttaggaaaagtgtcagtagtcgaatccatgaagccgtgaaagccatcgtgctgtgtcacaacgtgacccccgtgtatgagtctcgggccggcgttactgaggagactgagttcgcagaggctgaccaagacttcagtgatgagaatcgcacctaccaggcttccagcccggatgaggtcgctctggtgcagtggacagagagtgtgggcctcacgctggtcagcagggacctcacctccatgcagctgaagacccccagtggccaggtcctcagcttctgcattctgcagctgtttcccttcacctccgagagcaagcggatgggcgtcatcgtcagggatgaatccacggcagaaatcacattctacatgaagggcgctgacgtggccatgtctcctatcgtgcagtataatgactggctggaagaggagtgcggaaacatggctcgcgaaggactgcggaccctcgtggttgcaaagaaggcgttgacagaggagcagtaccaggactttgagagccgatacactcaagccaagctgagcatgcacgacaggtccctcaaggtggccgcggtagtcgagagcctggagagggagatggaactgctgtgcctcaccggcgtggaggaccagctgcaggcagacgtgcggcccacgctggagatgctgcgcaacgccgggatcaagatatggatgctaacaggcgataaactcgagacagctacctgcattgccaaaagttcacatctcgtgtctagaacacaagatattcatattttcagacaggtaaccagtcggggagaggcacatttggagctgaatgcatttcgaaggaagcatgattgtgcactagtcatatctggggactctctggaggtttgtctaaagtactacgagcatgaatttgtggagctggcctgccagtgccctgccgtggtttgctgccgctgctcacccacccagaaggcccgcattgtgacactgctgcagcagcacacagggagacgcacctgcgccatcggtgatggaggaaatgatgtcagcatgattcaggcagcagactgtgggattgggattgagggaaaggagggtaaacaggcctcgctggcggccgacttctccatcacgcagttccggcacataggcaggctgctcatggtgcacgggcggaacagctacaagaggtcggcggcactcggccagttcgtcatgcacaggggccttatcatctccaccatgcaggctgtgttttcctcagtcttctacttcgcatccgtccctttgtatcagggcttcctcatggtggggtatgccaccatatacaccatgttcccagtgttctccttagtgctggaccaggacgtgaagccagagatggcgatgctctacccggagctgtacaaggacctcaccaagggaagatccttgtccttcaaaaccttcctcatctgggttttaataagtatttaccaaggcggcatcctcatgtatggggccctggtgctcttcgagtctgagttcgtccacgtggtggccatctccttcaccgcactgatcctgaccgagctgctgatggtggcgctgaccgtccgcacgtggcactggctgatggtggtggccgagttcctcagcttaggctgctacgtgtcctcactcgcttttctcaatgaatattttggtataggcagagtgtcttttggagctttcttagatgttgcctttatcaccaccgtgaccttcctgtggaaagtgtcggcgatcaccgtggtcagctgcctcccgctgtatgtcctcaagtacctgaggcgcaagctctctcctcccagctactgcaagctggcctcctaa

SEQ ID NO: 6 - DNA, 3057 bp, Artificial
  cDNA Sequence
atcccgctagaatccgtccagtctctgctcgcgcaccgtgacttctaaggggcgcggatttcagccgagctgttttcgcctctcagttgcagcagagaagcccctggcacccgactctatccaccaccaggaagcctcccaaaagagctctcgccctgtggacgactcggaatccctggaaaagccgggagggagtcggaggcgccagcccactggggaggtggcgctgggcgcgcgggatgcgcggggagccttctctgcaggagccgcacagtgcactgctgcgcgctgggcagtgcggggaagcgccgcgggaaggagcggctccgagcaacaggtgcagcacgcagcccctccgggagccagggaaaaccgccggcgaagatctggagcggtaaggcggagagaagggtctttccacctgcgcggctgcagccggcggatccctcttcccaggctccgtggtcgcgcagcgggcggaggcgcccgggaaggggaccccagtgctctcgagatcaccgtcccttcccgagaaggtccagctccgggctcccgaacccaccctctctcagaaggtcccggcgcaaagacggtgccaccaggcacggccaccggatccccgctcccgctggctcgcgcctcgggggaagctcagactcctaaactcgcactctccgtgctttgcgccgggacccctggccacccccggcgcctactatcccgccctccctccccgcgcgccccgccgctcgccgggacagccccgcgggccatggagctggcggtcgggaacctcagcgagggcaacgcgagctggccggagccccccgccccggagcccgggccgctgttcggcatcggcgtggagaacttcgtcacgctggtggtgttcggcctgatcttcgcgctgggtgtgctgggcaacagcctagtgatcaccgtgctggcgcgcagcaagccgggcaagccgcggagcaccaccaacctgttcatcctcaacctgagcatcgccgacctggcctacctgctcttctgcatccccttccaggccaccgtgtacgcgctgcccacctgggtgctgggcgccttcatctgcaagttcatccactacttcttcaccgtgtccatgctggtgagcatcttcaccctggccgcgatgtccgtggaccgctacgtggccatcgtgcactcgcggcgctcctcctccctcagggtgtcccgcaacgcgctgctgggcgtgggctgcatctgggcgctgtccattgccatggcctcgcccgtggcctaccaccagggcctcttccacccgcgcgccagcaaccagaccttctgctgggagcagtggcccgaccctcgccacaagaaggcctacgtggtgtgcaccttcgtcttcggctacctgctgccgctcctgctcatctgcttctgctatgccaaggtccttaatcacttgcataaaaagttgaagaacatgtcaaagaagtctgaagcatccaagaaaaagactgcacagacagttctggtggtggttgtggtgtttggaatctcctggctgccgcaccacatcatccatctctgggctgagtttggagttttcccgctgacgccggcttccttcctcttcagaatcaccgcccactgcctggcgtacagcaattcctccgtgaatcctatcatttatgcatttctctctgaaaatttcaggaaggcctataaacaagtgttcaagtgtcacattcgcaaagattcacacctgagtgatactaaagaaagtaaaagtcgaatagacaccccaccatcaaccaattgtactcatgtgtgataaaagatagagtatccttatggttgagtttccatataagtggaccagacacagaaacaaacagaatgagctagtaagcgatgctgcaacttgttatcttaacaagaattcaagtcgttttaattaaatcccacgtgtgttaaaaagtactttgatccatttaggaaattcctaggtctagtgagaattatttttcaattttattttagttctaaattatgtttcagaaacaaaagacaatgctgtacagttttattcctcttcagacatgaaagggaacatatatattccatatatatgttcaactcttcatagattgtgaactggcccatcaatatggtcaggaatatttgcagtctacattttaaagccaatttatttagaaaaaaaaatttgagctttaattctttaattttaagagaagtaatattgtgaactatgtattttaaaatatgatcatggacacacaatgatgaattttttggccatttacatagacatatctattaagtggaaagaaggctttctgaagtctgtttgcacaggtggcatttgcttccaattgtagctagcgcacagagctttggaagcctgtcattatgagatacagtcggtttacctcaggagtcaattcagtgttgtactggtgacctgggatgcagtagtaggcactgttgattcaaatttatcctgtgaaactggctttatagagttaacaaaacagagtcagagaccactgtcttaacagtggaagatgcaaataagtttttgagaataaaactggattttgaaattttacattagtacttgacaaaagttttcattttgccttgaatggaacctactaaaaagagagatgaaaaaaaatcagcgaggttgatgtagataataatttctatgggaccaaagactagacagaattcagtaagtcacatgaagtaatggtcatgcctgtacataaagcatatttcatgtttgatttagatgacattcaaaaaaaatcatgggactgaatatacctggggtatcctatcttgtacaaatgcatgctttttcattaaatttgtaatgatgtttaatgaacatttccaccaaacattatttcctctaaaaatgttaatttggggttaaaaccatcaccatttgaatttcaaatgtagttttcatgacaattttatattgatgtgtgtttacaatgagaaaatggcatgaaaatattaaattgtcttgtatcg

SEQ ID NO: 7 - DNA, 543 bp, Artificial
  cDNA Sequence
atgcaacgcgggccgctgtcgcccagtcccagtgacggtcttggcgcgctcggaactacgtatcccggcgtgcaccgcggacagagcatggcgggactacgagtcccagcgttcaacgcaggcctgcgtgccattaccccatcacgcgctgagacccagcatcccgagactacgagttccggcatgcaccgcgagccgctctcctccactcccatcgcgcactgggaaggcgcccagtccccaggagcacaatctgtcctggccatgcttgtccaccgaactgcagcttacactctgcaggtcctggagcccaagaaagaccccgggagggagctcccggccacgcccaggtcctgggccccggcgaggcagccatcaccacttcacagcatccgacagacaatgccggcaaaacccagcctggtaaagagggagagaaggaaccaggctttggcaagagaggcgccgtggtttccccagagaacacagtggaagacttccgaagggccaggttcctcctcagggcggagggggcggcgctga

SEQ ID NO: 8 - DNA, 6030 bp, Artificial
  cDNA Sequence
cggggcgtgcgcgtcctcctccccaggcccgccgcctccctgccaagaatctgagagaggccgagtggagttcggtccttctctgaacacttttagctgagagtaccagcatccaactgggagcgttgtcattgcatttccacattcccaggaaagcccaggtgctggctgccagctgctgcgccccccatgtagaaggtgcacctcctgggagcaggcacgtcttttggctcttctgaccatggagagataggacggtccctgcagcccgcgcgacagaaagctgtgccgccaccaccggccgcgcccgtccttcggatggatcgcaacagagaggccgagatggagctgaggcgaggccccagccccaccagggccggccggggccacgaggtggatggggacaaggctacctgccacacctgctgcatctgcggcaagagcttccccttccagagctcgctttcgcagcacatgcgcaagcacacgggcgagaagccctacaagtgtccctactgcgaccaccgggcttcccagaagggcaacctgaagattcacatccggagccaccgcacggggactctgattcagggacacgagccggaggcgggcgaggcgccgctgggtgagatgcgcgcctccgagggcctggacgcctgcgccagccccaccaagagcgcctcggcctgcaaccggctgctgaacggggcctcgcaggccgacggcgccagggtcctgaacggggcctcgcaggccgacagcggcagagtcctgctgcggagcagcaagaagggggcagaggggtccgcatgcgccccgggggaggccaaggcagcggtccagtgctccttctgcaagagccagttcgagcgtaagaaggacctggagctgcacgtgcaccaggcgcacaagccgttcaagtgcaggctgtgcagctacgcgacgctgcgggaggagtcgctgctgagccacatcgagagggaccacatcaccgcgcaggggcccggcagcggcgaggcctgcgtggagaacggcaagcccgagctgagccccggggagttcccgtgcgaggtgtgtggccaggccttcagccagacctggttcctgaaggcgcacatgaagaagcaccggggctccttcgaccacggctgccacatctgcggccgtaggttcaaggagccctggttcctcaagaaccacatgaaggcgcacggccccaagacgggcagcaagaacaggcccaagagtgagctggaccccatcgccaccatcaacaacgtggtccaggaggaggtgatcgtcgccggcctgagcctctacgaggtctgcgccaagtgcgggaacctgtttacaaacctggacagcttgaacgcccacaatgccatccaccgcagagtcgaggccagccgcacgcgcgccccggccgaggagggggcggaggggccctcggacaccaagcagttcttcctccagtgcctgaacctgaggccgtcggcggccggcgactcgtgccctggcacgcaggccggacggcgggtggctgagctggacccggtcaacagctaccaggcctggcagctggccacgcggggtaaggtggccgagccggccgagtacctcaagtacggggcctgggacgaggcgctggccggggacgtggccttcgacaaggacaggcgcgagtacgtcctggtgagccaggagaagcgcaagcgtgagcaggatgcaccagccgcgcaggggcccccgcggaagcgcgcgagcgggcctggggaccccgcgcccgccggccacctcgatccccgctcggccgcgcgccccaaccgcagggccgcagccaccaccggccagggcaagtcctccgagtgcttcgagtgcggcaagatcttccgcacctatcatcagatggtgctgcactcacgcgtgcatcgccgcgcgcgccgcgagagggacagtgacggggacagggcggcgcgggcccgctgcggatcactcagtgagggtgactcggcctcccagcccagcagccctggctccgcctgtgccgctgctgactccccgggctctggcctggccgacgaggctgccgaagacagtggtgaggagggcgcccctgaacctgcaccagggggacagccgcgccgctgctgcttttccgaagaggtgacttcgaccgagctctccagtggagaccagagtcacaagatgggagataacgcctcggaaagagacaccggcgagtccaaggcagggatcgcagcttctgtgtccatacttgaaaacagtagcagagagacttctagaaggcaagagcagcacagattttctatggacttaaagatgccagcatttcaccccaagcaggaggtgcccgtccctggtgatggtgtggagttcccttccagtacgggagcggagggccagacgggtcaccctgcagaaaagctgtccgatttgcacaacaaggaacactctgggggagggaagcgggcgctggccccagacctcatgccgctagatttaagtgcgaggtcgacgcgggatgaccccagcaataaggagacggcctcctccctgcaggcggctttagtcgttcacccgtgtccttactgcagccacaagacctactaccccgaggtcctgtggatgcacaaacgcatctggcaccgcgtcagctgcaactccgtggctcccccgtggattcagcccaatggttacaaaagcatcagaagcaatttggttttcctttcccggagcggacgcacgggccccccgcctgccctcggtggcaaagaatgccagcctttgctccttgctcggttcacccgcactcaggtgccaggggggatgccggggtccaaaagtggctcttctcccctgggagtggtcacaaaagccgctagcatgcctaagaataaggagagccattccggaggtccctgcgctctgtgggcgcccggccctgacgggtatcgacagaccaaaccttgtcacggccaggagccacatggcgcggccacacaggggcccctggccaagcccaggcaggaggctagctccaaaccggtgcctgccccgggtggcgggggcttcagcaggagcgccacccctacgcccaccgtcatcgcccgggctggcgcgcagccctcggccaatagcaagcctgtggagaagtttggggtccccccagcgggggctggctttgcccccacaaataagcacagtgccccggactccctgaaagccaaattcagtgctcagcctcagggtccacctcctgcaaagggcgaagggggcgctcctcctctacctccccgcgagcccccctcgaaggcagcccaggagctgaggactctggccacctgtgctgcggggtccaggggcgacgcggccttgcaggcccagcccggcgtggctgggccccccgtcctacactccatcaaacaggagccggtggccgaggggcatgagaagcgcctggacatcctcaacatctttaagacgtacattccaaaggactttgcgaccctctaccagggatggggtgtcagcggccctgggttggagcacagagggacactccggacgcaggcccggccaggagagttcgtctgcatcgagtgcggaaagagcttccaccagcccggccacctcagggcccacatgcgggcacactcagtggtgtttgagtccgatgggcctcggggttctgaagttcataccacctccgcagacgcccccaaacaagggagagaccattctaacacaggtaccgtccagacagtgcctctgagaaagggaacctaaaggcgtgtttccgacgcaccccaggtccccgtaacggccattagcagtaccctcacgatgtcccagcagcctcccacctgtgacctggccgctccatggaagaacagccggggaactcctgagcagacacctcacatcccgagccgctgcgctggagtggaaactgaaggcagatgcctctccttgttaaacgttcagaaataaatgaagatgctatattctagaaatacatgtagatactatatacgcatttacgtgctcatcgtccatagtcccatattttcttataataaacagtagtactggcaggcacagtaggggcacaaggcatctgtcttattcaagacaagtttgagacactggaaaaaaagatacttgttgtgtgtgttggacagagtggcgaggctgagcactgtcacaggggcctcccatgttaagagggactgtggggatgatgtcagaacaagacgtggtggatttgaggttgatcgagtattaatactactgcctctccttgtcttagtgggtatttaaaatagtaaataagagagaggaaggaggtgacgttcaggtgctgtgggaagcaggcttggcggaggggtatgatgatgagaccctcattgttcactggctccatcgcactcctccctggggccgtgtgcctgttccattcttcccaccattcgaactgagcgaatctggcaaaggagacacgtctgtgggaatgcgtagattccgcctcggaagagagctagcgcaacactaagaaaagcaggcttcttgtttattctcaggacctttttgtaacagggctacattctgcaaactgcttacaaaggaagactatacgtcttaacaaattatttagccactgagtcctcccgattcggacctgttttagtaatggcagaagaatccctgagcaggttcaggtgccctagatgactagggtgctgagctctggcgccttctgtccccactctttgcctccccgccccttccctgagccaccccagcaagtgggtgtcttttctccctgggcctggtgacctccacaggatgagtgactttgttcataaagggtggggatcaccagccccttgggtgggggacggcttcatatacctcttcctcagtaatgcaaatgcgagtttttgtggtgggggttaaggcccataacaaaggatcttaaaccatgcagtgtacgcaattgaaatggtattccacagatataaatattttcttttcccattgccgtgacactatgtgtgatggtaatatttctgagagtttcagatttttgcacatatgattttatgcattatcaaaagttactgctgccttgaatgaaaatgttctgtgaaattttttgcaaaagctttactaggtttttttttaattgtgaaattttgtaaaggcaggaaatggattaaaacgagcatgctaaatatatttttcaaaaaagcaataattttacatgtacagaaattatcctaacctttaatactggcgagagcaacagtttacttaatacggtaatggactagtgcagtttttgtagacagtgggcttctgatacaaagtcttgtttaaacacagacacacacacacacaaacacacacacacaccctaaagtgtgggtttcctgttctaatgatttgttgaatattattatattattattattattattattattattgttattgttattagtaatgtttggttctggattctacttgttactgagtttaaattacttgacggttcaggttactttgcaacactttcaaacgatgcaatgtaactggctagcttatatatatatatatatatatatatatatatatttttttttttttttacttatttttttctgatattcttacaccagatatgtacgaaaatgatctgtcctgttggtgtaattaggaatgtccatgcagatacagttaaacaactgtaattgactgttctgtaaagttattttgggcaaagttgcggagacacattcctctgtccacctaagaaatcagaagactcttctgttgatttatgtttaatcatttcagtagtttccccacagtgatcatttctgcattttctggcttttgttttcttggctgaaagtgaatggtgactgttaggaatgtcagggactagtgacccagtcctgtttctctgtgttttagttattaaaaagaaattctgtacccaaagtg

SEQ ID NO: 9 - DNA, 1390 bp, Artificial
  cDNA Sequence
gcggagtttgcgtgtgcgggcgggaccggatttcgtccgtgggcccgggggcggcgggggccggggagtgaggggccggctgagcccacctcgctgggccctccctggcgccccgccttgggcggcggcgagcgcgcgggccgccatgtcgtacatgctcccgcacctgcacaacggctggcaggtggaccaggccatcctctcggaggaggaccgcgtggtcgtcatccgcttcggccacgactgggatcctacgtgcatgaagatggacgaggtcctgtacagcatcgccgagaaggttaaaaattttgcagttatttatcttgtggatattacagaagtgcctgacttcaacaaaatgtatgagttatacgatccatgtactgtcatgtttttcttcaggaacaagcacatcatgattgacttggggactggcaacaacaacaagattaactgggccatggaggacaagcaggagatggtggacatcatcgagacggtgtaccgcggggcccgcaaaggccgcggcctggtggtgtcccccaaggactactccaccaagtaccgctactgaggcgccctcagtctgcgcggataaatgtcgtggagccctttttgtatggaaacgttttaagctatttaaagcctttggaaaatacaggaagctccagggctggagcacctctgagatggaattgataacatggtcttaactcaccgaaataaacaagcacgtggtgagaggagcaggcctacttgtttgttctcaggaaacttaatgaatagattactgattttcctagtcaaagttaattcttacccttggagtaaaacgaaggtgtttatcctgtgagcctgtgcgttttgcatactgggttggtttgctggggctgcggtgacagcatatgccgcgagctgggctttaacagagatgtgtgctctcacagctttgcaggcgggggtctgagatcagggtgtcgcgggtggggggtcactgctgaggccgtgaggggaatctgctcaggcctgtccctggcttctgggggctgctggtggtattttcagttccttggtgtgtggatacttcgccccatctctgccttcacctgtgtcctccctgtgtgggtgctggtgtccaaaatttccccttttcgtagtgacaccagctgtgttggattggggcccaccctgctccagcatggcctaatcttaactaattacatttgcaaggatcttatgtccacaaaagtcacagtctgaggtgctgggggttaggacttcaatatataaattttgcggttacacaattcaatccatgacagaatccaaaggtttactctggttataaaaacagtacaataaaatattgtttatagccttccctgtaagg

SEQ ID NO: 10 - DNA, 1402 bp, Artificial
  cDNA Sequence
acacgccgcctgccaggcgtgagtcttcctcccgctctgcgccgtcgccccgcccacacgccgccaccctcgcgtcagttgtcgctccgcgcctgcgcccgttgtctccctgctcgctccgggtcccggcgccgcgccatgtgggctgcggcgggcgggctgtggcgctcccgcgcgggtctccgggccctgttccgtagccgcgatgctgcgctatttccaggctgcgagcggggacttcactgctctgctgtctcctgcaagaactggctcaagaaatttgcctcgaaaaccaaaaaaaaggtttggtatgaaagtccttccttgggttctcactcgacttacaaaccatccaagttggaattcctcatgaggagcacctcaaagaaaaccaggaaggaagaccatgcgcgcctgagggccctgaacggcctcctctataaggcactgacagacctgctgtgtacccctgaagtgagtcaggagctgtatgaccttaacgtggagctctccaaggtttccctgactccagacttctcagcctgccgagcgtactggaagacaacgctctctgctgagcagaacgcacacatggaggctgtcctgcagagaagtgccgcgcacatgaggcaccttttgatgtcccagcagaccctgaggaatgtgccaccgatagtgtttgttcaagacaagggaaatgcagctctagctgagcttgatcagttactggcagtcgcagactttggaccccgggatgaaagagacaactttgtacaaaatgatttcagggaccctgatgccccacaaccctgcggcaccacagagccgaccacaagctccagtctgtgtgggatcgatcatgaggcgctcaacaagcagattatggagtacaaaaggaggaaagataaagggctcgggggcctggtgtggcaggggcaggtggctgagctgacaacgcagatgaaaaagggaaggaagagggccaagccccgcctggagcaggacagctccctcaagagttacctgtcaggcgaggaggttgaagatgacctggacctggttggtgccccggagtacgaatgctatgccccggacacagaggagttggaggcagagagaggaggtggcagaacagaggatggccacagctgcggagcaagcagggagtagatggagaggctctgcccatcccacatttgcagggaaaagcattggcacgcaacgcagcatgtggcttcattgaggcagttgatggagttaaaccatctgctcttctgctacttcaacattttctagcttttccgtgtatctaaacacaatttgctacacaagtcactgtttttttttccatgcactgtgtgtaatttaaaaattaaatggccatcttatcacagattctcac

SEQ ID NO: 11 - DNA, 1207 bp, Artificial
  cDNA Sequence
cctgctcgctccgggtcccggcgccgcgccatgtgggctgcggcgggcgggctgtggcgctcccgcgcgggtctccgggccctgttccgtagccgcgatgctgcgctatttccaggctgcgagcggggacttcactgctctgctgtctcctgcaagaactggctcaagaaatttgcctcgaaaaccaaaaaaaaggtttggtatgaaagtccttccttgggttctcactcgacttacaaaccatccaagttggaattcctcatgaggagcacctcaaagaaaaccaggaaggaagaccatgcgcgcctgagggccctgaacggcctcctctataaggcactgacagacctgctgtgtacccctgaagtgagtcaggagctgtatgaccttaacgtggagctctccaaggtttccctgactccagacttctcagcctgccgagcgtactggaagacaacgctctctgctgagcagaacgcacacatggaggctgtcctgcagagaagtgccgcgcacatgagcttgatcagttactggcagtcgcagactttggaccccgggatgaaagagacaactttgtacaaaatgatttcagggaccctgatgccccacaaccctgcggcaccacagagccgaccacaagctccagtctgtgtgggatcgatcatgaggcgctcaacaagcagattatggagtacaaaaggaggaaagataaagggctcgggggcctggtgtggcaggggcaggtggctgagctgacaacgcagatgaaaaagggaaggaagagggccaagccccgcctggagcaggacagctccctcaagagttacctgtcaggcgaggaggttgaagatgacctggacctggttggtgccccggagtacgaatgctatgccccggacacagaggagttggaggcagagagaggaggtggcagaacagaggatggccacagctgcggagcaagcagggagtagatggagaggctctgcccatcccacatttgcagggaaaagcattggcacgcaacgcagcatgtggcttcattgaggcagttgatggagttaaaccatctgctcttctgctacttcaacattttctagcttttccgtgtatctaaacacaatttgctacacaagtcactgtttttttttccatgcactgtgtgtaatttaaaaattaaatggccatcttatcacagattctc

SEQ ID NO: 12 - DNA, 4310 bp, Artificial
  cDNA Sequence
ggggaccagtcgcgctgggggtgggcgcgcgctgaggcgggggtcccgccgcgcggggcggaggcgcgggcgggcgcaggcggccccacgggacgcggctgcgctcggcggaagacgcggcagccctgcgagaggcagcagcggagacgcggtgctcctcgggcgccaagcggaaaatttcaaaaatgtttcaaattcctgtggaaaatcttgacaacatcagaaaggtgcgaaaaaaggtgaaaggtattcttgtggatattgggcttgacagctgcaaggagttactgaaggaccttaaaggctttgatccaggagagaaatactttcataacacatcatggggtgatgtttctctctgggaaccttctggaaagaaagtgagatatcgaacaaagccatactgttgtggcctctgtaaatactctacaaaggtgcttacttcattcaagaatcatttacatcgttaccatgaagatgaaattgaccaagagctggtgatcccttgcccaaactgtgtatttgcatctcagcccaaagttgtgggaaggcacttcagaatgttccatgcacctgtccggaaagtccagaactacacagtgaatattttaggtgaaactaaatcatctaggagcgatgtgataagtttcacatgtctaaaatgtaacttttcaaacactttgtactacagcatgaagaagcatgtgctggtagcccattttcactacttaattaactcctactttggcctaagaactgaggaaatgggtgagcaaccgaaaactaacgatactgtttctatagagaagatcccaccacctgacaaatattactgtaaaaagtgcaacgccaatgccagcagccaggatgcgttaatgtatcacattttgacatcagacatacacagagatttggagaataagcttagatctgtgatttcagaacatattaagaggactggactcttgaagcaaacgcacattgctccaaaaccagcagcacatttggctgcaccagcaaatggcagtgctccaagcgctccagcgcagcctccttgcttccatcttgctttgccacagaacagtccaagcccagccgcaggacagccagtgactgtggcccagggtgcccctggaagcctcactcattccccccctgctgctggccaatcccacatgactctggtctccagccctctgcctgtgggccagaacagcctcaccctgcagcccccagcacctcagcccgtctttctttctcacggggttccacttcatcagtctgtgaatcctcctgtgttgcccttgagtcagccagtcggacctgtcaataagtctgttggaactagtgtcctccccataaatcagactgttcgccctggggttttacccctcacccagcctgtgggacccataaacagacctgttgggcctggtgttcttcctgtgagcccctctgtcacccctggggtcctgcaggctgtctcgccaggggtgctttctgtgagtcgggcggtcccgtctggagtccttcctgcaggccagatgactcctgcaggccagatgactcctgcaggggttatccctgggcaaacagcaacttctggggttcttcctactggccagatggtccagtcaggagttctccctgtgggccagacagctccgtcacgggttcttcccccaggccagacagccccattgagggttatctctgcaggccaggtggtcccgtctgggcttctttctcccaaccagacagtctcctcctcagctgttgtgcctgtaaaccagggtgtgaattctggtgttctgcagcttagtcagcctgttgtgtcgggagttcttcctgtgggccagccagtgaggcctggggtcttgcaactcaaccagactgtgggcaccaacattctgcctgtgaatcagccagtgagacctggtgcttcgcagaacaccaccttcctgacatcaggctctattctcagacagctcatccctacagggaaacaagtgaatgggattccaacctacacgctggcccccgtgtctgtcactctgccggttccccctggaggccttgcgactgtcgctccgccccagatgcccatccagctcctgccgtcaggtgcagctgcaccaatggccggttccatgcccggcatgccctctcctccagtgctggtgaatgctgctcagagcgtgtttgttcaggcctcctcctctgcagcagacacaaaccaggtgctcaaacaggccaagcagtggaagacctgccctgtctgcaacgagctctttccgtccaacgtctaccaggtccacatggaggtagcgcataagcacagcgagtccaagtctggtgagaaacttgagcctgaaaaactggcagcgtgtgcaccatttctaaagtggatgagagagaaaacggtgcgatgtctgtcttgtaagtgcttggtctctgaggaagagcttatacaccacttgctgatgcatggcttggggtgcttgttctgtccatgcaccttccatgatatcaaaggtctttcagagcacagcaggaataggcacctggggaagaagaagttgcctatggattatagcaacagaggttttcaattagatgtcgatgccaatggcaacctgctctttccccaccttgatttcatcaccatattgccaaaggagaagcttggggagcgggaagtctacttggcaatcctggctgggatacactccaagtcactggtgcctgtgtatgtgaaggtgaggcctcaggctgagggcacccccgggagcaccggcaagcgagtgtccacctgccccttttgctttggcccctttgtgacaactgaggcctatgagctgcatttgaaggagaggcaccacatcatgcccacagtccacacggtcctgaagtctcccgccttcaagtgcatccactgctgtggggtctacacgggaaatatgaccctggctgccatcgccgtccatttggtgcgctgcagaagtgctcccaaggacagcagctcagacctgcaggcccagccgggttttattcacaacagtgaactgcttttagtcagtggtgaagtgatgcatgattccagtttttctgttaagagaaagctgcctgacggccacttaggggccgaagaccagcggcatggggaggagcagcctcccatcctaaatgccgatgcagccccgggtccagaaaaggtgacgagtgttgtgccttttaaaagacaaaggaatgaaagcagaacagagggacctattgtcaaggacgaggctcttcagattttagcattagatcctaaaaaatatgaaggccgttcttatgaagaaaagaagcaatttcttaaagattatttccataagaaaccatatcctagtaaaaaggaaatagaactgttgtcctcactcttttgggtgtggaaaattgatgtggcttcattttttggaaaaagaaggtatatttgcatgaaagcaataaaaaatcacaagccttctgtacttttaggctttgatatgtctgaacttaaaaatgtgaaacatagattgaactttgaatatgaaccataaaacttgcaaaaaaaaaaaaaagtaactctaaagtagtaggtagatttttttcagttgaaatttcacagtgttgtcctcactgtgttggtgaatcaacctcagtggtcactgtgctgctctgcagagttacttcaggtgctggagagacccctgttaccaggaagccagtagttatttcacatctattgtttcctgcagtttgatttgtaacagaacagttgttttcaggtttttttctctgtcatgtaaatgaaatcttttgatatttcatgcacgccttgttttcccactagtgtcagtatcgtatgataagaaactgaaatctataaataatttgctttttcattaaggacatttcagcctttttcagaatacttgatttaactgcgagtggaagcatcgatctccttcagctttccctgtagcagcagatggtacagtgagtgttcagagacgtgggtacaaaccctgtgatgtatgtataaggctccctgaggatgcactgcattaacttacgctgacttctttgtaagatctttgcttatagattataatttagatctgtatttttttaggtttatcctaatagctgtttttttttttaaccataactcatagaaaatcaaatgtttttatttgttaaaagtagactgaatttgacatctggtatgctggtatgtagctcatacatcaagagttattttacaaataaatttattctgtagatgc

SEQ ID NO: 13 - DNA, 1401 bp, Artificial
  cDNA Sequence
atggagccatggccctgctccccgggcggcggcggcgggacccgcgcccggcacgtcatcatcaacgtgggcggctgccgcgtgcgcctggcatgggccgcgctggcgcgatgccccctcgcgcgcctggagcgcctgcgcgcctgccgcggccacgacgacctgctgcgcgtgtgtgacgactacgacgtgagccgcgacgagttcttcttcgaccgcagcccgtgcgccttccgcgccatcgtggcgcttttgcgcgcagggaagctgcgactgctgcggggcccgtgcgcgctggccttccgcgacgagctggcctactggggcatcgacgaggcgcgcctggagcgctgctgcctgcgccgcctgcgccgccgcgaggaggaggcggccgaggcccgcgcggggccgacggagcgcggggcgcaggggagcccggcgcgcgccctgggacctcgggggcggctgcagcgcggccggcggcgcctgcgcgacgtggtggacaacccgcactcggggctggcgggcaagctcttcgcctgcgtgtccgtgtccttcgtggccgtcacggccgtgggcctctgcctgagcaccatgccggacatccgcgccgaggaggagcggggcgagtgctcccccaagtgccgcagcctgttcgtgctggagaccgtgtgcgtggcctggttctccttcgagttcctgctgcgctccctgcaggccgagagcaagtgcgccttcctgcgcgcgccactcaacatcattgacatcctggcgctcctgccgttctacgtgtcgctgctgctggggctggcggcaggcccgggcgggaccaagctcctggagcgcgcggggctggtgctgcggctgctgcgtgcgctgcgcgtgctctacgtgatgcgcctggcgcgccactcgctggggctgcgttcgctgggcctgaccatgcgccgctgcgcgcgcgagttcgggctgctgctgctgttcctctgcgtggccatggcgctcttcgcgccactggtgcacctggccgagcgcgagctgggcgcgcgccgcgacttctccagcgtgcccgccagctattggtgggccgtcatctccatgaccaccgtgggctacggcgacatggtcccgcgcagcctgcccgggcaggtggtggcgctcagcagcatcctcagcggcatcctgctcatggccttcccggtcacctccatcttccacaccttttcgcgctcctactccgagctcaaggagcagcagcagcgcgcggccagccccgagccggccctgcaggaggacagcacgcactcggccacagccaccgaggacagctcgcagggccccgacagcgcgggcctggccgacgactccgcggatgcgctgtgggtgcgggcagggcgctga

SEQ ID NO: 14 - DNA, 2117 bp, Artificial
  cDNA Sequence
caggtttggaaggcgctttgagtccccgctgctgtggcagagcgccatcatgatcctgaccatgctgctgatgctgaagctgtgcaccgaggtccgtgtggccaacgagctcaacgccaggcgccgctcctttacagacttcgacccccaccacttctggcagtggagcagcttctcggactacgtgcagtgcgtcctggccttcacgggcgtggcgggctacatcacctacctgtccattgactccgccctgtttgtggagaccctgggcttcctggctgtgctgaccgaagccatgctgggtgtgccccagctttaccgcaaccaccgccaccagtccacggagggcatgagcatcaagatggtgctcatgtggaccagtggtgacgccttcaagacggcctacttcctgctgaagggtgcccctctgcagttctccgtgtgcggcctgctgcaggtgctggtggacctggccatcctggggcaggcctacgccttcgcccgccacccccagaagccggcgccccacgccgtgcaccccactggcaccaaggccctctgacagtggggaggacgaggatgtgggaccgccagccgcgggcactggtgggccctgacctccccgcggggagggtgggtgctgtggcccctgcaggtgtggcagagatggggcatgggcattggggtctccatcagcctctgtggggtgtctcagggtgggcagtgggggtggggctgggacgctgtttgtgctcagcggggacagccagggttgatctggccccgagggttttggatgtttttaggatgacataaaaagcaagtgttttccccatttcctcttatgaaacaccgtctgagcccaaggtacacattgggcggcctgcaggaacctgctccaggtggacacacgggccagcagccgcgaaccttgaagctggggtgaccgcaggagaccctgtaaggcctgtgagcggagccctcgaccccgtgacaccctggccagacaccctgcttggactggggtggcctctgctacccaggggtctggcacgggggagggctggggctttctctgcctggtacacacggaaaggcggctgtgcggacgcagggtcaccgtgctccgggttttctgacagtcggtgtttcctgggcctttggagtggctgcgaggcctgaacgccttgtggatccgctgtgtccagcccggctgagcatcgccagggctagctcatgctgctcttgtcagcctctggttctcctcgagtccttggggacgtggcagatgccagcgaccatcagacaacgtggaggccctcatgggcaatggctgagggggccgggctgaggctgtgcacatgcagtctgcacgccactcttgggctctgctggcggagatccccttccttctgggtgcagactgcacctccggatgcagttttgatgtccatcttccaggagagacggtctcgggtccagggagtggagggggctgcccctgccgtgcaggtcctggccgatggcgccttaccctgctgccctgggcttttggcctgaagcaaattcctgagtggggggtactggggcctgccgcatcctgtcctgtccactgcccacccccgtgtgctggctccctcacttctggctgcagtgggagccgccagtctgacccttgtcaccgcacgctctgcccccaccccgttgcaagaggtcacaccatgtcagcagccttgcactgaccgcagccggcccccaggcctcagagttctggatgcttccgtgcggctccaacaggcatcgtcttcccttccgcaggtggaggggccgcttcccgcaggcatctgagctctgtgccggggccgtggccatgggaagatgttccacgctgcctcctcctcgagttttcctcggaaacactcttgaatgtctgagtgagggtcctgcttagctctttggcctgtgagatgctttgaaaatttttatttttttaagatgaagcaagatgtctgtagcggtaattgcctcacattaaactgtcgccgactgcaggcgcagtgactgctgaatgtaccctgtgtggcgacttggaatcaataaaccatttgtggatcctg

SEQ ID NO: 15 - DNA, 2408 bp, Artificial
  cDNA Sequence
cgcaggccccgaggccgcaggagcgcgcggagcggcgatgagcaggcggccggtggcccgcggggcgcggagcccgtgacagcctcggccaggcgggcgctgcgatggaggccgagggcctggactggctcctggtgccactgcaccagctggtgtcctggggcgcggccgcggccatggtcttcggaggggtggtgccctacgtcccgcagtatcgggacattcgcaggacgcagaacgccgacggcttctccacctacgtgtgcctggtgctgctggtggccaacattttgcggatactcttctggtttggaaggcgctttgagtccccgctgctgtggcagagcgccatcatgatcctgaccatgctgctgatgctgaagctgtgcaccgaggtccgtgtggccaacgagctcaacgccaggcgccgctcctttacagctgcagatagcaaggatgaagaagtcaaggttgcccccaggcggtccttcctggacttcgacccccaccacttctggcagtggagcagcttctcggactacgtgcagtgcgtcctggccttcacgggcgtggcgggctacatcacctacctgtccattgactccgccctgtttgtggagaccctgggcttcctggctgtgctgaccgaagccatgctgggtgtgccccagctttaccgcaaccaccgccaccagtccacggagggcatgagcatcaagatggtgctcatgtggaccagtggtgacgccttcaagacggcctacttcctgctgaagggtgcccctctgcagttctccgtgtgcggcctgctgcaggtgctggtggacctggccatcctggggcaggcctacgccttcgcccgccacccccagaagccggcgccccacgccgtgcaccccactggcaccaaggccctctgacagtggggaggacgaggatgtgggaccgccagccgcgggcactggtgggccctgacctccccgcggggagggtgggtgctgtggcccctgcaggtgtggcagagatggggcatgggcattggggtctccatcagcctctgtggggtgtctcagggtgggcagtgggggtggggctgggacgctgtttgtgctcagcggggacagccagggttgatctggccccgagggttttggatgtttttaggatgacataaaaagcaagtgttttccccatttcctcttatgaaacaccgtctgagcccaaggtacacattgggcggcctgcaggaacctgctccaggtggacacacgggccagcagccgcgaaccttgaagctggggtgaccgcaggagaccctgtaaggcctgtgagcggagccctcgaccccgtgacaccctggccagacaccctgcttggactggggtggcctctgctacccaggggtctggcacgggggagggctggggctttctctgcctggtacacacggaaaggcggctgtgcggacgcagggtcaccgtgctccgggttttctgacagtcggtgtttcctgggcctttggagtggctgcgaggcctgaacgccttgtggatccgctgtgtccagcccggctgagcatcgccagggctagctcatgctgctcttgtcagcctctggttctcctcgagtccttggggacgtggcagatgccagcgaccatcagacaacgtggaggccctcatgggcaatggctgagggggccgggctgaggctgtgcacatgcagtctgcacgccactcttgggctctgctggcggagatccccttccttctgggtgcagactgcacctccggatgcagttttgatgtccatcttccaggagagacggtctcgggtccagggagtggagggggctgcccctgccgtgcaggtcctggccgatggcgccttaccctgctgccctgggcttttggcctgaagcaaattcctgagtggggggtactggggcctgccgcatcctgtcctgtccactgcccacccccgtgtgctggctccctcacttctggctgcagtgggagccgccagtctgacccttgtcaccgcacgctctgcccccaccccgttgcaagaggtcacaccatgtcagcagccttgcactgaccgcagccggcccccaggcctcagagttctggatgcttccgtgcggctccaacaggcatcgtcttcccttccgcaggtggaggggccgcttcccgcaggcatctgagctctgtgccggggccgtggccatgggaagatgttccacgctgcctcctcctcgagttttcctcggaaacactcttgaatgtctgagtgagggtcctgcttagctctttggcctgtgagatgctttgaaaatttttatttttttaagatgaagcaagatgtctgtagcggtaattgcctcacattaaactgtcgccgactgc

SEQ ID NO: 16 - DNA, 4769 bp, Artificial
  cDNA Sequence
atgtctcggcgcaagcaggccaagccccagcacctcaagtcggacgaggagctgctgccgcctgacggggctcccgagcacgccgccccgggggaaggtgcggaggacgcagacagcgggcccgagagccgcagcgggggcgaggagaccagcgtgtgcgagaaatgctgcgccgagttcttcaagtgggcggacttcctggagcaccagcggagctgcaccaagctcccgcccgtgctgatcgtgcacgaggacgcgcccgcgccgccccccgaggacttccccgagccttcgcccgccagctcccccagcgagcgcgccgaaagcgaggcggccgaggaggcgggtgcggagggcgcggagggcgaggccaggccggtggagaaggaggccgagcccatggacgcggaacccgcgggggacacgcgcgcgccccggcccccgcctgcggcccctgcacccccaacgcccgcctacggcgcgcccagcaccaacgtgaccctggaggcgctgctgagcaccaaggtggcggtggcgcagttctcgcagggcgcgcgcgcggcaggcggctcgggagcaggtggaggcgtggcagctgcagccgtgcccctgatcctggaacagctcatggccctgcagcagcagcagatccaccagctgcagctcatcgagcagatccgcagccaggtggccctcatgcagcgcccgccgccgcggccctcactcagccccgcggccgccccgagcgcaccgggcccggcccccagccagctgcccgggctggccgcgctcccgctgtcggccggggcccctgccgccgccatcgcgggctcgggccccgccgccccggccgccttcgagggcgcgcagccgctgtcccggcccgagtctggcgccagcacccccggcggccctgcggagcccagcgcgcccgccgcccccagcgccgcccctgcccccgctgcccccgccccggcgccagcgccgcagagcgcagcctcgtcgcagccgcagagcgcatccacgccgcctgccctggccccggggtccctgctgggtgcggcgcccggcctgccaagtccgcttctacctcagacttccgccagcggcgtcatcttccccaacccgctggtcagcatcgcggccacggccaacgctctggacccgctgtccgcgctcatgaagcaccgcaagggcaagccgcccaatgtgtcggtgttcgagcccaaagccagcgccgaggacccgttcttcaagcacaaatgccgcttctgcgccaaggtcttcggcagcgacagcgcgctccagatccacctgcgctcgcacacaggcgagcggcccttcaagtgcaacatctgcgggaaccgcttctccaccaaaggcaacctgaaggtgcacttccagaggcacaaggagaagtacccccacatccagatgaacccttacccggtccccgagtacctggacaacgtgcccacctgctcgggcatcccctacggcatgtcgctgccccccgagaagcccgtgaccacctggctggacagcaagcccgtgctgcccaccgtgcccacgtccgtggggctgcaactgccgcccactgtccctggcgcgcacggctacgccgactctcccagcgccaccccagccagccgctccccgcagaggccctcgcccgcctccagcgagtgcgcctccttgtccccaggcctcaaccacgtggagtccggcgtgtcggccaccgccgagtccccacagtcgctcctcggcgggccgcccctcactaaagccgagcccgtcagcctgccctgcaccaacgccagggccggggacgctcccgtgggcgcgcaggctagcgctgcacccacatcggtggacggcgcacccacgagcctcggcagccccgggctgcccgccgtctccgagcagttcaaggcccagtttccgttcggggggctgctagactcgatgcaaacgtcggaaacctcgaagctgcagcagctggtggagaacatcgacaagaagatgacggacccgaaccagtgcgtcatctgccaccgggtgctgagctgccagagcgcgctgaagatgcactaccggacgcacacgggggagcggccgttcaagtgcaagatctgcggccgcgccttcaccaccaagggcaacctcaagacgcacttcggcgtgcaccgtgcaaagccgcccctgcgcgtgcagcactcctgccccatctgccagaagaagttcaccaacgccgtggtcctgcagcagcacatccgcatgcacatgggcggccagatccccaacacgccgctgccggagggcttccaggatgccatggactccgagctggcctacgacgacaagaacgcggagaccctgagcagctacgatgacgacatggacgagaactccatggaggacgacgctgagctgaaggacgcggccaccgacccggccaagccactcctgtcctacgcggggtcctgcccgccctccccgccctcggtcatctccagcattgccgccctggagaaccagatgaagatgatcgactcggtcatgagctgccagcagctgaccggcctcaagtccgtggagaacgggtccggggagagtgaccgcctgagcaacgactcctcgtcggccgtgggcgacctggagagccgcagcgcgggcagccccgccctgtccgagtcctcgtcctcgcaggccctgtcgccggcccccagcaatggtgagagcttccgctccaagtccccgggcctgggcgccccggaggagccccaggaaatcccgctcaagaccgagaggccggacagcccagccgccgccccgggcagcggaggcgcccctggccgcgcgggcatcaaggaggaggcgcccttcagcctgctgttcctgagcagggagcggggtaagtgtcccagcactgtgtgtggtgtctgtggcaagccttttgcttgcaagagcgcgttggaaatccactaccgcagccatactaaggagcggccattcgtctgcgcgctctgcaggcgagggtgctccactatgggtaatttaaaacagcacttactgacacacagattgaaagagctgccttctcagttatttgaccccaactttgctctaggtcccagccaaagcactcctagcctgatctccagcgccgcacccaccatgatcaaaatggaagtgaacggtcacggcaaggccatggcgctgggcgagggtcccccgctgcccgcgggcgtccaggtccccgccgggcctcagacagtgatgggcccgggcctggcgcccatgctggcccccccaccgcgccggacgcccaagcagcacaactgccagtcgtgcgggaagaccttctcctcggccagcgccctgcagatccatgagcgcacgcacaccggcgagaagccgttcggctgcaccatctgcggccgggccttcaccactaagggcaacctcaaggtgcacatggggacacacatgtggaataacgcccccgcgagacgcggccgccgcctgtctgtggagaaccccatggctctcctagggggtgatgccctgaagttctctgaaatgttccagaaggacctggcagctcgggcaatgaacgtcgaccccagtttttggaaccagtatgctgcagccatcactaacgggctcgccatgaagaacaacgagatctccgtcatccagaacggcggcatcccccagctccccgtgagtcttgggggcagcgccctcccccctctgggcagcatggccagtgggatggacaaagcacgcactggcagtagcccacccatcgtcagcttggacaaagcgagctcagaaacagcagccagccgcccattcacgcggtttatcgaggataacaaggagattggtatcaactagccagtgactcgctcatctgccctgcccaggcccacgttttgaagttggagcatcaggcctccgacctttcttgcctcggttctcattacactttcacccatagcagaaaacactttgtgcggctgccgagaggtggtcttgtaagcgctgcatggcgctcccttcaacagcaagcctgactgttctcgagaactctgcaatcttttaaataagcttccttcaaaaaaaaaagtgcttggaaaaccgccttaggaacagaaagagctcagaccatgtccacttcctttctcctgaaacctaataatctctccgagggagaaaggggttctctgcggtattccagtgaaactcatttgatggtttcttttgaattagttagacacttgaacggtgttttttagaactcttcatgttaaagacgtggtttagtactcccaatgctgtgtatcatgacactatcttcgtctgtagtatttatgatgttaagataatgcgggtaacagacaatataatagccccgaccttaaacgaagcttttgtactgcagaatacatctggctgtgtgatttttttttttaagcaagatttgttttactataaataagtggattatttcaatgcaggcaaaattgtgaagttctgttgggaaagatagcatgcttttcgtgtgcaagtacctgtcagtaataagccttttttttttttttttttaatttaaatgtttgtagctgctatgtggacagttgttttctagtgtggtctgtagcccaataactggggaacgagttacagacaaacatcaccgtaaatgactcacaacattataaacagttgtgagaaaatatttcacattatcaaagctgtac

SEQ ID NO: 17 - DNA, 446 bp, Artificial
  cDNA Sequence
gggcctggacggccggcgtctccttctccaggtaatcagggcccctctacgtggcctcccggggcccctctggggaggcagcctggcatctcacaggcggccggggctcccgggaagcagagacgggctgtgccagggctcctaggcccaggcctggacccagtgccgtgccagccaccaccccaggggccctgccctggttcgcagggagacacacagaaatgtgggaggccgggtggcctgcacgagcccctcccggaggcccccagcccagcacatccagagccctcccctgagaaaccccagacagccaggttcgccccaaacccaacatggtgggaccccagctcgccccccatctcacggccgccccatcccacggccgccccatcccacggccgccccatcccacggccgccccatcctctggccctggatgttaccac

SEQ ID NO: 18 - DNA, 8142 bp, Artificial
  cDNA Sequence
gcctggaaactacaaaggattgtgttaattttgtgtttaggaagaaagaggtaatgggtaggaatcaatgtaaacttattcataggccacaccaaaccaggaattcttgtcgtgattgcacttggtagagttaacacacgtgcacattacggaaacgttggtgaccaacaggcgtttcagcgagctttcgcacacctcatgggcctttgtgggctgctggagagatgttggctgcaccatgacccagatggagttttaacattgaatgcggagaacactaattatgcctatcaagttccaaacttccataaatgtgaaatctgtctactatcttttccaaaagaatcccagtttcaacgccacatgagggatcacgagcgaaatgacaagccacatcgatgtgaccagtgcccccaaacatttaatgttgaattcaacctgacacttcataaatgcacccacagcggggaagatcctacctgccctgtgtgtaacaagaaattctccagagtggctagtctcaaagcgcatattatgctacatgaaaaggaagagaatctcatctgttctgagtgtggggatgagtttactctgcagagtcagctggccgtgcacatggaggagcaccgccaggagctggctggaacccggcagcatgcctgcaaggcctgcaagaaagagttcgagacctcctcggagctgaaggaacacatgaagactcattacaaaattagggtatcaagtacaaggtcttataaccggaatatcgacagaagtggattcacgtattcgtgtccgcactgtggaaagacgtttcaaaagccaagccagttaacgcgacacattaggatacacacaggtgaaaggccgttcaaatgtagtgaatgtggaaaggcttttaaccagaagggggcactgcagacccacatgatcaagcacacaggtgaaaaaccccatgcctgtgccttctgtcctgccgccttctctcagaaagggaatcttcagtcgcacgtgcagcgagtccactcagaggtcaagaatggtcctacctataactgtacagaatgtagttgtgtatttaaaagtttaggcagcttaaacacgcatatcagcaagatgcatatgggtgggccacagaattcaacaagttctacagagactgctcatgttttaacggccacactttttcagacgttacctcttcaacagacggaagcccaagccacgtcggcctcaagccagccgagctcccaggcggtgagcgacgtcatccagcagctcctggagctctcagagccggcgccggtggagtcggggcagtccccgcagcctgggcagcagctgagcatcacagtgggcatcaaccaggacattttacagcaagccttagaaaacagtgggctgtcttcaattccagctgcagcacatcctaatgactcctgccatgccaagacctctgcaccacacgctcaaaacccagatgtttccagcgtttcaaatgagcagacggaccccacagacgcagagcaagaaaaagaacaggaaagcccggagaaactggataaaaaagaaaaaaaaatgataaagaagaagtcaccgtttctacctggctccatccgcgaggagaacggcgtgcgctggcatgtgtgtccctactgcgccaaggagttccgcaagcccagcgacctggtccgccacatccgcatccacacccacgagaagcccttcaagtgcccgcagtgcttccgcgccttcgccgtgaagagcacgctgacagcgcacatcaagacgcacaccggcatcaaggcgttcaagtgccagtactgcatgaagagcttctccacctctggcagcctcaaggtgcacattcgcctgcacacaggagttagaccttttgcttgtcctcactgtgacaaaaaatttcgaacctcaggccataggaagactcacattgcttcccactttaaacatacggaattaaggaaaatgaggcaccagcgtaaacctgcaaaggtccgtgttggcaagacgaatattccagtccctgatattcctttgcaggaaccaatcctcataactgacttaggtctcatccagcccattccaaaaaaccagtttttccaaagctatttcaataataattttgtcaatgaagcagatagaccatacaagtgtttttactgtcatcgtgcatataaaaaatcttgccaccttaaacaacacatcagatcccatacaggtgaaaaaccttttaaatgttctcagtgtggaagaggctttgtttctgcaggcgtgctcaaagcacacatcagaacacacacaggactgaaatctttcaagtgtctgatatgtaatggggctttcactactggtggcagcttacggcgacacatgggtatccacaacgaccttcgtccctatatgtgtccctattgccaaaaaacatttaagacttcactaaattgcaaaaagcacatgaaaacccacagatatgagcttgcccagcagctccaacagcatcagcaggcagcctcgatagatgacagcactgtagaccagcagagcatgcaggcctccactcaaatgcaggtggagatcgagagcgacgagctgccgcagacggcagaggtggtcgcagcgaaccccgaggccatgctggacctggagcctcagcatgtggtgggcacggaggaagcagggctgggccagcagttggcagatcagcccctggaagcagatgaagatgggtttgtggctccacaggaccctctgcgagggcacgtagaccagtttgaagagcagagccctgcgcaacagtccttcgaaccagcagggctaccccaaggttttacagtgactgatacgtaccatcagcagcctcagtttccacctgtccaacagctacaggattccagcacacttgagtctcaggccctctccacaagcttccaccagcagagcttgctgcaggctcccagctctgatgggatgaatgtaacaactcgcttgattcaggagtcatcccaagaggaactggacctgcaggcacaaggttcccagtttctggaggacaacgaggaccagagcaggcgctcttacaggtgtgactattgcaacaaaggctttaagaagtccagccacctgaagcagcatgtgcggtcgcacaccggggaaaagccctacaagtgcaagctctgtggacgcggctttgtttcctctggggtcctcaagtcccacgagaagacacacacaggagtgaaggcgttcagctgcagtgtgtgcaatgcttccttcaccaccaatggcagcctcacccggcacatggccacacatatgagcatgaagccttataagtgtccgttttgtgaggagggtttccgaactacagtgcattgtaaaaagcacatgaagagacaccaaacagtcccctctgctgtgtcagccactggagagacagaaggaggagacatttgtatggaggaagaggaagaacattctgacagaaatgcatcacggaagtctcgtcctgaggtcatcactttcacggaggaggagacagcccagttagccaagatccggccgcaggagagcgccacggtgtcagagaaggtcctggtgcagtccgcggcagaaaaggaccgcatcagtgagctgagggacaagcaggcggagctgcaggacgagcccaagcacgccaactgctgcacatactgccccaagagcttcaagaaacctagcgacctggtgaggcatgttcgaatccatactggagaaaagccatacaaatgtgatgaatgtggaaagagttttactgtgaaatccactctcgattgtcatgtgaagactcacacaggtcagaagctcttcagctgtcacgtctgcagcaacgccttctccacgaagggaagtctgaaggtccacatgcgcctgcacacgggagccaagcccttcaaatgcccgcattgcgagctgcgtttccgtacctcgggtagaagaaagacacacatgcagtttcattataaaccagacccaaagaaggccagaaagcctatgactcgaagctcatcggaaggactgcagcctgtaaacctcctcaactcctcctctactgacccaaacgtgtttatcatgaacaactctgttctaacaggacagtttgatcagaatctgctgcaaccaggactggtgggccaagctattctccctgcctctgtgtcagctgggggtgacctgaccgtgtctctgacagatgggagcctggctaccctagaaggcatccagttacagttggctgctaacttggttggaccaaatgtacagatttctggaatcgatgctgccagcattaataacattacgttgcagattgatccaagcattctgcagcagacgctacagcagggcaacctattggctcagcagctcacgggggagcctggcctggccccacagaacagctctctccagacatcggacagcacggtccctgccagtgttgtcatccagcccatctcaggcctgtccttacagcccacagtgacctctgcgaacctgaccataggcccgctgtctgagcaggattcagtgctgaccactaacagcagtgggacccaagacctcactcaagtgatgacttcgcaaggtctagtgtccccctccggcggtccccacgagatcaccctgaccattaacaactccagcctgagccaggtcctggcacaggccgctgggcccactgccacgtcttcctcggggtctccacaggaaattaccctgactatctccgaacttaacactacaagcggaagccttccttcaacaacaccgatgtctccatcggccatctcgactcagaacctggtcatgtcctcgtcgggcgtgggaggtgacgctagtgtcacgctgacgctggccgatactcagggtatgctatctggaggcctggacactgtcacactcaacatcacctctcaggcaatactaatcttttgccagggtcagcagttcccagcgctcctcacggatccctctctctcgggccagggtggagcaggctcgccgcaagtcatactagtgagccacacgccacagtcagcgtctgctgcttgtgaagaaatagcctaccaggtagctggcgtctctgggaacctggccccgggcaaccagccagagaaggagggccgggcgcaccagtgcctggagtgtgaccgcgccttctcatcggcggcggtgctcatgcaccacagcaaggaggtgcatggccgggagcgcatccacggctgccccgtgtgcaggaaggccttcaagcgcgccacgcacctcaaggagcacatgcagacacaccaggccggcccctctttgagctcccagaagccaagagtgtttaaatgtgacacttgtgagaaggcatttgccaaaccaagccagctggagcgccacagccgcatacatacaggggagcggccgttccattgcacgctttgtgagaaagccttcaaccagaagagtgcgctgcaggtgcacatgaagaagcacacgggggagcggccctacaagtgtgcctactgcgtcatgggcttcacgcagaagagcaacatgaagctgcacatgaagcgggcgcacagctatgctggagctctgcaggagtctgcaggtcacccggagcaggacggggaggagctgagccggaccctccacctggaggaggtggtgcaggaggccgccggcgagtggcaggccctcacccacgtcttctgatgcgagttggaagtacacctttaagaatgtttctgaagttacgttttgtgaagagcaaagcacttggaatctccgttttaaagcttcaagtgttaaaaatgctacaatagttttttatctataaaattatctaaagaatcattgtctttcagagactcataggaaaaaaaaactaggaaaagtgtcaccgcattgttctcttttgtctacaaatcactgaactcaggtactactgtaggcagtttcctcctcagtctcctccgtggctagtgtgtctagttcacgaagcaattaactgggtcttactatcattgtagtgtgatttctttgtattagcaaagacaaaaacgctaacattgaaaaagtatgtcagattttccttcatgtttctggttataagaagcatagcttacaaagcaagcgtaagattgaggcatgaagttcagaaaaaaaagtgttacaacacacagggaagttttttccactcttttctctgtgcattttgaaaattagtcaaaatggactcttttcagtctaccataagttaatataactgataccttgagagatggctggaccaattctctccatgacaaatgtttaatcattagttacaagaatgcagtatctggggcgtcaacatggggactcgagtaaacctgacccaccaataaggattcagctgtccacacgggctggcgacacacttaccgcatcaatctgtgttcaggtccagggttacataattgcagaagcacaagccatacatcgcaggtaggaaaccacagaaccgtctgcaaggagcaagcaacggtggccctgtccaccccagcaaataagaagcatatctgtagcttaaggccacgaatccgtaaaaaccccatgactttctcttcgtgcataaacagatgtatttttgatttcagggaattctttagtatcgtcaatggtgccacataaaacatgtcccaaaccaaatcccacccgtgctgggcagagtgcgtgcacgccattcctacagcattccaaagatggaaggttctttacttcatgttaatttttcctttgaaattatttatatgttctatatataaatacatatgtacatagatatatgggcctctgtgtggctgaacagtatattttgtaaatataagtactagtcctaattgcagaaagagcgtcagtttcacctccccacgagcacttcagatcagtattgtattcattttattcataaatggatatctttttcattgtcatataaagctgggttttatttttttttcctgaaaaataattgcctttattttctctcgttgcctccttggtttcagaagagagtagttttattataaatattgtatggactttgtatattaagagaggagctcatttcagattcctaaagaaatagacattttactgttattttgaaagggcatcttttgatttttttgttgttgttgttcacttttggcatatgtatataagtaatattgacggtgatatgaaaacttttgttatgtgaagatatttaagtcagaaaattgttaaataatattacttcttttccaaactgctttgtgtattgtatatttttttaagaaaaagaaaagccttatttgacttatgcttgtgatactggacttcttaccaatccggaggtttccttccttgaatgtcagtgtgtaaacctggctgtagccgcatatgcagaataactgtaattgtgctagagttttaaaggttctgcttttaatgcactttttattttataattttgtattgaaatattttagaaatgttgattaattttggtgaaaaaatatccccaaagtggaaattattggaattttaaacttttgttcttgctgggttatttattttgattttagcattaaatgtcatctcaggacatctctaaaaggggttgtttaattcctaattgtatagaaagctagtttggtgaattgtattggttaattgactgtttaaggccttaacaggtgaatctagagcctacttttattttggttaaagaaaaagaaaatatcaataattcaattttgtgtcttttctcaatttattagcaaacacaagacattttatgtattatttcgatttacttcctaattataaaagctgcttttttgcagaacattccttgaaaatataaggttttgaaaagacataattttacttgaatctttgtggggtacaggttgatctttatattttactggttgttttaaaaattctagaaaagagatttctaggcctcatgtataaccagggttttgaggataaagaactgtatttttagaactatctcatcatagcatatctgctttggaataactataaataaaagatgaagttagg

SEQ ID NO: 19 - DNA, 8205 bp, Artificial
  cDNA Sequence
gcctggaaactacaaaggattgtgttaattttgtgtttaggaagaaagaggtaatgggtaggaatcaatgtaaacttattcataggccacaccaaaccaggaattcttgtcgtgattgcacttggtagagttaacacacgtgcacattacggaaacgttggtgaccaacaggcgtttcagcgagctttcgcacacctcatgggcctttgtgggctgctggagagatgttggctgcaccatgacccagatggagttttaacattgaatgcggagaacactaattatgcctatcaagttccaaacttccataaatgtgaaatctgtctactatcttttccaaaagaatcccagtttcaacgccacatgagggatcacgagcgaaatgacaagccacatcgatgtgaccagtgcccccaaacatttaatgttgaattcaacctgacacttcataaatgcacccacagcggggaagatcctacctgccctgtgtgtaacaagaaattctccagagtggctagtctcaaagcgcatattatgctacatgaaaaggaagagaatctcatctgttctgagtgtggggatgagtttactctgcagagtcagctggccgtgcacatggaggagcaccgccaggagctggctggaacccggcagcatgcctgcaaggcctgcaagaaagagttcgagacctcctcggagctgaaggaacacatgaagactcattacaaaattagggtatcaagtacaaggtcttataaccggaatatcgacagaagtggattcacgtattcgtgtccgcactgtggaaagacgtttcaaaagccaagccagttaacgcgacacattaggatacacacaggtgaaaggccgttcaaatgtagtgaatgtggaaaggcttttaaccagaagggggcactgcagacccacatgatcaagcacacaggtgaaaaaccccatgcctgtgccttctgtcctgccgccttctctcagaaagggaatcttcagtcgcacgtgcagcgagtccactcagaggtcaagaatggtcctacctataactgtacagaatgtagttgtgtatttaaaagtttaggcagcttaaacacgcatatcagcaagatgcatatgggtgggccacagaattcaacaagttctacagagactgctcatgttttaacggccacactttttcagacgttacctcttcaacagacggaagcccaagccacgtcggcctcaagccagccgagctcccaggcggtgagcgacgtcatccagcagctcctggagctctcagagccggcgccggtggagtcggggcagtccccgcagcctgggcagcagctgagcatcacagtgggcatcaaccaggacattttacagcaagccttagaaaacagtgggctgtcttcaattccagctgcagcacatcctaatgactcctgccatgccaagacctctgcaccacacgctcaaaacccagatgtttccagcgtttcaaatgagcagacggaccccacagacgcagagcaagaaaaagaacaggaaagcccggagaaactggataaaaaagaaaaaaaaatgataaagaagaagtcaccgtttctacctggctccatccgcgaggagaacggcgtgcgctggcatgtgtgtccctactgcgccaaggagttccgcaagcccagcgacctggtccgccacatccgcatccacacccacgagaagcccttcaagtgcccgcagtgcttccgcgccttcgccgtgaagagcacgctgacagcgcacatcaagacgcacaccggcatcaaggcgttcaagtgccagtactgcatgaagagcttctccacctctggcagcctcaaggtgcacattcgcctgcacacaggagttagaccttttgcttgtcctcactgtgacaaaaaatttcgaacctcaggccataggaagactcacattgcttcccactttaaacatacggaattaaggaaaatgaggcaccagcgtaaacctgcaaaggtccgtgttggcaagacgaatattccagtccctgatattcctttgcaggaaccaatcctcataactgacttaggtctcatccagcccattccaaaaaaccagtttttccaaagctatttcaataataattttgtcaatgaagcagatagaccatacaagtgtttttactgtcatcgtgcatataaaaaatcttgccaccttaaacaacacatcagatcccatacaggtgaaaaaccttttaaatgttctcagtgtggaagaggctttgtttctgcaggcgtgctcaaagcacacatcagaacacacacaggactgaaatctttcaagtgtctgatatgtaatggggctttcactactggtggcagcttacggcgacacatgggtatccacaacgaccttcgtccctatatgtgtccctattgccaaaaaacatttaagacttcactaaattgcaaaaagcacatgaaaacccacagatatgagcttgcccagcagctccaacagcatcagcaggcagcctcgatagatgacagcactgtagaccagcagagcatgcaggcctccactcaaatgcaggtggagatcgagagcgacgagctgccgcagacggcagaggtggtcgcagcgaaccccgaggccatgctggacctggagcctcagcatgtggtgggcacggaggaagcagggctgggccagcagttggcagatcagcccctggaagcagatgaagatgggtttgtggctccacaggaccctctgcgagggcacgtagaccagtttgaagagcagagccctgcgcaacagtccttcgaaccagcagggctaccccaaggttttacagtgactgatacgtaccatcagcagcctcagtttccacctgtccaacagctacaggattccagcacacttgagtctcaggccctctccacaagcttccaccagcagagcttgctgcaggctcccagctctgatgggatgaatgtaacaactcgcttgattcaggagtcatcccaagaggaactggacctgcaggcacaaggttcccagtttctggaggacaacgaggaccagagcaggcgctcttacaggtgtgactattgcaacaaaggctttaagaagtccagccacctgaagcagcatgtgcggtcgcacaccggggaaaagccctacaagtgcaagctctgtggacgcggctttgtttcctctggggtcctcaagtcccacgagaagacacacacaggagtgaaggcgttcagctgcagtgtgtgcaatgcttccttcaccaccaatggcagcctcacccggcacatggccacacatatgagcatgaagccttataagtgtccgttttgtgaggagggtttccgaactacagtgcattgtaaaaagcacatgaagagacaccaaacagtcccctctgctgtgtcagccactggagagacagaaggaggagacatttgtatggaggaagaggaagaacattctgacagaaatgcatcacggaagtctcgtcctgaggtcatcactttcacggaggaggagacagcccagttagccaagatccggccgcaggagagcgccacggtgtcagagaaggtcctggtgcagtccgcggcagaaaaggaccgcatcagtgagctgagggacaagcaggcggagctgcaggacgagcccaagcacgccaactgctgcacatactgccccaagagcttcaagaaacctagcgacctggtgaggcatgttcgaatccatactggagaaaagccatacaaatgtgatgaatgtggaaagagttttactgtgaaatccactctcgattgtcatgtgaagactcacacaggtcagaagctcttcagctgtcacgtctgcagcaacgccttctccacgaagggaagtctgaaggtccacatgcgcctgcacacgggagccaagcccttcaaatgcccgcattgcgagctgcgtttccgtacctcgggtagaagaaagacacacatgcagtttcattataaaccagacccaaagaaggccagaaagcctatgactcgaagctcatcggaaggactgcagcctgtaaacctcctcaactcctcctctactgacccaaacgtgtttatcatgaacaactctgttctaacaggacagtttgatcagaatctgctgcaaccaggactggtgggccaagctattctccctgcctctgtgtcagctgggggtgacctgaccgtgtctctgacagatgggagcctggctaccctagaaggcatccagttacagttggctgctaacttggttggaccaaatgtacagatttctggaatcgatgctgccagcattaataacattacgttgcagattgatccaagcattctgcagcagacgctacagcagggcaacctattggctcagcagctcacgggggagcctggcctggccccacagaacagctctctccagacatcggacagcacggtccctgccagtgttgtcatccagcccatctcaggcctgtccttacagcccacagtgacctctgcgaacctgaccataggcccgctgtctgagcaggattcagtgctgaccactaacagcagtgggacccaagacctcactcaagtgatgacttcgcaaggtctagtgtccccctccggcggtccccacgagatcaccctgaccattaacaactccagcctgagccaggtcctggcacaggccgctgggcccactgccacgtcttcctcggggtctccacaggaaattaccctgactatctccgaggttccaggtctgtgcagcacagtgtgggaccccaggagtgtggatctgtggaggcattgtatttggagaactccagcgacaaaacttaacactacaagcggaagccttccttcaacaacaccgatgtctccatcggccatctcgactcagaacctggtcatgtcctcgtcgggcgtgggaggtgacgctagtgtcacgctgacgctggccgatactcagggtatgctatctggaggcctggacactgtcacactcaacatcacctctcagggtcagcagttcccagcgctcctcacggatccctctctctcgggccagggtggagcaggctcgccgcaagtcatactagtgagccacacgccacagtcagcgtctgctgcttgtgaagaaatagcctaccaggtagctggcgtctctgggaacctggccccgggcaaccagccagagaaggagggccgggcgcaccagtgcctggagtgtgaccgcgccttctcatcggcggcggtgctcatgcaccacagcaaggaggtgcatggccgggagcgcatccacggctgccccgtgtgcaggaaggccttcaagcgcgccacgcacctcaaggagcacatgcagacacaccaggccggcccctctttgagctcccagaagccaagagtgtttaaatgtgacacttgtgagaaggcatttgccaaaccaagccagctggagcgccacagccgcatacatacaggggagcggccgttccattgcacgctttgtgagaaagccttcaaccagaagagtgcgctgcaggtgcacatgaagaagcacacgggggagcggccctacaagtgtgcctactgcgtcatgggcttcacgcagaagagcaacatgaagctgcacatgaagcgggcgcacagctatgctggagctctgcaggagtctgcaggtcacccggagcaggacggggaggagctgagccggaccctccacctggaggaggtggtgcaggaggccgccggcgagtggcaggccctcacccacgtcttctgatgcgagttggaagtacacctttaagaatgtttctgaagttacgttttgtgaagagcaaagcacttggaatctccgttttaaagcttcaagtgttaaaaatgctacaatagttttttatctataaaattatctaaagaatcattgtctttcagagactcataggaaaaaaaaactaggaaaagtgtcaccgcattgttctcttttgtctacaaatcactgaactcaggtactactgtaggcagtttcctcctcagtctcctccgtggctagtgtgtctagttcacgaagcaattaactgggtcttactatcattgtagtgtgatttctttgtattagcaaagacaaaaacgctaacattgaaaaagtatgtcagattttccttcatgtttctggttataagaagcatagcttacaaagcaagcgtaagattgaggcatgaagttcagaaaaaaaagtgttacaacacacagggaagttttttccactcttttctctgtgcattttgaaaattagtcaaaatggactcttttcagtctaccataagttaatataactgataccttgagagatggctggaccaattctctccatgacaaatgtttaatcattagttacaagaatgcagtatctggggcgtcaacatggggactcgagtaaacctgacccaccaataaggattcagctgtccacacgggctggcgacacacttaccgcatcaatctgtgttcaggtccagggttacataattgcagaagcacaagccatacatcgcaggtaggaaaccacagaaccgtctgcaaggagcaagcaacggtggccctgtccaccccagcaaataagaagcatatctgtagcttaaggccacgaatccgtaaaaaccccatgactttctcttcgtgcataaacagatgtatttttgatttcagggaattctttagtatcgtcaatggtgccacataaaacatgtcccaaaccaaatcccacccgtgctgggcagagtgcgtgcacgccattcctacagcattccaaagatggaaggttctttacttcatgttaatttttcctttgaaattatttatatgttctatatataaatacatatgtacatagatatatgggcctctgtgtggctgaacagtatattttgtaaatataagtactagtcctaattgcagaaagagcgtcagtttcacctccccacgagcacttcagatcagtattgtattcattttattcataaatggatatctttttcattgtcatataaagctgggttttatttttttttcctgaaaaataattgcctttattttctctcgttgcctccttggtttcagaagagagtagttttattataaatattgtatggactttgtatattaagagaggagctcatttcagattcctaaagaaatagacattttactgttattttgaaagggcatcttttgatttttttgttgttgttgttcacttttggcatatgtatataagtaatattgacggtgatatgaaaacttttgttatgtgaagatatttaagtcagaaaattgttaaataatattacttcttttccaaactgctttgtgtattgtatatttttttaagaaaaagaaaagccttatttgacttatgcttgtgatactggacttcttaccaatccggaggtttccttccttgaatgtcagtgtgtaaacctggctgtagccgcatatgcagaataactgtaattgtgctagagttttaaaggttctgcttttaatgcactttttattttataattttgtattgaaatattttagaaatgttgattaattttggtgaaaaaatatccccaaagtggaaattattggaattttaaacttttgttcttgctgggttatttattttgattttagcattaaatgtcatctcaggacatctctaaaaggggttgtttaattcctaattgtatagaaagctagtttggtgaattgtattggttaattgactgtttaaggccttaacaggtgaatctagagcctacttttattttggttaaagaaaaagaaaatatcaataattcaattttgtgtcttttctcaatttattagcaaacacaagacattttatgtattatttcgatttacttcctaattataaaagctgcttttttgcagaacattccttgaaaatataaggttttgaaaagacataattttacttgaatctttgtggggtacaggttgatctttatattttactggttgttttaaaaattctagaaaagagatttctaggcctcatgtataaccagggttttgaggataaagaactgtatttttagaactatctcatcatagcatatctgctttggaataactataaataaaagatgaagttagg

SEQ ID NO: 20 - DNA, 665 bp, Artificial
  cDNA Sequence
caccaccatcatctccaggtgcatgggagaaccctctccaagagaaccctaccccaggagaacccccccaggagaagccccctccaggagaagccccccaggagaagccccctccaggagaacccccccaggagaagccccctccaggagaacccccccgggagaagccccctccaggagaacccccccgggagaagccccctccaggagaacccccccgggagaagccccctccaggagaacccccccgggagaagccccctccaggagaacccccccgggagaagccccctccaggagaacccccctgggagactcccccccaggagaccccccccgggagactccccccccaggagaccccccctccaggagaaccctcccaggagactcccccccaggagaaccctcccaggagactcccccccaggagatacctcccaggagactcccccccaggagaacccccccaggagactctcccccaggagactccctcctccagaaccccccaggagactcccccccaggagactccccctccaggagactcccccccaggagaacctccccaggagactccccctccaggacccccccctccaggagactcccccccccaggagactccccccccaggagaacccccaacatccacaagcccc

SEQ ID NO: 21 - DNA, 2150 bp, Artificial
  cDNA Sequence
agaccatccaagaagacagtgcagccacctccgagagcctggatgtgatggcgtcacagaagagaccctcccagaggcacggatccaagtacctggccacagcaagtaccatggaccatgccaggcatggcttcctcccaaggcacagagacacgggcatccttgactccatcgggcgcttctttggcggtgacaggggtgcgcccaagcggggctctggcaaggactcacaccacccggcaagaactgctcactacggctccctgccccagaagtcacacggccggacccaagatgaaaaccccgtagtccacttcttcaagaacattgtgacgcctcgcacaccacccccgtcgcagggaaaggggagaggactgtccctgagcagatttagctggggggccgaaggccagagaccaggatttggctacggaggcagagcgtccgactataaatcggctcacaagggattcaagggagtcgatgcccagggcacgctttccaaaatttttaagctgggaggaagagatagtcgctctggatcacccatggctagacgctgaaaacccacctggttccggaatcctgtcctcagcttcttaatataactgccttaaaactttaatcccacttgcccctgttacctaattagagcagatgacccctcccctaatgcctgcggagttgtgcacgtagtagggtcaggccacggcagcctaccggcaatttccggccaacagttaaatgagaacatgaaaacagaaaacggttaaaactgtccctttctgtgtgaagatcacgttccttcccccgcaatgtgcccccagacgcacgtgggtcttcagggggccaggtgcacagacgtccctccacgttcacccctccacccttggactttcttttcgccgtggctgcggcacccttgcgcttttgctggtcactgccatggaggcacacagctgcagagacagagaggacgtgggcggcagagaggactgttgacatccaagcttcctttgtttttttttcctgtccttctctcacctcctaaagtagacttcatttttcctaacaggattagacagtcaaggagtggcttactacatgtgggagcttttggtatgtgacatgcgggctgggcagctgttagagtccaacgtggggcagcacagagagggggccacctccccaggccgtggctgcccacacaccccaattagctgaattcgcgtgtggcagagggaggaaaaggaggcaaacgtgggctgggcaatggcctcacataggaaacagggtcttcctggagatttggtgatggagatgtcaagcaggtggcctctggacgtcaccgttgccctgcatggtggccccagagcagcctctatgaacaacctcgtttccaaaccacagcccacagccggagagtccaggaagacttgcgcactcagagcagaagggtaggagtcctctagacagcctcgcagccgcgccagtcgcccatagacactggctgtgaccgggcgtgctggcagcggcagtgcacagtggccagcactaaccctccctgagaagataaccggctcattcacttcctcccagaagacgcgtggtagcgagtaggcacaggcgtgcacctgctcccgaattactcaccgagacacacgggctgagcagacggccccgtggatggagacaaagagctcttctgaccatatccttcttaacacccgctggcatctcctttcgcgcctccctccctaacctactgacccaccttttgattttagcgcacctgtgattgataggccttccaaagagtcccacgctggcatcaccctccccgaggacggagatgaggagtagtcagcgtgatgccaaaacgcgtcttcttaatccaattctaattctgaatgtttcgtgtgggcttaataccatgtctattaatatatagcctcgatgatgagagagttacaaagaacaaaactccagacacaaacctccaaatttttcagcagaagcactctgcgtcgctgagctgaggtcggctctgcgatccatacgtggccgcacccacacagcacgtgctgtgacgatggctgaacggaaagtgtacactgttcctgaatattgaaataaaacaataaactttt

SEQ ID NO: 22 - DNA, 1231 bp, Artificial
  cDNA Sequence
cctggatgtgatggcgtcacagaagagaccctcccagaggcacggatccaagtacctggccacagcaagtaccatggaccatgccaggcatggcttcctcccaaggcacagagacacgggcatccttgactccatcgggcgcttctttggcggtgacaggggtgcgcccaagcggggctctggcaaggtaccctggctaaagccgggccggagccctctgccctctcatgcccgcagccagcctgggctgtgcaacatgtacaaggactcacaccacccggcaagaactgctcactacggctccctgccccagaagtcacacggccggacccaagatgaaaaccccgtagtccacttcttcaagaacattgtgacgcctcgcacaccacccccgtcgcagggaaagggggccgaaggccagagaccaggatttggctacggaggcagagcgtccgactataaatcggctcacaagggattcaagggagtcgatgcccagggcacgctttccaaaatttttaagctgggaggaagagatagtcgctctggatcacccatggctagacgctgaaaacccacctggttccggaatcctgtcctcagcttcttaatataactgccttaaaactttaatcccacttgcccctgttacctaattagagcagatgacccctcccctaatgcctgcggagttgtgcacgtagtagggtcaggccacggcagcctaccggcaatttccggccaacagttaaatgagaacatgaaaacagaaaacggttaaaactgtccctttctgtgtgaagatcacgttccttcccccgcaatgtgcccccagacgcacgtgggtcttcagggggccaggtgcacagacgtccctccacgttcacccctccacccttggactttcttttcgccgtggctgcggcacccttgcgcttttgctggtcactgccatggaggcacacagctgcagagacagagaggacgtgggcggcagagaggactgttgacatccaagcttcctttgtttttttttcctgtccttctctcacctcctaaagtagacttcatttttcctaacaggattagacagtcaaggagtggcttactacatgtgggagcttttggtatgtgacatgcgggctgggcagctgttagagtccaacgtggggcagcacagagagggggccacctccccaggccgtggctgcccacacaccccaattagctg

SEQ ID NO: 23 - DNA, 375 bp, Artificial
  cDNA Sequence
atgactcttaacgagcatgctgccttcaagcatctgtttaacaaagcacatcttgcaccgcccttaatccatttaaccctgagtggacacagcacatgtttcagagagcacagggttgggggtaaggtcaccgatcaacaggatcccaaggcagaagaatttttcttagtacagaacaaaatgaaaagtctcccatgtctacctctttctacacagacacggcaaccatccgatttctcaatcttttccccacctttcccccctttctattccacaaaaccgccattgtcatcatggcccgttctcaatgagctgttgggtacacctcccagacggggtggtggccgggcagaggggctcctcacttcccagtag

SEQ ID NO: 24 - DNA, 4639 bp, Artificial
  cDNA Sequence
gagccgccgggccggcggggaggcgggggaggtgttttccagctttaaaaaggcaggaggcagagcgcggccctgcgtcagagcgagactcagaggctccgaactcgccggcggagtcgccgcgccagatcccagcagcagggcgcgggcaccggggcgcgggcagggctcggagccaccgcgcaggtcctagggccgcggccgggccccgccacgcgcgcacacgcccctcgatgactttcctccggggcgcgcggcgctgagcccggggcgagggctgtcttcccggagacccgaccccggcagcgcggggcggccgcttctcctgtgcctccgcccgccgctccactccccgccgccgccgcgcggatgccaagcaccagctttccagtcccttccaagtttccacttggccctgcggctgcggtcttcgggagaggagaaactttggggcccgcgccgcgcgccggcggcaccatgaagtcagcggaggaagaacactatggctatgcatcctccaacgtcagccccgccctgccgctccccacggcgcactccaccctgccggccccgtgccacaaccttcagacctccacaccgggcatcatcccgccggcggatcacccctcggggtacggagcagctttggacggtgggcccgcgggctacttcctctcctccggccacaccaggcctgatggggcccctgccctggagagtcctcgcatcgagataacctcgtgcttgggcctgtaccacaacaataaccagtttttccacgatgtggaggtggaagacgtcctccctagctccaaacggtccccctccacggccacgctgagtctgcccagcctggaggcctacagagacccctcgtgcctgagcccggccagcagcctgtcctcccggagctgcaactcagaggcctcctcctacgagtccaactactcgtacccgtacgcgtccccccagacgtcgccatggcagtctccctgcgtgtctcccaagaccacggaccccgaggagggctttccccgcgggctgggggcctgcacactgctgggttccccgcggcactccccctccacctcgccccgcgccagcgtcactgaggagagctggctgggtgcccgctcctccagacccgcgtccccttgcaacaagaggaagtacagcctcaacggccggcagccgccctactcaccccaccactcgcccacgccgtccccgcacggctccccgcgggtcagcgtgaccgacgactcgtggttgggcaacaccacccagtacaccagctcggccatcgtggccgccatcaacgcgctgaccaccgacagcagcctggacctgggagatggcgtccctgtcaagtcccgcaagaccaccctggagcagccgccctcagtggcgctcaaggtggagcccgtcggggaggacctgggcagccccccgcccccggccgacttcgcgcccgaagactactcctctttccagcacatcaggaagggcggcttctgcgaccagtacctggcggtgccgcagcacccctaccagtgggcgaagcccaagcccctgtcccctacgtcctacatgagcccgaccctgcccgccctggactggcagctgccgtcccactcaggcccgtatgagcttcggattgaggtgcagcccaagtcccaccaccgagcccactacgagacggagggcagccggggggccgtgaaggcgtcggccggaggacaccccatcgtgcagctgcatggctacttggagaatgagccgctgatgctgcagcttttcattgggacggcggacgaccgcctgctgcgcccgcacgccttctaccaggtgcaccgcatcacagggaagaccgtgtccaccaccagccacgaggccatcctctccaacaccaaagtcctggagatcccactcctgccggagaacagcatgcgagccgtcattgactgtgccggaatcctgaaactcagaaactccgacattgaacttcggaaaggagagacggacatcgggaggaagaacacacgggtacggctggtgttccgcgttcacgtcccgcaacccagcggccgcacgctgtccctgcaggtggcctccaaccccatcgaatgctcccagcgctcagctcaggagctgcctctggtggagaagcagagcacggacagctatccggtcgtgggcgggaagaagatggtcctgtctggccacaacttcctgcaggactccaaggtcattttcgtggagaaagccccagatggccaccatgtctgggagatggaagcgaaaactgaccgggacctgtgcaagccgaattctctggtggttgagatcccgccatttcggaatcagaggataaccagccccgttcacgtcagtttctacgtctgcaacgggaagagaaagcgaagccagtaccagcgtttcacctaccttcccgccaacgttccaattataaaaacagaacccactgatgattatgagcctgctccaacctgtggaccggtgagccaggggttaagtcctctcccaagaccatactacagccagcagctcgcgatgccacccgaccccagctcctgcctcgtggccggcttcccgccctgtccgcagagaagcaccctgatgccagcggcccctggcgtgagccccaagctccacgacctttctcccgctgcctacaccaagggcgttgccagcccgggccactgtcacctcggactcccgcagccggccggagaggcccccgccgtccaggacgtgcccaggccagtggccacgcaccccggctcgcccgggcagccacccccggccctgctgccacagcagtaaatgaaataatacgaaatgacctctccagcacgagcacccactcctagttgccacattggagcactcagttcagcaggggtatgctgacttcagcagacaaagacttttgaataaataaactgaactcacacctggtaccactcagaacctccaactgactgaatgccaggagctgaacattaatatgtgcaaagattggctctccaacaagaaggaaagcagggaggaagggagaccactgtgtcacctggaggagaagtcatctcatgacaacagaagggaggtggccgggctgagcacgggagacccaccgtgcaggggcctttcatgggaacggcccacacgcagtttgaccccacgcccagcccttctggcacccctggggttcaatactggaagtgccttatttaaccagaccatcagggcatcatagaattgagcattgaatttgctactgtaggagtatttttaggagcagaaactgcaaacacatttcattgtgaggttttaccctctgtatgaatgaagagaacgctggaaggctgcgagaggactctagtatgagtctccaacatttggaacgtttcctgggctgtcacgtacactcctgctgccttacacagtgcattttagaatcttccagtctgtcatctcagctcttttgtaacatgcttcccttgtctgcgcggttgaaaccgtaggcttgttcatagtcgcatgctcgcatctttgtttttaatctggcttcgaacatagcacaagtaacttgaatagcacatcaataggttactggacaaaagcagaaaaacctgttacaggatagcctgcatttgcatgtgtgtacatatctaggcatctatttatgtataaataataacagagccgacgtgtcctcgcccaggagggcttccctgtcagcaataaccggcatccgttttggaacctgcgtctggggctccagtcgctgctcttgctggcgtccatcgccgcctcggacggccgtgcattttctcgtctcacgcagttcgaggaggaccctagaaagccaggagctgtgattgacagtagctgtaggttaccagacggcaacattagaaagtgattgtaaataacatgcaacctaagtgtaatatatttgttcagttataagatgattgtttcacagaagccttaccactctctgcttcatctaagaaaaccaataccaaaaacgccactttaatgctcagccctgcgttgtgtgttttcagatgagttactgttaacaggtaggtttgtgtaggccttgctgggcactctgtacaattagttgcttattacgtatgattactcacagcgatctattgttccatataaccaaaaagcatggtttattcattgaaacacggttgacctgaactcgtgccttaggaattaatgcccccttatggaacctgcctgaattgcacctgcgggtggaggctccggctgtgaagtcactgaacagaacgtcgctgatggagaaagggctcccgcagaaggaacggcctgtaccgtgcgctccggcacaatcgcgtctcttgtgtctcactcacggaaagaaacaacctgaaggccatcccgtcggtctgcacgtaaccgtgaagacgtgtggccgcgtcccacctgcggctgggtaccctgcacccggcactgtaggagtcacgtgcagcctttctcaggggactgtcattgaaaaggaaacgtttgatgtctgtgtcagctgtctttgtagttaggaaatagatccaataaagccgtatttttttgctgg

SEQ ID NO: 25 - DNA, 4604 bp, Artificial
  cDNA Sequence
gccgggagaaccgaacccctggcggccgcgaccccggctcccgccccggccccggcccgacccgccatgacggggctggaggaccaggagttcgacttcgagttcctcttcgagtttaaccagcgcgacgagggcgccgccgcggccgccccagaacactatggctatgcatcctccaacgtcagccccgccctgccgctccccacggcgcactccaccctgccggccccgtgccacaaccttcagacctccacaccgggcatcatcccgccggcggatcacccctcggggtacggagcagctttggacggtgggcccgcgggctacttcctctcctccggccacaccaggcctgatggggcccctgccctggagagtcctcgcatcgagataacctcgtgcttgggcctgtaccacaacaataaccagtttttccacgatgtggaggtggaagacgtcctccctagctccaaacggtccccctccacggccacgctgagtctgcccagcctggaggcctacagagacccctcgtgcctgagcccggccagcagcctgtcctcccggagctgcaactcagaggcctcctcctacgagtccaactactcgtacccgtacgcgtccccccagacgtcgccatggcagtctccctgcgtgtctcccaagaccacggaccccgaggagggctttccccgcgggctgggggcctgcacactgctgggttccccgcggcactccccctccacctcgccccgcgccagcgtcactgaggagagctggctgggtgcccgctcctccagacccgcgtccccttgcaacaagaggaagtacagcctcaacggccggcagccgccctactcaccccaccactcgcccacgccgtccccgcacggctccccgcgggtcagcgtgaccgacgactcgtggttgggcaacaccacccagtacaccagctcggccatcgtggccgccatcaacgcgctgaccaccgacagcagcctggacctgggagatggcgtccctgtcaagtcccgcaagaccaccctggagcagccgccctcagtggcgctcaaggtggagcccgtcggggaggacctgggcagccccccgcccccggccgacttcgcgcccgaagactactcctctttccagcacatcaggaagggcggcttctgcgaccagtacctggcggtgccgcagcacccctaccagtgggcgaagcccaagcccctgtcccctacgtcctacatgagcccgaccctgcccgccctggactggcagctgccgtcccactcaggcccgtatgagcttcggattgaggtgcagcccaagtcccaccaccgagcccactacgagacggagggcagccggggggccgtgaaggcgtcggccggaggacaccccatcgtgcagctgcatggctacttggagaatgagccgctgatgctgcagcttttcattgggacggcggacgaccgcctgctgcgcccgcacgccttctaccaggtgcaccgcatcacagggaagaccgtgtccaccaccagccacgaggccatcctctccaacaccaaagtcctggagatcccactcctgccggagaacagcatgcgagccgtcattgactgtgccggaatcctgaaactcagaaactccgacattgaacttcggaaaggagagacggacatcgggaggaagaacacacgggtacggctggtgttccgcgttcacgtcccgcaacccagcggccgcacgctgtccctgcaggtggcctccaaccccatcgaatgctcccagcgctcagctcaggagctgcctctggtggagaagcagagcacggacagctatccggtcgtgggcgggaagaagatggtcctgtctggccacaacttcctgcaggactccaaggtcattttcgtggagaaagccccagatggccaccatgtctgggagatggaagcgaaaactgaccgggacctgtgcaagccgaattctctggtggttgagatcccgccatttcggaatcagaggataaccagccccgttcacgtcagtttctacgtctgcaacgggaagagaaagcgaagccagtaccagcgtttcacctaccttcccgccaacgttccaattataaaaacagaacccactgatgattatgagcctgctccaacctgtggaccggtgagccaggggttaagtcctctcccaagaccatactacagccagcagctcgcgatgccacccgaccccagctcctgcctcgtggccggcttcccgccctgtccgcagagaagcaccctgatgccagcggcccctggcgtgagccccaagctccacgacctttctcccgctgcctacaccaagggcgttgccagcccgggccactgtcacctcggactcccgcagccggccggagaggcccccgccgtccaggacgtgcccaggccagtggccacgcaccccggctcgcccgggcagccacccccggccctgctgccacagcaggtgagtgcgcctccaagcagtagctgcccccctggtctcgaacactcgctctgccccagcagcccctctcctccactcccgcctgccacccaagagccgacctgcctgcagccctgcagcccagcgtgcccgcccgccacgggccgcccgcagcacctgccgtccacggtccgcagggacgagtctccgactgccgggccacggctgctgccagaggtgcatgaggacggtagtcctaatttggcccctattcctgtaacggtcaagcgagagcctgaagagttggaccagttgtacctggatgacgtaaatgaaataatacgaaatgacctctccagcacgagcacccactcctagttgccacattggagcactcagttcagcaggggtatgctgacttcagcagacaaagacttttgaataaataaactgaactcacacctggtaccactcagaacctccaactgactgaatgccaggagctgaacattaatatgtgcaaagattggctctccaacaagaaggaaagcagggaggaagggagaccactgtgtcacctggaggagaagtcatctcatgacaacagaagggaggtggccgggctgagcacgggagacccaccgtgcaggggcctttcatgggaacggcccacacgcagtttgaccccacgcccagcccttctggcacccctggggttcaatactggaagtgccttatttaaccagaccatcagggcatcatagaattgagcattgaatttgctactgtaggagtatttttaggagcagaaactgcaaacacatttcattgtgaggttttaccctctgtatgaatgaagagaacgctggaaggctgcgagaggactctagtatgagtctccaacatttggaacgtttcctgggctgtcacgtacactcctgctgccttacacagtgcattttagaatcttccagtctgtcatctcagctcttttgtaacatgcttcccttgtctgcgcggttgaaaccgtaggcttgttcatagtcgcatgctcgcatctttgtttttaatctggcttcgaacatagcacaagtaacttgaatagcacatcaataggttactggacaaaagcagaaaaacctgttacaggatagcctgcatttgcatgtgtgtacatatctaggcatctatttatgtataaataataacagagccgacgtgtcctcgcccaggagggcttccctgtcagcaataaccggcatccgttttggaacctgcgtctggggctccagtcgctgctcttgctggcgtccatcgccgcctcggacggccgtgcattttctcgtctcacgcagttcgaggaggaccctagaaagccaggagctgtgattgacagtagctgtaggttaccagacggcaacattagaaagtgattgtaaataacatgcaacctaagtgtaatatatttgttcagttataagatgattgtttcacagaagccttaccactctctgcttcatctaagaaaaccaataccaaaaacgccactttaatgctcagccctgcgttgtgtgttttcagatgagttactgttaacaggtaggtttgtgtaggccttgctgggcactctgtacaattagttgcttattacgtatgattactcacagcgatctattgttccatataaccaaaaagcatggtttattcattgaaacacggttgacctgaactcgtgccttaggaattaatgcccccttatggaacctgcctgaattgcacctgcgggtggaggctccggctgtgaagtcactgaacagaacgtcgctgatggagaaagggctcccgcagaaggaacggcctgtaccgtgcgctccggcacaatcgcgtctcttgtgtctcactcacggaaagaaacaacctgaaggccatcccgtcggtctgcacgtaaccgtgaagacgtgtggccgcgtcccacctgcggctgggtaccctgcacccggcactgtaggagtcacgtgcagcctttctcaggggactgtcattgaaaaggaaacgtttgatgtctgtgtcagctgtctttgtagttaggaaatagatccaataaagccgtatttttttgctgg

SEQ ID NO: 26 - DNA, 1131 bp, Artificial
  cDNA Sequence
atgaaccgaagttttcacaagtctcagaccttgcgattctacgattgcagcgcagtggaagtcaagagcaagtttggggcggaattccgaaggttctctctggaccgtcataagcctgggaagtttgaagatttctacaagctggttgtgcacacccaccatatctccaacagtgatgtaactattggctatgcagatgtgcacggagacctgctgcccatcaacaatgatgacaacttctgcaaggcggtttctagtgcaaatcccctgctcagggtcttcatccagaaacgagaggaggccgagcgtggcagcctcggcgcgggctcgctgtgcaggcggaggcgggcgctgggcgcgctgcgtgatgaaggaccccggcggcgtgcacacctggacatcggcctcccgcgcgacttccgccccgtatcatccatcatcgatgtggacctggtccccgagacgcaccggcgagtgcggctgcaccggcacggctgcgagaagccgctgggcttctacatccgcgatggcgccagcgtgcgcgtgaccccgcacgggctggagaaggtgcccggcatcttcatctcgcgcatggtacccgggggcctggcggagagcaccgggctgctggctgtgaatgacgaggtcctggaggtgaacggcattgaggtggccgggaagacgctggaccaggtcacggacatgatgatcgccaacagccacaacctcatcgtcaccgtcaagcccgccaaccagcgcaacaacgtggtgcgcggcggccgcgcgttgggcagctcgggaccgccctcggacggcaccgcgggcttcgtgggtccccccgccccgcgcgtcctgcagaacttccaccccgacgaggcggagagcgatgaggacaacgacgtcgtcatcgagggcacactggagcctgcacgtcccccccagaccccgggcgcgcccgcaggcagcctctcccgggtcaatggcgcgggcctggcgcagcggctgcagcgggacctggccctggacggcggcctccagcggctgctcagctccctgcgggccgacccccgtcacagcctggcgctgccgccaggcggcgtggaggagcacgggcccgcggtcacgctctag

SEQ ID NO: 27 - DNA, 1313 bp, Artificial
  cDNA Sequence
gcgctcggcgcagcgaagtagcctccggcggtggcaactacggcggcggcgccggggcgatgctgtgggtctcgttgggcgccggtgtcctggcctcttccttagatgaaaagattctgaagaatagagatcttgaacatagcatggtgccagacacataacagaacgaagaacaaactaaattcatctcaaaatgattataaatcatcaagaaggagtagcctgccacctgaactactcataggaaatgacattagaggaagacttcaaagaaacattaagaacttggatcccattcacctgaggcacccgaagaagagaccatccatatttccaggacggaaacacaccctttccttaggcgtcctgcgtcccccgattcctgctccctggttgccgcgtccttggctggcgtcagaaaaatggctacaaactttctagtaggtgagaagatctggttccacaagttcaaatatggcgatgcagaaaggagattctacgaacagatgaacgggcctgtggccggcgcctccctccaggaggccagcatgatcctccatgatattgccagagccagagagaacatcccgaaatccctggccggaagcttaggcccaggggcgtctagcggccccagcggagaccacagcgagctcgtcgtccggatcgccagtctggaagtggacaaccagagagacctgctgaacgtgctggagaagagcttgcccggccactgggccacagccccgcagacccagcacatgtctcccatgcgccaagtggagcccccggccaagaagctagccacaccagcagaggatgacgaggacgatgacattgacctgtttggcagcgacaatgagcaacacagctgcggcattaccaatgaggagcggctgcagcagtacgcggagaagaaggccaagaagcccgcgctggtggccaagtcctccatcctgctggacttcaagccttgggacgatgagacggacacggcccacctggaggcctgtgtgcgcttcatccagccggacgggctggtgcggggggcctccaagctggtgcccgtgggctacggtatctggaagctgcagattcagcgtgtggtggaggacaaggtggggacagacttgctggaggaggagatcaccaagtttgaagagtgtatgcagagtgtcgacatcgcagctttcaacaagatctggcctgagtgtgtgtgtgtgcccgcgtgcatgaggccctgacacaattaaaaactgagaccggcaaaaaaaaaaaaaaaaaaaagggacgaaaacaaacttaatgaagct

SEQ ID NO: 28 - DNA, 315 bp, Artificial
  cDNA Sequence
gcagagaacaaagattggtggcttcctcctgagcacactgggatgtggcattacatcggggctgctgagtgcccttaccttcagctgcccagatgcagaggcagttccacaaggtactggcacaagaagagtcgtggaagactgacctggccatggcttctcatgtcccagctcaggacctgccacatcaattctccctttcctctggccgtcacgtgtggagtgaaattctcagaagcggctgtccctgtgcacctctctggctgtgtccagaaaatgaacatctgtttacagcttcaattttctaatgattag

SEQ ID NO: 29 - DNA, 3792 bp, Artificial
  cDNA Sequence
cgcgagttgagccgtttccccgcgctgtccgcgcgggcgctccgacagcggctctgcagggtccgcggccagcgtccggccaccgctcggccgccactcaaggctcacgcgtcgatgtgtagctacatagttatctgtgtacatccacgctggggcatttttctcctgcttaatgaggacttgactcgggagcaagtgtgaatcattgccggggctgggaaaggaggaaggcgcatttaaccccctcccacccctctccatgtccgtgtgtcactcggctcggtccacctggcgcggccggtcctggggctgctgctgctgttgacgacgacgacgacgacgggggctgcctctgctgtcccgggagtttcctcctgctccggccacacagctcctggggattgttcctcttcgaaccagaacctcggcctgaccggcactttggctccaaaataactttatttttgggggagaaagcacatcacgaaccagtcaaaatcgtggtttatttctgtaacgtgaagacttctgctcttttttctttgtttgtttttttcgtaaacatctgggtgtatatcaaacggcaagatgtccagtaatgtcccggcggatatggataaatttgcgcctcattttggtaagcggaaaaacaaaagagttcctgttttctcctaacgattctgcttctgacattgcaaagcatgtatatgacaattggccaatgggactgggaagaagagcaggtcagcagtccaaatattctacgacttatttatcaaggacgatttctacatggaaatgtcacattaggaggcattaaaacttccttttggcaaaacaacagtgatgcatttggtggccagagagacattaccagagccaaactctcaagggtcagaggaatcgtgagaagactggagagagtaattgttgtgtaatcctgtaaacactgtctgcctagtgtgatgtgatatagtctttgtctttcatgctgctgggacagaaaagacccgacattgcttcagaaaccgttcagaacagtctgcctgtaaacacatggaactgaattaccacatgaacactgtcatcttttctcatgaaagtaaaaagaaccaagaacatttttcactctgattttttatttcttgtattttttgttgagctgttttaacacatattggtttttgaatgcagtcaatctccaggggaaaagttaacaagttatctttcgtagcagaaaccattttgctgccacaaaattttcatcatcagaactaataaatcaagtgttccaaatacaatttgcattaaaaagattggcattattttcctcatcagcagaatttataacagtgtgtggtatctagaaatacttatatatacaattccacactggaagacactcagcaattaatgaagttaattactgggccaacttgagaggaaaaaatggaaaagaaactaaaatgttgggtgaattctaccaaagtcagccgtggtggctgcactggcacagaatactaaactgagtgtgactattttcactgcaacaaatgaaaaaacaaaatgtgcctgtttaaagcactcagtagagggctgatgaaactaattttttttcctttaagacatgcactcttgagtcctacagtaactgagtgtttgtttagacagcacaagaaggggtgagagtgcgtctcctagccttaatgtgggagggtagtttcagtcactcatcggctttcattattgtgcagaaatattagaaaacctcattgatcaattttatgtatttgaatatcagcaaattgaaattttccataattatcattaatttgtaaccacatccagtgtcatgcttactccttagagttcagatgaattcttaaaattaaaaaaaaactccatagtactaattttgtttctttatatagtttgcgtttgatattagtgcttgcaattgtattaaagtcaaaagctgatttttatggcatacacaagaatgccactttttcttttatttcataccaataatttaaagattgatatgctaaaaacaatttgcacagcactaaagcatgagctactttcatctaaacctgtaaaaatatgaaagatttttatattttttcactgggaagaaattcttcctggatgaaattacaaatatgtgtagaatatatttaataaaagacttataaaatacctaactacaggacttaaaatatagattggcgcgtagtatacagaacaatattccatataaataagtttagcctttataaaaatgaagttgcaggctgacattacattctgtactaagtgtcaacagcccttacaaacattaaatgtaaatggtttcaaatggtcagcgttgtttaaatgtaatcatgttattttattcattgttaatgctttgatgaaaaggctttatatgcagtagatctacgaaaatattgttcatactgatcagaattaaatttgtatagagcagagttttaaaatgaatgtaaatagcactaaacgttttctttctgcaacctgtacttacagattcttcctgtaaactaaataaaaaaaaaatgatagtgcattttggtggtaattttaaaggtcttgattaggtcaataattgtttaagcaccgtctcattcatgttttctactttcatttcttaagcttttaaaattcatttaattaatattctgttgttgttttggggagtattcccaatgtatctttgatatttaacctggttaatttgtggacagtcacaacaatggatagaattatgtagtctccgttatcactaaaatgttatcttcaagagatgttaaatatttatatgctttgttgactagctgaaatgtgaattctgttagtgttgactaaagaatctggtagttgcttaattgggcaattaaacaatttatggctctattttgtaaaacaaactactggtaattatttttaatacctattttcattctgattactctttttttaagttaaagactatcagttaattaagattgagtttttatgatggttaaaaataattctctattggtttttcaatatatttttctgtgtgttctcagattatatatttccctcaatttagagtttgctaagtgaaataaactggttcactagtagagaaagaattacgtcgcttaatacctaatatcatagttgtacaatatgaaaaaaaagaataaaaagtagcagtaaaattatatactgaaaacaccaaaaatttagatgccttaatagtatatacgtgaaatactcagctgtccctttaaaaataattccttggactgcctggtggttaaaatacgattcctcatatccaaggctacttttgaagatccctctgccaaaaatatagctcacttatctaaaggtgagagctgcatagatccagtaatgtacataaagcctgaatgatgagcctatgtccctgcctaacgctggtgtctcactcatctcttttacctaaattgtcctgaactttgttaagtgttctggacaaggccaagcttttctttattaaaacctcagcatgtctccctgatctgaactatttgctttctcttcaagataagttgtattttaccatggaaaaatacagtatctaacattaccattcacgttaaatgaagtttcctcataacatttatctttagttttatgaagtcatcgtgaccaatgttacagtaatttctgttagctgattgtggtaaacaatgtttaatgtgaaaagaaattaaaactttcttcatctgttgt

SEQ ID NO: 30 - DNA, 7462 bp, Artificial
  cDNA Sequence
atgtcgcagccgccgctgctccccgcctcggcggagactcggaagttcacccgggcgctgagtaagccgggcacggcggccgagctgcggcagagcgtgtctgaggtggtgcgcggctccgtgctcctggcaaagccaaagctaattgagccactcgactatgaaaatgtcatcgtccagaagaagactcagatcctgaacgactgtttacgggagatgctgctcttcccttacgatgactttcagacggccatcctgagacgacagggtcgatacatatgctcaacagtgcctgcgaaggcggaagaggaagcacagagcttgtttgttacagagtgcatcaaaacctataactctgactggcatcttgtgaactataaatatgaagattactcaggagagtttcgacagcttccgaacaaagtggtcaagttggataaacttccagttcatgtctatgaagttgacgaggaggtcgacaaagatgaggatgctgcctcccttggttcccagaagggtgggatcaccaagcatggctggctgtacaaaggcaacatgaacagtgccatcagcgtgaccatgaggtcatttaagagacgatttttccacctgattcaacttggcgatggatcctataatttgaatttttataaagatgaaaagatctccaaagaaccaaaaggatcaatatttctggattcctgtatgggtgtcgttcagaacaacaaagtcaggcgttttgcttttgagctcaagatgcaggacaaaagtagttatctcttggcagcagacagtgaagtggaaatggaagaatggatcacaattctaaataagatcctccagctcaactttgaagctgcaatgcaagaaaagcgaaatggcgactctcacgaagatgatgaacaaagcaaattggaaggttctggttccggtttagatagctacctgccggaacttgccaagagtgcaagagaagcagaaatcaaactgaaaagtgaaagcagagtcaaacttttttatttggacccagatgcccagaagcttgacttctcatcagctgagccagaagtgaagtcatttgaagagaagtttggaaaaaggatccttgtcaagtgcaatgatttatctttcaatttgcaatgctgtgttgccgaaaatgaagaaggacccactacaaatgttgaacctttctttgttactctatccctgtttgacataaaatacaaccggaagatttctgccgatttccacgtagacctgaaccatttctcagtgaggcaaatgctcgccaccacgtccccggcgctgatgaatggcagtgggcagagcccatctgtcctcaagggcatccttcatgaagccgccatgcagtatccgaagcagggaatattttcagtcacttgtcctcatccagatatatttcttgtggccagaattgaaaaagtccttcaggggagcatcacacattgcgctgagccatatatgaaaagttcagactcttctaaggtggcccagaaggtgctgaagaatgccaagcaggcatgccaaagactaggacagtatagaatgccatttgcttgggcagcaaggacattgtttaaggatgcatctggaaatcttgacaaaaatgccagattttctgccatctacaggcaagacagcaataagctatccaatgatgacatgctcaagttacttgcagactttcggaaacctgagaagatggctaagctcccagtgattttaggcaatctagacattacaattgataatgtttcctcagacttccctaattatgttaattcatcatacattcccacaaaacaatttgaaacctgcagtaaaactcccatcacgtttgaagtggaggaatttgtgccctgcataccaaaacacactcagccttacaccatctacaccaatcacctttacgtttatcctaagtacttgaaatacgacagtcagaagtcttttgccaaggctagaaatattgcgatttgcattgaattcaaagattcagatgaggaagactctcagccccttaagtgcatttatggcagacctggtgggccagttttcacaagaagcgcctttgctgcagttttacaccatcaccaaaacccagaattttatgatgagattaaaatagagttgcccactcagctgcatgaaaagcaccacctgttgctcacattcttccatgtcagctgtgacaactcaagtaaaggaagcacgaagaagagggatgtcgttgaaacccaagttggctactcctggcttcccctcctgaaagacggaagggtggtgacaagcgagcagcacatcccggtctcggcgaaccttccttcgggctatcttggctaccaggagcttgggatgggcaggcattatggtccggaaattaaatgggtagatggaggcaagccactgctgaaaatttccactcatctggtttctacagtgtatactcaggatcagcatttacataattttttccagtactgtcagaaaaccgaatctggagcccaagccttaggaaacgaacttgtaaagtaccttaagagtctgcatgcgatggaaggccacgtgatgatcgccttcttgcccactatcctaaaccagctgttccgagtcctcaccagagccacacaggaagaagtcgcggttaacgtgactcgggtcattattcatgtggttgcccagtgccatgaggaaggattggagagccacttgaggtcatatgttaagtacgcgtataaggctgagccatatgttgcctctgaatacaagacagtgcatgaagaactgaccaaatccatgaccacgattctcaagccttctgccgatttcctcaccagcaacaaactactgaagtactcatggtttttctttgatgtactgatcaaatctatggctcagcatttgatagagaactccaaagttaagttgctgcgaaaccagagatttcctgcatcctatcatcatgcagtggaaaccgttgtaaatatgctgatgccacacatcactcagaagtttcgagataatccagaggcatctaagaacgcgaatcatagccttgctgtcttcatcaagagatgtttcaccttcatggacaggggctttgtcttcaagcagatcaacaactacattagctgttttgctcctggagacccaaagaccctctttgaatacaagtttgaatttctccgtgtagtgtgcaaccatgaacattatattccgttgaacttaccaatgccatttggaaaaggcaggattcaaagataccaagacctccagcttgactactcattaacagatgagttctgcagaaaccacttcttggtgggactgttactgagggaggtggggacagccctccaggagttccgggaggtccgtctgatcgccatcagtgtgctcaagaacctgctgataaagcattcttttgatgacagatatgcttcaaggagccatcaggcaaggatagccaccctctacctgcctctgtttggtctgctgattgaaaacgtccagcggatcaatgtgagggatgtgtcacccttccctgtgaacgcgggcatgactgtgaaggatgaatccctggctctaccagctgtgaatccgctggtgacgccgcagaagggaagcaccctggacaacagcctgcacaaggacctgctgggcgccatctccggcattgcttctccatatacaacctcaactccaaacatcaacagtgtgagaaatgctgattcgagaggatctctcataagcacagattcgggtaacagccttccagaaaggaatagtgagaagagcaattccctggataagcaccaacaaagtagcacattgggaaattccgtggttcgctgtgataaacttgaccagtctgagattaagagcctactgatgtgtttcctctacatcttaaagagcatgtctgatgatgctttgtttacatattggaacaaggcttcaacatctgaacttatggatttttttacaatatctgaagtctgcctgcaccagttccagtacatggggaagcgatacatagccagaacaggaatgatgcatgccagattgcagcagctgggcagcctggataactctctcacttttaaccacagctatggccactcggacgcagatgttctgcaccagtcattacttgaagccaacattgctactgaggtttgcctgacagctctggacacgctttctctatttacattggcgtttaagaaccagctcctggccgaccatggacataatcctctcatgaaaaaagtttttgatgtctacctgtgttttcttcaaaaacatcagtctgaaacggctttaaaaaatgtcttcactgccttaaggtccttaatttataagtttccctcaacattctatgaagggagagcggacatgtgtgcggctctgtgttacgagattctcaagtgctgtaactccaagctgagctccatcaggacggaggcctcccagctgctctacttcctgatgaggaacaactttgattacactggaaagaagtcctttgtccggacacatttgcaagtcatcatatctgtcagccagctgatagcagacgttgttggcattgggggaaccagattccagcagtccctgtccatcatcaacaactgtgccaacagtgaccggcttattaagcacaccagcttctcctctgatgtgaaggacttaaccaaaaggatacgcacggtgctaatggccaccgcccagatgaaggagcatgagaacgacccagagatgctggtggacctccagtacagcctggccaaatcctatgccagcacgcccgagctcaggaagacgtggctcgacagcatggccaggatccatgtcaaaaatggcgatctctcagaggcagcaatgtgctatgtccacgtaacagccctagtggcagaatatctcacacggaaagaagcagtccagtgggagccgccccttctcccccacagccatagcgcctgcctgaggaggagccggggaggcgtgtttagacaaggatgcaccgccttcagggtcattaccccaaacatcgacgaggaggcctccatgatggaagacgtggggatgcaggatgtccatttcaacgaggatgtgctgatggagctccttgagcagtgcgcagatggactctggaaagccgagcgctacgagctcatcgccgacatctacaaacttatcatccccatttatgagaagcggagggattttgagaggctggcccatctgtatgacacgctgcaccgggcctacagcaaagtgaccgaggtcatgcactcgggccgcaggcttctggggacctacttccgggtagccttcttcgggcagcaataccagtttacagacagtgaaacagatgtggagggattctttgaagatgaagatggaaaggagtatatttacaaggaacccaaactcacaccgctgtcggaaatttctcagagactccttaaactgtactcggataaatttggttctgaaaatgtcaaaatgatacaggattctggcaaggtcaaccctaaggatctggattctaagtatgcatacatccaggtgactcacgtcatccccttctttgacgaaaaagagttgcaagaaaggaaaacagagtttgagagatcccacaacatccgccgcttcatgtttgagatgccatttacgcagaccgggaagaggcagggcggggtggaagagcagtgcaaacggcgcaccatcctgacagccatacactgcttcccttatgtgaagaagcgcatccctgtcatgtaccagcaccacactgacctgaaccccatcgaggtggccattgacgagatgagtaagaaggtggcggagctccggcagctgtgctcctcggccgaggtggacatgatcaaactgcagctcaaactccagggcagcgtgagtgttcaggtcaatgctggcccactagcatatgcgcgagctttcttagatgatacaaacacaaagcgatatcctgacaataaagtgaagctgcttaaggaagttttcaggcaatttgtggaagcttgcggtcaagccttagcggtaaacgaacgtctgattaaagaagaccagctcgagtatcaggaagaaatgaaagccaactacagggaaatggcgaaggagctttctgaaatcatgcatgagcaggtgagaagatctgccccctggaggagaagacgagcgtcttaccgaattcccttcacatcttcaacgccatcagtgggactccaacaagcacaatggttcacgggatgaccagctcgtcttcggtcgtgtgattacatctcatggcccgtgtgtggggacttgctttgtcatttgcaaactcaggatgctttccaaagccaatcactggggagaccgagcacagggaggaccaaggggaaggggagagaaaggaaataaagaacaacgttatttcttaacagactttctataggagttgtaagaaggtgcacatatttttttaaatctcactggcaatattcaaagttttcattgtgtcttaacaaaggtgtggtagacactcttgagctggacttagattttattcttccttgcagagtagtgttagaatagatggcctacagaaaaaaaaggttctgggatctacatggcagggagggctgcactgacattgatgcctgggggaccttttgcctcgaggctgagctggaaaatcttgaaaatattttttttttcctgtggcacattcaggttgaatacaagaactatttttgtgactagtttttgatgacctaagggaactgaccattgtaatttttgtaccagtgaaccaggagatttagtgcttttatattcatttccttgcatttaagaaaatatgaaagcttaaggaattatgtgagcttaaaactagtcaagcagtttagaaccaaaggcctatattaataaccgcaactatgctgaaaagtacaaagtagtacagtatattgttatgtacatatcattgttaatacagtcctggcattctgtacatatatgtattacatttctacatttttaatactcacatgggcttatgcattaagtttaattgtgataaatttgtgctgttccagtatatgcaatacactttaatgttttattcttgtacataaaaatgtgcaatatggagatgtatacagtctttactatattaggtttataaacagttttaagaatttcatccttttgccaaaatggtggagtatgtaattggtaaatcataaatcctgtggtgaatggtggtgtactttaaagctgtcaccatgttatattttcttttaagactttaatttagtaattttatatttgggaaaataaaggtttttaattttatttaactggaatcactgccctgctgtaattaaacattctgtaccacatctgtattaaaaagacattgctgacc

SEQ ID NO: 31 - DNA, 2224 bp, Artificial
  cDNA Sequence
cagtcaccggtaagttactgaatctgcgttggctgcctttcatgccactggtgctcctttgtggctatggaccagtggggggtgtatttcaatcctgtgcttgtttcttttttgtcagagtttctttggttatcccctgagcatcttcttcatcgtggtcaatgagttttgcgaaagattttcctactatggaatgcgagcaatcctgattctgtacttcacaaatttcatcagctgggatgataacctgtccaccgccatctaccatacgtttgtggctctgtgctacctgacgccaattctcggagctcttatcgccgactcgtggctgggaaagttcaagaccattgtgtcgctctccattgtctacacaattggacaagcagtcacctcagtaagctccattaatgacctcacagaccacaaccatgatggcacccccgacagccttcctgtgcacgtggtgctgtccttgatcggcctggccctgatagctctcgggactggaggaatcaaaccctgtgtgtctgcgtttggtggagatcagtttgaagagggccaggagaaacaaagaaacagatttttttccatcttttacttggctattaatgctggaagtttgctttccacaatcatcacacccatgctcagagttcaacaatgtggaattcacagtaaacaagcttgttacccactggcctttggggttcctgctgctctcatggctgtagccctgattgtgtttgtccttggcagtgggatgtacaagaagttcaagccacagggcaacatcatgggtaaagtggccaagtgcatcggttttgccatcaaaaatagatttaggcatcggagtaaggcatttcccaagagggagcactggctggactgggctaaagagaaatacgatgagcggctcatctcccaaattaagatggttacgagggtgatgttcctgtatattccactcccaatgttctgggccttgtttgaccagcagggctccaggtggacactgcaggcaacaactatgtccgggaaaatcggagctcttgaaattcagcccgatcagatgcagaccgtgaacgccatcctgatcgtgatcatggtcccgatcttcgatgctgtgctgtaccctctcattgcaaaatgtggcttcaatttcacctccttgaagaagatggcagttggcatggtcctggcctccatggcctttgtggtggctgccatcgtgcaggtggaaatcgataaaactcttccagtcttccccaaaggaaacgaagtccaaattaaagttttgaatataggaaacaataccatgaatatatctcttcctggagagatggtgacacttggcccaatgtctcaaacaaatgcatttatgacttttgatgtaaacaaactgacaaggataaacatttcttctcctggatcaccagtcactgctgtaactgacgacttcaagcagggccaacgccacacgcttctagtgtgggcccccaatcactaccaggtggtaaaggatggtcttaaccagaagccagaaaaaggggaaaatggaatcagatttgtaaatacttttaacgagctcatcaccatcacaatgagtgggaaagtttatgcaaacatcagcagctacaatgccagcacataccagttttttccttctggcataaaaggcttcacaataagctcaacagagattccgccacaatgtcaacctaatttcaatactttctaccttgaatttggtagtgcttatacctatatagtccaaaggaagaatgacagctgccctgaagtgaaggtgtttgaagatatttcagccaacacagttaacatggctctgcaaatcccgcagtattttcttctcacctgtggcgaagtggtcttctctgtcacgggattggaattctcatattctcaggctccttccaacatgaagtcggtgcttcaggcaggatggctgctgaccgtggctgttggcaacatcattgtgctcatcgtggcaggggcaggccagttcagcaaacagtgggccgagtacattctatttgccgcgttgcttctggtcgtctgtgtaatttttgccatcatggctcggttctatacttacatcaacccagcggagatcgaagctcaatttgatgaggatgaaaagaaaaacagactggaaaagagtaacccatatttcatgtcaggggccaattcacagaaacagatgtga

SEQ ID NO: 32 - DNA, 621 bp, Artificial
  cDNA Sequence
atggaccagtggggggtgtatttcaatcctgtgcttgttttttgtcagagtttctttggttatcccctgagcatcttcttcatcgtggtcaatgagttttgcgaaagattttcctactatggaatgcgagcaatcctgattctgtacttcacaaatttcatcagctgggatgataacctgtccaccgccatctaccatacgtttgtggctctgtgctacctgacgccaattctcggagctcttatcgccgactcgtggctgggaaagttcaagaccattgtgtcgctctccattgtctacacaattggacaagcagtcacctcagtaagctccattaatgacctcacagaccacaaccatgatggcacccccgacagccttcctgtgcacgtggtgctgtccttgatcggcctggccctgatagctctcgggactggaggaatcaaaccctgtgtgtctgcgtttggtggagatcagtttgaagagggccaggagaaacaaagaaacagatttttttccatcttttacttggctattaatgctggaagtttgctttccacaatcatcacacccatgctcagaggtaagagatacctgaaaggaacttctgttggtcttttt

SEQ ID NO: 33 - DNA, 996 bp, Artificial
  cDNA Sequence
ggccgcctcctggggcagaatggaacagcctgggcccagggctccggatccctctctctgccaccacaacctccagccaacagatgaccccaactgggattcctatgctaccactatgaggactgcattcacgcctaaaacaggagcagtgcctgccttaattcgccaaaacggtatcagaagattaggatatacatattcacttagtgatcctattctcaatcagacacaatatagtgatgagtacacttggaaatcacactctaaagaagatttgatcaaaactgagacttcaagaggaatcaagagccacaaatctcatctcaatgaagacattttcctgtggacactacctcactgtcaacaaacggggacactaaagaactgcctcccttggaaaatcccggcttcaatgaaagaagttaacaaggcactatcaaatcagtttatttcccttactaagagagactttgtggacagatcaaaagctcagaagattaagaaaagttctcacttgtctctggaatggaaaaagttacttccccaacctccagacactgaattccgaaggaattaccaaattccagctaaaattcctgagcttcaagatttcagtttcaaatatggatgctactcaagcttgcctgttgcttctcagggtctagtgccttctgtgctgcacagctacctgaggaaccaagagcacacaaagaaacagaccacataccaaagtgactacgacaaaacctacccagatttcttaatgcttttaaactcatttacttcctctcaagtcaaagagtaccttcagagtctttcctacaaagatagacaaattattgatcgctttattcgtactcactgtgacactaacaaaaagaagaaatgaaaagggaaaatagtacaaatgaagaaaatctgaaaatcaatggaagcacgaggacattcctagtcattttctcaattatcaaggaaaaataagatgcaaatagcttc

SEQ ID NO: 34 - DNA, 210 bp, Artificial
  cDNA Sequence
gtgaaggccagaaaaaacagatttggccatattgggggcctggtcaccagggatgccaactctggcaaagtggatattgtcactatcaatgacctcaactacatggtctccatgttccagtatgattccgctcatggcaagttccacggcaccatcaaggctgagaacgggaagcctgccatcaatgacaatcccatcaccatctcgcag

SEQ ID NO: 35 - DNA, 2343 bp, Artificial
  cDNA Sequence
ctggggtcgtggccgtgggccggcaggggcgaggcgggcgtccagagggcggataaaaggggccgcgctgcgccggggccgctttctccgcgcggtgcctgcagggctcccagcgagtggcagcttgggaggggccgcccgggcggtcagactggcacctgagcggccaccgcgtcccggccaggcgggcagaccgaccccctcctcacctcgcgcgcggctgacgcaggcagggcgcccggcccctcctggggaccatcaggtgccggctgggggctgtaggcaccggacggaagcaggcggtgtgaggaccgacgacgcgggcatggcgggggcggcctgcgagccggtggccaggccgagcctgacctccatctcgtctggggagcttcgcagcctgtggacctgcgactgcgagctggccctgctgccgctggctcagctgctgcgcctgcagcccggtgccttccagctgagcggcgaccagctcgtggtggccaggcccggggagccggcggcggcgcgggggggcttcaacgtcttcggtgacggcctcgtgcgcctcgacgggcagctctaccgcctcagcagctacatcaagaggtatgtggaactgaccaactactgtgattataaagactacagggaaactatattgagcaaaccaatgttgttctttattaatgtacagaccaaaaaagacacctcaaaagaaaggacgtacgcgtttcttgtaaacacgaggcaccccaagataagaagacagatagagcaagggatggacatggtcatctcctcagtgattggagaaagttaccggcttcagtttgattttcaagaggcagtgaagaatttcttccccccaggaaatgaagtggttaatggagaaaatttaagctttgcatatgaattcaaagctgatgcattatttgatttcttctattggtttgggctcagtaattccgttgtaaaagtaaatggaaaagttctgaatttgtcaagtacaagtccagaaaagaaggagacgattaagttatttctggaaaaaatgagtgagcctttaatccgaaggagcagtttctctgaccgaaagttcagtgtaacttccagaggttcaatagatgatgtttttaactgcaatctgtcacccagatcatctctgacagagcctcttttggcagaattaccatttccaagtgttctggaatctgaagagacacccaaccaatttatctgattgaactgaacattgtagcagttgctcccgcactccaggcctgtgctagactataggctggggggagggtaggaggtgggaggcagatacttccacctgcgtgtcaatctccggctcctccatggcttctatggaggactcctctcttctgcttctgtggatgtgatgccctggcaggcccagggcagctgattcccctaaaacttatgattaccaggatggaaaggccttggtcccatggcactgggtggggctgggggatattctctactttgaacacttctccaaagaggcagaagggccacagagttctgccaccctgaacatttttctcagttccctgggagtttttgtggcagcctttgtgggagtggtctgactggctgttgacctagcatgcttcataaatcagggtttggccctctgcttggagcatccaaccccttgaactcaaacctgtcgagcaaggggttaagagttctgttctcttgccaacctggctgggcaaaagcctgtgccatctttcactgggaggcaaatatgtttttcatcctgccatatgacacctatgagaaacgttcacagtgaggagtagccaggttgctaggacagtaaccctgccacacactgcctgaaatcggaactcccttggcctccctcttaactaagtgacccatgtagaaggaagccaggagatatggtaccgaacaatgacaggggaagggtattggacacggcagcgtcctccttattgaaaacacattatgtcagttgggaattttaaataagcttttagcaaacctaacactaaaagcaaaatagaagaaagctataccattaccataatacatttttcatctcatggctacaatggaattcttgaaaaggaaaaaaaaatcctatctacatataaaaacctgcatgaatgaatcactacatatgcttataatgaggaagagttatgggtcctgagtgtaattttttatcctttcttaaaaagtttctgtattatgcattttgataacactactgatgatccttccacttatatttgaaatgttatgtaccacatttgcacaattaaaacttttcttagcattcaacct

SEQ ID NO: 36 - DNA, 7444 bp, Artificial
  cDNA Sequence
gctggctgcggaaggggagggggggggagaaggcgattggatgcggcggcggcggcggatcccggagagccccggagtgagcggagtagcgagtcggcaacccggagggggtagaaatatttctgtcatggctcattcaaagactaggaccaatgatggaaaaattacatatccgcctggggtcaaggaaatatcagataaaatatctaaagaggagatggtgagacgattaaaggatggttgtgaaaacttttatggatatggaccaggactctgaagaagaaaaggagctttatttaaacctagctttacatcttgcttcagatttttttctcaagcatcctgataaagatgttcgcttactggtagcctgctgccttgctgatattttcaggatttatgctcctgaagctccttacacatcccctgataaactaaaggcaaggatatatttatgtttataacaagacagttgaaggggctagaggatacaaagagcccacaattcaataggtatttttatttacttgagaacattgcttgggtcaagtcatataacatatgctttgagttagaagatagcaatgaaattttcacccagctatacagaaccttattttcagttataaacaatggccacaatcagaaagtccatatgcacatggtagaccttatgagctctattatttgtgaaggtgatacagtgtctcaggagcttttggatacggttttagtaaatctggtacctgctcataagaatttaaacaagcaagcatatgatttggcaaaggctttactgaagaggacagctcaagctattgagccatatattaccaatttttttaatcaggttctgatgcttgggaaaacatctatcagcgatttgtcagagcatgtctttgacttaattttggagctctacaatattgatagtcatttgctgctctctgttttaccccagcttgaatttaaattaaagagcaatgataatgaggagcgcctacaagttgttaaactactggcaaaaatgtttggggcaaaggattcagaattggcttctcaaaacaagccactttggcagtgctacttgggcaggtttaatgatatccatgtaccaatccgcctggaatgtgtgaaatttgctagccattgtctcatgaaccatcctgatttagcaaaagacttaacagagtatcttaaagtgaggtcacatgaccctgaggaagctattagacatgatgttattgtgtcaatagttacagctgctaaaaaggatattcttctggtcaatgatcacttacttaattttgtgagagagagaacattagacaaacgatggagagtacgcaaagaagccatgatgggacttgcccaaatttataagaaatatgctttacagtcagcagctggaaaagatgctgcaaaacagatagcatggatcaaagacaaattgctacatatatattatcaaaatagtattgatgatcgactacttgttgaacggatctttgctcaatacatggttcctcacaatttagaaactacagaacggatgaaatgcttatattacttgtatgccacactggatttaaatgctgtgaaagcattgaatgaaatgtggaaatgtcaaaatctgctccgacatcaagtaaaggatttgcttgacttgattaagcaacccaaagtaaatgccagtgtcaaggccatattttcaaaagtgatggttattacaagaaatttacctgatcctggtaaggctcaggatttcatgaagaaattcacacaggtgttagaagatgatgagaaaataagaaagcagttagaagtacttgttagtccaacatgctcctgcaagcaggctgaaggttgtgtgcgtgaaataactaagaagttgggcaaccccaaacagcctacaaatcctttcctggaaatgatcaagtttctcttggagaggatagcacctgtgcacatagataccgaatctatcagtgctcttattaaacaagtgaacaaatcaatagatggaacagcagatgatgaagatgagggtgttccaactgatcaagccatcagagcaggtcttgaactgcttaaggtactctcatttacacatcccatctcatttcattctgctgaaacatttgaatcattactggcttgtctgaaaatggatgatgaaaaagtagcagaagctgcactacaaattttcaaaaacacaggaagcaaaattgaagaggattttccacacatcagatcagccttgcttcctgttttacatcacaaatctaaaaaaggacccccccgtcaagccaaatatgccattcattgtatccatgcgatattttctagtaaagagacccagtttgcacagatatttgagcctctgcataagagcctagatccaagcaacctggaacatctcataacaccattggttactattggtcatattgctctccttgcacctgatcaatttgctgctcctttgaaatctttggtagctactttcattgtgaaagatcttctcatgaatgatcggcttccagggaaaaagacaactaaactttgggttccagatgaagaagtatctcctgagacaatggtcaaaattcaggctattaaaatgatggttcgatggctacttggaatgaaaaataatcacagtaaatcaggaacttctaccttaagattgctaacaacaatattgcatagtgatggagacttgacagaacaggggaaaattagtaaaccagatatgtcacgtctgagacttgctgctgggagtgctattgtgaagctggcacaagaaccctgttaccatgaaatcatcacattagaacaatatcagctatgtgcattagctatcaacgatgaatgctatcaagtaagacaagtgtttgcccagaaacttcacaaaggcctttcccgtttacggcttccacttgagtatatggcaatctgtgccctttgtgcaaaagatcctgtaaaggagagaagagctcatgctaggcaatgtttggtgaaaaatataaatgtaaggcgggagtatctgaagcagcatgcagctgttagtgaaaaattattgtctcttctaccagagtatgttgttccatatacaattcaccttttggcacatgacccagattatgtcaaagtacaggatattgaacaacttaaagatgttaaagaatgtctttggtttgttctggaaatattaatggctaaaaatgaaaataacagtcacgcttttatcagaaagatggtagaaaatattaaacaaacaaaagatgcccaaggaccagatgatgcaaaaatgaatgaaaaactgtacactgtgtgtgatgttgccatgaatatcatcatgtcaaagagtactacatacagtttggaatctcctaaagacccggtactaccagctcgtttcttcactcaacctgacaagaatttcagtaacaccaaaaattatctgcctcctgaaatgaaatcatttttcactcctggaaaacctaaaacaaccaatgttctaggagctgttaacaagccactttcatcagcaggcaagcaatctcagaccaaatcatcacgaatggaaactgtaagcaatgcaagcagcagctcaaatccaagctctcctggaagaataaaggggaggcttgatagttctgaaatggatcacagtgaaaatgaagattacacaatgtcttcacctttgccggggaaaaaaagtgacaagagagacgactctgatcttgtaaggtctgaattggagaagcctagaggcaggaaaaaaacgcccgtcacagaacaggaggagaaattaggtatggatgacttgactaagttggtacaggaacagaaacctaaaggcagtcagcgaagtcggaaaagaggccatacggcttcagaatctgatgaacagcagtggcctgaggaaaagaggctcaaagaagatatattagaaaatgaagatgaacagaatagtccgccaaaaaagggtaaaagaggccgaccaccaaaacctcttggtggaggtacaccaaaagaagagccaacaatgaaaacttctaaaaaaggaagcaaaaaaaaatctggacctccagcaccagaggaggaggaagaagaagaaagacaaagtggaaatacggaacagaagtccaaaagcaaacagcaccgagtgtcaaggagagcacagcagagagcagaatctcctgaatctagtgcaattgaatccacacagtccacaccacagaaaggacgaggaagaccatcaaaaacgccatcaccatcacaaccaaaaaaaaatgtccgtgtaggacgctccaaacaagcagctactaaggaaaatgattcaagtgaagaagtagatgtgtttcagggtagctctcctgtcgatgatattccacaggaagaaacagaggaggaggaagtttctacagtaaatgtacggcggcgaagtgctaaaagggaacggcgatgaacaaatgtaattaataactttctctgtgaaagctttggaaaaatctttttttttttttttggtcaagcttgaggctgaataaagcctttgatgcacaaaatgggactgctgaagagtggacagttggaccttactttggtgaccccatacatttgtggtcacatgctttagccatacacatggtaacattgactatggagtcttgtgaaagtgtaatgtgcgatggctatgtagacataaagaagaaacttgtaaatatcttttttcttttttttaatgtttctgatttctgaagtgcttgtatagcttttatctgcggctttaaactgacagtacccgactgtttattggatctattgatttgaaaagaatttgttaggatagatcttaagcagtaatctgtcagtgtttgtatttgtattctctgcaattttactgtgaaaaaaaatttgttttcaacaattggtgtcattttcttgatgtcactatttgttggagagttaaatggtctcttccctttgtgtatcttacctagtgtttactcctgggcacccttaatcttcagaggtgctaaattgtctgccattacaccagaaggatgcctctgataggaggacaaccatgcaaattgtgaaatagtcctgaagttcttggattactttacacctcagtattgatttgtcccagaattttctggcctttcatggcaatgaaaattttaagaagaaagatttaaagtattttaattttaaagagtgtgttataaaataatgtactgaattctttatcccattttatcatcctttcagtttttattaatctactgtatcaataaaattctgtaatttgaatgagtttttaatagtctagaatgttattgtgtatagatatttcctcttgaacgttatgttcagaaaatgcaaattacactataatataaaacctgatatatacacattagaaatattccagttctccgtaacagtgtaaagttaatcagaaagaaaaaattttattgatgcagtgtgtctttataaagctgttcttgaaagccaagtgttttgtattttatagtgagttgcatgtttttgaaaaaaagtgctgaaaatgggatgtgctgttttctgtaaattcatatttagccatagtatatgatagattgccccataacatagtttttcatcaagagtttattattgtactttattttggagccaaaaaattgattctggggggtgggggcagcgtagaagtggtatatccaagtatatcagctactgtagttgtcacagtcttgtgaactttgaatgaaattccactttgtccagattgggagaagtggaaatttatttggatttagagcaggtctttttttttcttcattgtaatctgcaaaatgtagaaataaattacttaaggcagtatcctttatacagttgtataaactgtattttgaaccaaaacatataggttactacttaatgcttacctaatttcattttagtattttaggtgctgttatgttttttcatggttaacaccagaggggaaaaaatcatattctaacttattaaatttatcacattgaatagtggaacattttcatatgatacaccattatgtttaagatatatttccaagattggttataatagatggggcatataataaagaagctactattttggaaaatgacattttactatttgccaatgtatattgcaattgatgtgattatttttcttttaaagatttgtttgtgtttatgaaacagccatttattttttaaaaagtgttttgaattgtgtcttaatctctccatattcaactattcttcatttacaacaatagtgacaccagtaattatgagaggctgtcatatatcaaagcagctcaggtgggatcaacatacattggttttgaaatgtttccttagctcggttctcccaaacacataatttctgtttcagcagtacaaaggcatgttttaaaatctataacataaagaataaggaatagctttgtatttttgtcattgattaaattgcaccagaaatgtttatggaaatattaagaacattttataaaacatacgaaaaagtgattgtgaaggatttttatttgcatgattatagttaagcaaatttcatttcacatttttgtaatgctgtacagcagttcacaaaaaaatgttcattgtagattttgttatgttcaatgccaatgagtctgtaattttacgacctgtctgttctttttttgggtggattacgatgtaaatttttcttttctttctttctttttttttttttttgtgtagaaaaataggtgcaataatgatcaaagttttgatgtcttgagtctccatcttaggggattatcttacgtttaagcttaacatttcatgtagtaagatttggagagccacatactttacagtaaaattaagtgtgtataaaacattaattgctaacaattgttagcaaactatttcagtgataatgttcattttgaaaatatgtactgtataacattaagaaaatatttaactccctgtaacaagttccattatgaaaatcttattcctcagtgaggttatcttgctgcactctgtagcaaatttgtttaatctacattataataaaatttcttgctgcagtgcaacaggaggctttttcagtgatcttcactgtatatgtaaattacaaatgtggctgtaaaacttattccaggtattaaaggttaaattgctttctatatcttcttataacttgtaagtctgatttttaagatttccttttgtccacttgtaagaatgtcaggaatttaagaatttgtttaaattaggcatatctctgccatcacatagtattatgtcaccataatgaacaattgctatttaaatagataaccaattttcagacacatttttggatttctgtgaagttgaataaacataaaagctaa

SEQ ID NO: 37 - DNA, 2491 bp, Artificial
  cDNA Sequence
gtgagaggtcagcagaggggcggtctgcggggacaacaatggcggggttctgggtcgggacagcaccgctggtcgctgccggacggcgtgggcggtggccgccgcagcagctgatgctgagcgcggcgctgcggaccctgaagcatgttctgtactattcaagacagtgcttaatggtgtcccgtaatcttggttcagtgggatatgatcctaatgaaaaaacttttgataaaattcttgttgctaatagaggagaaattgcatgtcgggttattagaacttgcaagaagatgggcattaagacagttgccatccacagtgatgttgatgctagttctgttcatgtgaaaatggcggatgaggctgtctgtgttggcccagctcccaccagtaaaagctacctcaacatggatgccatcatggaagccattaagaaaaccagggcccaagctgtacatccaggttatggattcctttcagaaaacaaagaatttgccagatgtttggcagcagaagatgtcgttttcattggacctgacacacatgctattcaagccatgggcgacaagattgaaagcaaattattagctaagaaagcagaggttaatacaatccctggctttgatggagtagtcaaggatgcagaagaagctgtcagaattgcaagggaaattggctaccctgtcatgatcaaggcctcagcaggtggtggtgggaaaggcatgcgcattgcttgggatgatgaagagaccagggatggttttagattgtcatctcaagaagctgcttctagttttggcgatgatagactactaatagaaaaatttattgataatcctcgtcatatagaaatccaggttctaggtgataaacatgggaatgctttatggcttaatgaaagagagtgctcaattcagagaagaaatcagaaggtggtggaggaagcaccaagcatttttttggatgcggagactcgaagagcgatgggagaacaagctgtagctcttgccagagcagtaaaatattcctctgctgggaccgtggagttccttgtggactctaagaagaatttttatttcttggaaatgaatacaagactccaggttgagcatcctgtcacagaatgcattactggcctggacctagtccaggaaatgatccgtgttgctaagggctaccctctcaggcacaaacaagctgatattcgcatcaacggctgggcagttgaatgtcgggtttatgctgaggacccctacaagtcttttggtttaccatctattgggagattgtctcagtaccaagaaccgttacatctacctggtgtccgagtggacagtggcatccaaccaggaagtgatattagcatttattatgatcctatgatttcaaaactaatcacatatggctctgatagaactgaggcactgaagagaatggcagatgcactggataactatgttattcgaggtgttacacataatattgcattacttcgagaggtgataatcaactcacgctttgtaaaaggagacatcagcactaaatttctctccgatgtgtatcctgatggcttcaaaggacacatgctaaccaagagtgagaagaaccagttattggcaatagcatcatcattgtttgtggcattccagttaagagcacaacattttcaagaaaattcaagaatgcctgttattaaaccagacatagccaactgggagctctcagtaaaattgcatgataaagttcataccgtagtagcatcaaacaatgggtcagtgttctcggtggaagttgatgggtcgaaactaaatgtgaccagcacgtggaacctggcttcgcccttattgtctgtcagcgttgatggcactcagaggactgtccagtgtctttctcgagaagcaggtggaaacatgagcattcagtttcttggtacagtgtacaaggtgaatatcttaaccagacttgccgcagaattgaacaaatttatgctggaaaaagtgactgaggacacaagcagtgttctgcgttccccgatgcccggagtggtggtggccgtctctgtcaagcctggagacgcggtagcagaaggtcaagaaatttgtgtgattgaagccatgaaaatgcagaatagtatgacagctgggaaaactggcacggtgaaatctgtgcactgtcaagctggagacacagttggagaaggggatctgctcgtggagctggaatgaaggatttataacctttcagtcatcacccaatttaattagccatttgcatgatgctttcacacacaattgattcaagcattatacaggaacacccctgtgcagctacgtttacgtcgtcatttattccacagagtcaagaccaatattctgccaaaaaatcaccaatggaaattttcattgatataaatacttgtacatatgatttgtacttctgctgtgagattccctagtgtcaaaattaaatcaataaaactgagcatttgtct

SEQ ID NO: 38 - DNA, 1226 bp, Artificial
  cDNA Sequence
atttaccttcacgctggagccaagatcgctgcggggagtcccgtgaagcaccactgccctctaagaccttggaaggggaaacaccagaaggtgtgggtgctgagctccgctgcgtcagactgccaggacctgagtggaactcagtgctgaaacctgggttctcactgcagctggatagcagctctgcccggatggccctagtcttcgtgtacggcaccctgaagcggggtcagcccaaccacagggtcctgcgggacggcgcccacggctccgcagcctttcgggcgcgcggccgcacgctggagccctacccgttggtgatcgcgggggagcacaacatcccgtggctgctgcacctgcccggctcggggcgcctcgtggagggcgaggtctacgcggtagacgagcggatgctgcgctttctggatgacttcgagagttgcccggccctgtaccagcgcacggtgctgcgggtacagctgctggaggaccgggccccgggcgcagaggagccgccagcgcccaccgcggtgcagtgcttcgtgtacagcagggccaccttcccgccggagtgggcccagctcccgcaccatgacagctacgactccgaggggccgcacgggctgcgctacaacccccgggagaacagataagggggacgggcagggtgggcctaggtttgagagccctggggctccaagatgcgcccagcccatgctgggtgaaggcggaagccgaacagggccctttccaatgaatctgccggaaaggaaccaatctttcagtggcagctgattttacaaataatgttgagatacgaatagcaaggtgcttccctcccatctttctacctggtaagaaaaatttaggattttaactcccctaaatgacatttagagaactcgtgttatgcctaattcttcttcctcctcgtgttgtttctgctgttggctctgctttgagctcaagataataataaatatttaggatcagtgtaaagacttggtgttgccgctagattttagcagccctactatactgattctggcctgtaacccctgagaaagccgattttacacggctgggtagaatttgtagaaaagatccacagggcaagcatgctgtatatcagagtgcgtatagcaccattcttcctaattttcagatcaagcttcacagcaaatattaaagattatttaaatttgaagtcgatgttttgggaaatc

SEQ ID NO: 39 - DNA, 348 bp, Artificial
  cDNA Sequence
atgacaaagaaaagaaggaacaatggtcgtgccaaaaagggccgcggccacgtgcagcctattcgctgcactaactgtgcccgatgcgtgcccaaggacaacgccattaagaaattcgtcattcgaaacatagtggaggccgcagcagtcagggacatttctgaagcgagcgtcttcgatgcctatgtgcttcccaagctgtatgtgaagctacattactgtgtgagttgtgcaattcacagcaaagtagtcaggaatcgatctcgtgaagcccgcaaggaccgaacacccccacctcgatttagacctgcgggtgctgccccacgtcccccaccaaagcccatgtaa

SEQ ID NO: 40 - DNA, 588 bp, Artificial
  cDNA Sequence
atggcctcaggtaatgcgtgcatgggaaagcctgcccctaacttcaaggccacatccatggtggatggcgccttcaaagaggtgaagctgtcagactacaaagggaagtacgtggtcctctttttctaccctctggacttcacttttgtgtgccccacggagatcactgcagtcagcagccatgccgaggacttccgcaagctgggctgcgaagtgctgggcatcttggtggactctcagttcacccacctggcttggattaacatcccccggaaggagggaggcttgggccccctgaacatccccctgcttgctaatgtggcatctgaggattacggtgagctgaaaacagatgagtgcattgcctactggggcctctttatcattgatggcaagggtgtcctttgccagatcactgttaatgatttgcctgtgggacgctcattggatgaggctctgcagctggtccagaccatccagtacacggacgagcacagggaagtttgtcctgctggctggaagcttggcagtgacacaattaagctcaacgtggatgacggcgaggaatatttctccaaacaaaattag

SEQ ID NO: 41 - DNA, 1694 bp, Artificial
  cDNA Sequence
cgccgccttttcacgcacgtcgcgagctaacggactcggcggcggcggcggcggcggcctgcgccccacccgcaccccatctggaccgcatcgctgaatgtgcccggacctgcgccttctgggtctctgaaagaagatgaatttggctgagatttgtgataatgcaaagaaaggaagagaatatgcccttcttggaaattacgactcatcaatggtatattaccagggggtgatgcagcagattcagagacattgccagtcagtcagagatccagctatcaaaggcaaatggcaacaggttcggcaggaattattggaggaatatgaacaagttaaaagtattgtcagcactttagaaagttttaaaattgacaagcctccagatttccctgtgtcctgtcaagatgaaccatttagagatcctgctgtttggccaccccctgttcctgcagaacacagagctccacctcagatcaggcgtcccaatcgagaagtaagacctctgaggaaagaaatggcaggagtaggagcccggggacctgtaggccgagcacatcctatatcaaagagtgaaaagccttctacaagtagggacaaggactatagagcaagagggagagatgacaaggcaagatgctgtctttctggaaggaagaatatgcaagatggtgcaagtgatggtgaaatgccaaaatttgatggtgctggttatgataaggatctggtggaagcccttgaaagagacattgtatccaggaatcctagcattcattgggatgacatagcagatctggaagaagctaagaagttgctaagggaagctgttgttcttccaatgtggatgcctgactttttcaaagggattagaaggccatggaagggtgtactgatggttggacccccaggcactggtaaaactatgctagctaaagctgttgccactgaatgtggtacaacattcttcaacgtttcgtcttctacactgacatctaaatacagaggtgaatctgagaagttagttcgtctgttgtttgagatggctagattttatgcccctaccacgatcttcattgatgagatagattctatctgcagtcgaagaggaacctctgatgaacatgaggcaagtcgcagggtcaagtctgaactgctcattcagatggatggagttggaggagctttagaaaatgatgatccttccaaaatggttatggtattggctgctactaatttcccgtgggacattgatgaagctttgcgaagaaggttagaaaaaaggatatatatacctctcccaacagcaaaaggaagagctgagcttctgaagatcaaccttcgtgaggtcgaattagatcctgatattcaactggaagatatagccgagaagattgagggctattctggtgctgacatcactaatgtttgcagggatgcctctttaatggcaatgagacggcgtatcaatggcttaagtccagaagaaatccgtgcactttctaaagaggaacttcagatgcctgttaccaaaggagactttgaattggccctaaagaaaattgctaagtctgtctctgctgcagacttggagaagtatgaaaaatggatggttgaatttggatctgcttgaatttctgtcagctctttaatttctggtatttttgttgataaaatacgaagaaattcctgcaattttt

SEQ ID NO: 42 - DNA, 5798 bp, Artificial
  cDNA Sequence
cggaaacatgagagaggactatcatctgctccttgctctgaatttctttgaacctccatgctggaaccctcctcagttctccatgcaaacgttaaccaggcccctttgtggtgcttggtgctgcgctggtgcagagaatgcaaagacactgtctgtggtgggaaacagaaaagcagagtgaaccacacattccagcgccgggaaattgaggcaaaagaagcatgtgactggctccgtgctgccgggttcccgcaatacgctcagttatatgaggattcacaatttcccatcaacattgtggctgtcaagaatgatcatgattttcttgaaaaggaccttgtagaacctctttgcagacgactaaatacgttgaacaagtgtgcctcaatgaaacttgatgtgaacttccaaaggaaaaagggtgacgactccgatgaggaagatctttgtatcagcaacaaatggactttccaaagaaccagtcgcaggtggtctcgtgtggacgacctctacacgctgctccctcgaggagacagaaatgggtcaccgggaggcacggggatgaggaacacgaccagcagtgagagcgtcctcacagacctgagcgagcctgaggtctgctccattcacagcgaaagcagtggaggcagcgacagtcgcagccagccgggccagtgctgtacagacaacccggtcatgctggatgccccactcgtcagcagcagcctcccacagccccccagagatgtcctcaaccaccccttccaccccaagaatgagaagcccacgagggctagggccaaatcatttttgaaacgcatggaaacactccgagggaagggagcccacgggaggcataaggggtctgggcggacaggtggcctggtgatcagtgggcccatgttgcagcaggagccagagtcctttaaggctatgcagtgcatccaaataccaaatggagatctccagaattcgccgccacctgcctgcagaaaagggctcccatgctctggcaagtcgagtggcgagagcagcccgtcggagcacagcagcagcggggtgagcacgccctgcctgaaggaacgcaagtgccacgaggccaacaagcgcgggggcatgtacttggaggacctagatgtgctggcggggacagcactgccggatgcaggggaccaaagccgtatgcatgaatttcactcccaagagaatttggtggtgcatattcccaaggatcacaaaccaggaacattccccaaggcactttctattgaaagcctctctcccacagatagtagcaatggggttaattggaggaccggtagcatctccctgggcagagagcaggtccctggtgccagggagccccggctcatggcgtcctgccacagagccagccgagtcagtatctatgacaatgtccctggctcccatctgtatgccagcacaggagatcttttggacttggagaaagatgaccttttccctcacttggatgacattctgcagcatgtcaatgggctccaagaggtagtcgatgactggtccaaagatgtcttgcctgaactgcaaactcatgatacattggttggggaacctggcttatccacctttccatctcctaatcagatcaccttagattttgaaggtaactctgtctcagaaggtcggacgacacccagtgatgtggaaagagatgtaacatctcttaatgaatctgagcctcctggggtcagagacaggagggattctggtgtaggggcctctctgaccaggccaaacaggcgactccgatggaacagtttccagctgtcgcaccagccccggccggccccagcatcgccccacatcagcagccagacggccagccagctgagcctgctccagcgcttctcactgctccgcctcacggccatcatggagaagcactccatgtccaacaagcacggctggacatggtcagttccaaagttcatgaagaggatgaaagttcccgactacaaagacaaggctgtctttggcgttcctctcatagtccacgtccaaagaacgggacagcccctgcctcaaagtattcagcaagcactgagatatctacgcagcaactgcctcgatcaggtgggtctttttcgcaaatcaggagtgaagtctcgaatccatgcccttcgccaaatgaatgaaaacttccctgagaacgtcaactatgaagaccagtctgcttatgatgtggcggatatggtgaaacagttcttccgggacctccctgagcctcttttcaccaacaagctcagtgagacctttctccatatctatcagtatgtctccaaagagcagcggctgcaggccgtgcaggctgccatcctgctactggccgatgagaacagggaggtcctgcagacgctcttgtgtttcctgaacgacgtcgtcaacttggtggaagagaatcagatgacgcccatgaacctggcagtgtgtctggccccctccctctttcatcttaatttattgaagaaagaaagctctccacgagtcatacagaagaaatatgccactgggaagccagatcaaaaggacctcaacgagaatctggcagcagctcaggggctagcgcacatgatcatggaatgcgacagactttttgaggttccacacgagttggtggcccagtctcgtaactcgtatgtggaggctgagatccacgtgccaaccctggaagaattggggacacagctggaggagagtggggcaactttccacacttacctgaaccatctcatccagggcctccagaaagaagccaaggagaagttcaaaggatgggtcacgtgctccagcacggacaatacagatcttgctttcaaaaaggtgggcgacgggaacccgctgaagctgtggaaggcttctgtggaggtggaagcacccccctcagtggtcctgaaccgcgtgctgagagagcgccacctgtgggacgaggactttgtgcagtggaaggttgtggaaactctagacaggcaaacagagatctaccagtatgtgctgaacagcatggctccccatccttccagagactttgtggttctcaggacctggaaaactgatttgcccaaaggaatgtgtaccctggtgtccctctccgtggagcatgaggaagcccagctcctgggtggtgtgcgagcagtggtgatggactcgcagtacttgatagaaccgtgtggctctggcaagtcaagactgactcacatctgcaggatagacctgaaaggtcactccccagaatggtacagcaaaggctttggacatctgtgtgcagcagaagttgccaggattagaaactctttccagcccctcattgctgagggcccagaaactaaaatctgagttttgcccagtgtgacatcaaactcagggaagaggaagctaaagtgacgagtgtggcagagagtgtgcatgtgagaaagcgagagaaagaggaactgaaggacgcggttaatgcctaaaaatggaaacgttaagaagttggaatgttggagatgcaagaatttccaagaactttcttagccttcctggagatggctacatccctactaatataattttaaaatgagaactttatatatattacttaaaattaaatggactattccttgtgcattgcctaatttgctatttaaaggcttctaagaagcgtatacctaactgtaaataaatgtatgtatagcatatgtacatatgtgtgtatatctccatctttactgtatatatgtaaaataccaattttatatagaattgtgtgttttgaaaatgacggtgtctgactcagtgagtcccttcctcacacagttctttccaagtggctctgggccccatctctccactgtcctgtaagctgtgcagaacctgctgctaacaccaaggtgtgaacatgccctgatgcctaaccaaagatgagttaaccaaaggaaaataacattaaaggagacttatgtgttaacgctttgtttctgctattcaaaaactgagagtggagatctgggataaagcaaggaaataataattactcctccttaaagcaaatgggggggtgagaagtcattaccaaatttaaagctagatgaggagttgccactgggcccagtaagatggaatttcagtgagatatggaccaccggagtcagcgagagtgactgaaacagaagcgatacctctcgctcccatgcccatcactacagaccccaagtcaagatgaatatcatagcctttacttcttcacagccaaagggagcccctgtgttgtctcaagtttttataaatacatttcataatgttattaaatgtcattctatttgaccagtggcctatttggtcacagttaattggtgttttcttattgcactgaattcaactccagacaccatacaaagggagatgatggccattccgttcaaatcctagatcgttacagcttcagggaattcatattttgttatgtgtaggatactcttaaaatgtaattcattaaacttttacaatctgaaagacagggtttttaactaacatgagaccaaaactatgttctttgattagttttagatagtataatcgggtttattaattcttctgtgtttcttcactagccagtccaagctacctatgcatttgacccaaccttatttattattgtacagatgaagcgaattgactccctttagccaactgctaatggatcgaatgtgctttttattgtaattcaacagctatagagagaaagataacttattgtgtgtttgatttcagggagagagattttctttggtcatccataatagagattgataagatttagcaactggtgttggagaaaaaaagaaaagcaaatgagtgttttcaggtttttttgcattatatgcatttatgtaatgtttctgttatcagcaatgtgcaattattttattgagaggaataaaaaagctttctatgagtttggtatggtgcgaggaaaatcttacagtttgaattatgacctagaaatttttcattcccatatctacctaagaaggaagcagtaaatccataatttaccttttgggcaatgctttgtgagcaaaacaaagtcacttctgccataacatcttgaatttaaccatatatgccagattactttatatgcatcaacaagatcaccagtgaagtttaatctagctaaacactggtcctgctcctgagatgggatcctatgtgtttggaaaacgtgataggcacacgaggatgagtggctttgtatcgcccagagaggtgcttgtccagatttcacatgcacatgaattgcctggggatcttgtgaaactgcagactctgctccaagtaatctgggctgggcctgagattctgcatttctaaggagtctcagggatgcctatgctgctggcctaaaaccacactcagaaacgaggacctagaagatccctaaaacagaataagaacaaatgtgattgtatttctgattctccctctcttcgaattatctgacttttttgtttttgtgcacatagtaatcatatcaccgctgcataacaacacagtgcatctttttaaaacaaggaaaagggaaaaaaaggagaaaaaacgatgcatcaagcttgtttgtcaaataccacagtattttattcattgttatcttgccaatggaaataaagtatgatattgcatttaaatattatatttatacctcatgtatatttttacctcaattgttgatatcaatcatcaattgtaaataaataattgccaaggcaaataaattt

SEQ ID NO: 43 - DNA, 10747 bp, Artificial
  cDNA Sequence
agcgccggagcgggccgggctgaggcgcaggcggggagcgggcccggcgccgcggcgctggtggatgctggggctccgaggcgacggccggggggcgggggccgaggcaggtataacggtaccggcggcggcagcgccgctgctcttcccttctcctcaggaggggggccaatggctagcgagaagccgggcccgggcccggggctcgagcctcagcccgtggggctcattgccgtcggggccgctggcggaggcggcgggggcagcggtggtggcggcaccgggggcagcgggatgggggagctaaggggggcgtccggctccggctcggtgatgctccccgcggggatgattaacccttcggtgccgatccgcaacatccggatgaaattcgcagtgttgattggactcatacaggtcggagaggtcagcaacagggacatcgtggagacggtgctcaacctgctggttggtggagaatttgacttggagatgaactttattatccaggatgctgagagtataacatgtatgacagagcttttggagcactgtgatgtaacatgtcaagcagaaatatggagcatgtttacagccattctacgaaaaagtgttcggaatttacagactagcacagaagttgggctaattgaacaagtattgctgaaaatgagtgctgtagatgacatgatagcagatcttctagttgatatgttgggggttcttgccagctacagcatcactgtcaaggagttgaagcttttgttcagcatgcttcgaggagaaagtggaatctggccaagacatgcagtaaaattattatcagttcttaatcagatgccacagagacacggtcctgatacttttttcaatttccctggttgtagcgctgcggcaattgccttgcctcctattgcaaagtggccttatcagaatggcttcaccttaaacacttggtttcgtatggatccattaaataatattaatgttgataaggataaaccttatctttattgttttcgtactagcaaaggagttggttactctgctcattttgttggcaactgtttaatagtcacatcattgaagtccaaaggaaaaggttttcagcattgtgtgaaatatgattttcaaccacgcaagtggtacatgatcagcattgtccacatttacaatcgatggaggaacagtgaaattcggtgttatgttaatggacaactggtatcttatggtgatatggcttggcatgttaacacaaatgatagctatgacaagtgctttcttggatcatcagaaactgctgatgcaaatagggtattctgtggtcaacttggtgccgtgtatgtgttcagtgaagcactcaacccagcacagatatttgcaattcatcagttaggacctggatataagagtaccttcaagtttaaatctgagagtgatattcatttggcagaacatcataaacaggtgttatatgatgggaaacttgcaagtagcattgcctttacatataatgctaaggccactgatgctcagctctgcctggaatcatcaccaaaagagaatgcatcaatttttgtgcattccccacatgctctaatgcttcaggatgtgaaagcgatagtaacacattcaattcatagtgcaattcattcaattggagggattcaagtgctttttccactttttgcccaattggataataggcagctcaatgacagtcaagtggaaacaactgtctgtgctactctgttggcattcctggttgaactacttaaaagttcagtagccatgcaagaacagatgctgggtggaaaaggctttttagtcattggctacttacttgaaaagtcatcaagagttcatataactagagctgtcctggagcaatttttatcttttgcaaaataccttgatggtttatctcatggagcacctttgctgaagcagctttgtgatcacattttatttaacccagccatctggatacatacacctgcaaaggttcagctttccctatacacatatttgtctgctgaatttattggaactgctaccatctacaccaccatacgcagagtaggaacagtattacagctaatgcacaccttaaaatattactactgggttattaatcctgctgacagtagtggcattacacctaaaggattagatggtccccggccatcacaaaaagaaattatatcactgagggcatttatgctactttttctgaaacagctgatactaaaggatcgaggggtcaaggaagatgaacttcagagtatattaaattacctacttacgatgcatgaggatgaaaatattcatgatgtgctacagttactggtggctttaatgtcggaacacccagcctcaatgataccagcatttgatcaaagaaatggaataagggtgatctacaaattattggcttctaaaagtgaaagtatttgggttcaagctttgaaggttctgggatactttctgaagcatttaggtcacaagagaaaagttgaaattatgcacacccatagtcttttcactcttcttggagaaaggctgatgttgcatacaaacactgtgactgtcaccacatacaacacactttatgagatcttgacagaacaagtatgtactcaggtcgtacacaaaccacatccagagccagattctacagtgaaaattcagaatccaatgattcttaaagtggtggcaactttgttaaaaaactctacaccaagtgcagagctgatggaagttcgtcgtttatttttatctgatatgataaaacttttcagtaacagccgtgaaaatagaagatgcttattgcagtgttcagtgtggcaggattggatgttttctcttggctatatcaatcctaaaaattctgaggaacagaagattaccgaaatggtctacaatatcttccggattcttttgtatcatgcaataaaatatgaatggggaggctggagagtctgggtggataccctctcaatagcccattccaaggtcacttatgaagctcataaggaatacctagccaaaatgtatgaggaatatcaaagacaagaggaggaaaacattaaaaagggaaagaaagggaatgtgagcaccatctctggtctttcatcacagacaacaggagcaaaaggtggaatggaaattcgagagatagaagatctttcacaaagccagagcccagaaagtgagaccgattaccctgtcagcacagatactcgagacttactcatgtcaacaaaagtgtcagatgatattcttggaaattcagatagaccaggaagtggtgtacatgtggaagtacatgatcttttagtagatataaaagcagagaaagtggaagcaacagaagtaaagctcgatgatatggatttatcaccggagactttagtaggtggagagaatggtgcccttgtggaggttgaatctctgttggataatgtatatagtgctgctgttgagaaactccagaacaatgtacatggaagtgttggtatcattaaaaaaaatgaagaaaaggataatggtccattgataacattagcagatgagaaagaagaccttcccaatagtagtacatcatttctctttgataaaatacccaaacaggaggaaaaactacttcctgaactttctagcaatcacattattccaaatattcaggacacacaagtacatcttggtgttagtgatgatcttggattgcttgctcacatgaccggtagcgtagacttaacttgtacatccagtataatagaagaaaaagaattcaaaatccatacaacttcagatggaatgagcagtatttctgaaagagacttagcgtcatcaactaaggggctggagtatgctgaaatgactgctacaactctggaaactgagtcttctagtagcaaaattgtaccaaatattgatgcaggaagtataatttcagatactgaaaggtctgacgatggcaaagaatcaggaaaagaaatccgaaaaatccaaacaactactacgacacaagctgtgcagggtcggtctatcacccaacaagaccgagatctccgagttgatttaggatttcgaggaatgccaatgactgaggaacagcgacgccagtttagcccaggtccacggactacaatgtttcgtattcctgagtttaaatggtctccaatgcaccagcggcttctcactgatttactatttgcattagaaactgatgtacatgtttggaggagccattctacaaagtctgtaatggattttgtcaatagcaatgaaaatattatttttgtacataacacaattcacctcatttcccaaatggtagacaacatcatcattgcttgtggaggaattttacctttgctctctgctgctacatcaccaactacggaattggaaaatattgaagtgacacaaggcatgtcagctgagacagcagtaactttcctcagccggctgatggctatggttgatgtacttgtgtttgcaagctctctaaattttagtgagattgaagctgagaaaaacatgtcttctggaggtttaatgcgacagtgcctaagattagtttgttgtgttgctgtgagaaactgtttagaatgtcggcaaagacagagagacaggggaaataaatcttcccatggaagcagtaaacctcaggaagttcctcaaagtgtgactgctacagcagcttcgaagactccattggaaaatgttccaggtaacctttctcctattaaggatccggatagacttcttcaggatgttgatatcaatcgccttcgtgctgttgtctttcgggatgtggatgatagcaaacaagcacagttcttagctctggctgttgtttacttcatttcggttctgatggtttccaagtatcgtgacatattagaaccccagagagagactacaagaactggaagccaaccaggtagaaacatcaggcaagaaataaattcaccaacaagtacagttgtggtcataccatctatccctcatccaagtttgaaccatggattccttgccaagttaattcctgagcagagctttggccactcattttacaaagaaacacctgctgcatttccagacaccataaaagaaaaagaaacaccaactcctggtgaagatattcaggtagaaagttcaattccccatacagattcaggaattggagaggagcaagtggctagcatcctgaatggggcagaattagaaacaagtacaggccctgatgccatgagtgaactcttatccactttgtcatccgaagtgaagaaatcacaagagagcttaactgaaaatcctagtgaaacgttgaagcctgcaacatccatatctagcattagtcaaaccaaaggcatcaatgtgaaggaaatactgaaaagtcttgtggctgctccagttgaaatagcagaatgtggccctgaacctatcccatacccagatccagcattgaagagagaaacacaagctattcttcctatgcagtttcattcctttgacaggagtgttgtggtgcctgtaaagaaaccacctccaggtagtttagctgtaaccactgtgggagccactactgctggaagtgggctgccaacaggcagtacctctaatatatttgctgctactggagctacaccaaaaagtatgattaatacaacaggtgccgtggattcagggtcctcctcctcttcctcctcttctagttttgtgaatggtgctactagcaaaaaccttccagctgtacaaactgttgctccaatgccagaagattcagctgaaaatatgagcatcactgcaaaacttgaaagagcgttagaaaaagttgctcctcttcttcgtgaaatttttgtagactttgccccattcctatctcgtacacttcttggcagtcatggacaagagctattgatagaaggccttgtttgtatgaagtccagcacatctgtggttgagcttgttatgctgctttgttctcaggaatggcaaaactctattcagaagaatgcaggacttgcatttattgagctcatcaatgaaggaagattactgtgccatgctatgaaggaccatatagtccgtgttgcaaatgaagctgagtttattttgaacagacaaagagccgaggatgtacataaacatgcagagtttgagtcacagtgtgcccaatatgctgctgatagaagagaggaagaaaagatgtgtgaccatcttatcagtgctgctaaacatcgagatcatgtaacagcaaatcagctgaaacagaagattctcaatattctcacaaataaacatggtgcttggggagcagtttctcatagccaattgcatgatttctggcgtttggattactgggaagatgatcttcgtcgaaggagacgatttgttcgcaatgcatttggctccactcatgctgaagcattgctgaaagctgcaatagaatatggcacggaagaagatgtagtaaagtcaaagaaaacattcagaagtcaagcaatagtgaaccaaaatgcagagacagaacttatgctggaaggagacgatgatgcagtcagtctgctacaggagaaagaaattgacaaccttgcaggcccagtggttctcagcacccctgcccagctcatcgctcccgtggtggtggccaaggggactctctccatcaccacgacagaaatctacttcgaggtagatgaggatgattctgccttcaagaagatcgacacgaaagttcttgcatacactgagggacttcacggaaaatggatgttcagcgagatacgagctgtattttcaagacgttaccttctacaaaacactgctttggaagtatttatggcaaaccgaacctcagttatgtttaatttccctgatcaagcaacagtaaaaaaagttgtctatagcttgcctcgggttggagtagggaccagctatggtctgccacaagccaggaggatatcattggccactcctcgacagctttataaatcttccaatatgactcagcgctggcaaagaagggaaatttcaaacttcgaatatttgatgttccttaatactattgcaggacggacatataatgatctgaaccaatatccagtgtttccgtgggtgttaaccaactatgaatcagaagagttggacctgactcttccaggaaacttcagggatctatcaaagccaattggtgctttgaaccccaagagagctgtgttttatgcagagcgttatgagacatgggaagatgatcaaagcccaccctaccattataatacccattattcaacagcaacatctactttatcctggcttgttcgaattgaacctttcacaaccttcttcctcaatgcaaatgatggaaaatttgatcatccagatcgaaccttctcatccgttgcaaggtcttggagaactagtcagagagatacttctgatgtaaaggaactaattccagagttctactacctaccagagatgtttgtcaacagtaatggatataatcttggagtcagagaagatgaagtagtggtaaatgatgttgatcttcccccttgggcaaaaaaacctgaagactttgtgcggatcaacaggatggccctagaaagtgaatttgtttcttgccaacttcatcagtggatcgaccttatatttggctataagcagcgaggaccagaagcagttcgtgctctgaatgtttttcactacttgacttatgaaggctctgtgaacctggatagtatcactgatcctgtgctcagggaggccatggaggcacagatacagaactttggacagacgccatctcagttgcttattgagccacatccgcctcggagctctgccatgcacctgtgtttccttccacagagtccgctcatgtttaaagatcagatgcaacaggatgtgataatggtgctgaagtttccttcaaattctccagtaacccatgtggcagccaacactctgccccacttgaccatccccgcagtggtgacagtgacttgcagccgactctttgcagtgaatagatggcacaacacagtaggcctcagaggagctccaggatactccttggatcaagcccaccatcttcccattgaaatggatccattaatagccaataattcaggtgtaaacaaacggcagatcacagacctcgttgaccagagtatacaaatcaatgcacattgttttgtggtaacagcagataatcgctatattcttatctgtggattctgggataagagcttcagagtttattctacagaaacagggaaattgactcagattgtatttggccattgggatgtggtcacttgcttggccaggtccgagtcatacattggtggggactgctacatcgtgtccggatctcgagatgccaccctgctgctctggtactggagtgggcggcaccatatcataggagacaaccctaacagcagtgactatccggcaccaagagccgtcctcacaggccatgaccatgaagttgtctgtgtttctgtctgtgcagaacttgggcttgttatcagtggtgctaaagagggcccttgccttgtccacaccatcactggagatttgctgagagcccttgaaggaccagaaaactgcttattcccacgcttgatatctgtctccagcgaaggccactgtatcatatactatgaacgagggcgattcagtaatttcagcattaatgggaaacttttggctcaaatggagatcaatgattcaacacgggccattctcctgagcagtgacggccagaacctggtcaccggaggggacaatggggtagtagaggtctggcaggcctgtgacttcaagcaactgtacatttaccctggatgtgatgctggcattagagcaatggacttgtcccatgaccagaggactctgatcactggcatggcttctggtagcattgtagcttttaatatagattttaatcggtggcattatgagcatcagaacagatactgaagataaaggaagaaccaaaagccaagttaaagctgagagcacaagtgctgcatggaaaggcaatatctctggtggaaaaaactcgtctacatcgacctccgtttgtacattccatcacacccagcaatagctgtacattgtagtcagcaaccattttactttgtgtgttttttcacgactgaacaccagctgctatcaagcaagcttatatcatgtaaattatatgaattaggagatgttttggtaattatttcatatattgttgtttattgagaaaaggttgtaggatgtgtcacaagagacttttgacaattctgaggaaccttgtgtccagttgttacaaagtttaagctttgaacctaacctgcatcccatttccagcctcttttcaagctgagaaaaaaaaaaaaaaacacgtttgatactttgtacatcagatgcatcttatttaaaagggatacttttgtaaaagtaaaaccttgtataaagaacaaaatgtttcttaattttattgtggagttacaacttgcatgttccttactcctgttggcttgatggaacaggtgcattcacactatgaaacagaaagatctgtccaaggacacagcttgtatgaaagggttgaatttgggctccatcagtaatttttgacattttcaccaaaatatagtttgcactttttaatctaaagtcatcccttctgagtgaaatttgctcataaagcatttggatactaagccattatttgccattttgggtactttatacaaagaaaattcagccctaccctgcataatttgaagacacagcagaaagggggcttagggatgaggtcctggtttttcttgtataaataggagtcatgggcgttagttctgtagtaataacttcccagcacctggacatctcttccagagttatcccactggcttggtgtgtatacattaggggaggataatctgatgctaactttttttttctctttggttcttgaatagcttagtttctttaataacaagtcaaactttattacaacaataactgaagttattcttttaggttctcgtgaaattctcactgaaagccacattcttagcctaaggcatttcatcttttatgatataaaatgatggctatcaaatgattttccatacattgtactgatcaagttatacacccaggggtatatacactttcttcatgtttcttctttgtatatttggtgactgtatcgtcatagatgtacatattgtgtcggtagggctatgaggcatgttacaggaatgtaattttctcagaatttacactcactcgcagtcatttatttaaaaagataaaacaagataatgggttctttgtattggcactttgcaccagaaacatatcattatttattgatgtgattacttatttgttatccaccttgtactagtaagttttagcactgaattccttcttcactgttgtttgtatttatgaaattctgaaattatggggaatcagcgtaatgattaagttattcatcaccaggctgtaagcaatatcttgagtttgtagcttagaattgggaggatacttaacatctggaagacaagttcatttcatcttgagatcatggtgaaatattttggatatataaattccttaagctattgtaaccatgttttattgcaaagatgtaaaatatgccagatgtgtgtgagttggaaatcaaaaaaagaaaaataaaatatgcaaagaattc

SEQ ID NO: 44 - DNA, 687 bp, Artificial
  cDNA Sequence
atggcagagcaagagcaaagaaaaatccctttggttctagaaaatctgaaaaagaggaaggcttatcaagccctcaaagccactcaggcaaagcaggcacttttagcaaagaaggagcagaagaaaggaaaacagctcaggtttaagcgactggaatcattcctatatgattcctcgtggcagaaacacgacaagctgcatctcagacaactagaagtgaaacctcatgccttggaattgccagataaacattccttggcctttgttttacgcatccaaagaattaatggtgtgacttcactggtgcagagaaccattgcaagactttgcctgaagaaaattttcagtggtatctttgtaaaagtcaccccaaagagcaaaatgttgcttatagtagaaccttatgtgaactggggatttccactaaagtctgtccaagaactcattttgaaacatgaacaagccaaggtcaagaatgagaccatccctctgacagacagcacagcaattgaggagcacctgggggagtttggtgtcatttgcctgggagacctcatacatgaaattgccttcccagggaagtatttccaggagatctcatgggtcttgcaccctttccacctctcggtggcccatcatgctaccaagaatagagtgggcttcctcaaggagatggcctcacctggg

SEQ ID NO: 45 - DNA, 2179 bp, Artificial
  cDNA Sequence
gcacttcagcttcccctcccccggcgccctctggggctccgagcccggcgggaccatgttcaccagcaccggctccagtgggctctacaaggcgcctctgtcgaagagccttctgctggtccccagtgccctctccctcctgctcgccctcctcctgcctcactgccagaagctctttgtgtatgaccttcacgcagtcaagaacgacttccagatttggaggttgatatgtggaagaataatttgccttgatttgaaagatactttctgcagtagtctgcttatttataattttaggatatttgaaagaagatatggaagcagaaaatttgcatcctttttgctgggttcctgggttttgtcagccttatttgactttctcctcattgaagctatgcagtatttctttggcatcactgcagctagtaatttgccttctggattcctggcacctgtgtttgctctgtttgtaccattttactgctccataccaagagtccaagtggcacaaattctgggtccgttgtccatcacaaacaagacattgatttatatattgggactgcagcttttcacctctggttcctacatctggattgtagccataagtggacttatgtccggtctgtgctacgacagcaaaatgttccaggtgcatcaggtgctctgcatccccagctggatggcaaaattcttttcttggacacttgaacccatcttctcttcttcagaacccaccagcgaagccagaattgggatgggagccacgctggacatccagagacagcagagaatggagctgctggaccggcagctgatgttctctcagtttgcacaagggaggcgacagagacagcagcagggaggaatgatcaattggaatcgtctttttcctcctttacgtcagcgacaaaacgtaaactatcagggcggtcggcagtctgagccagcagcgccccctctagaagtttctgaggaacaggtcgcccggctcatggagatgggattttccagaggtgatgctttggaagccctgagagcttcaaacaatgacctcaatgtcgccaccaacttcctgctgcagcactgatagtcccaggccaacactgggaccggaccggcagccgagtgacagtgcgtggtccccaccatcagatcagcccggggaccgagcatctctggtgctgatgttcttgtgggaagagggaggttccaccgcacccctgccctcaaccgcaagactgttgccgttttagtgtggagataagtttgccattacattagcatgtattttctatctatattttttattgggcattttccctaggttggagagtcagcactcgttttgaatgtgtttaaaatgcattaaaatggaagatttctgcaggcagttgaatggcactccagatggggaattgctgtaaccctcttactgtaacatgtcatctcctgcgtcgtgatggggagagggtaatgttacttcacaaaggacatgtcagatccttcttcatggacttttttagttactgttttttctctcaaacttgttttcgaatctcctgggagtgagggagaaacagggagctgaatcctcccccaagctgttccaggccagaggactctgcagtaccttctcctacatctagtaacaaagaatggtgataaccatgcactggttcaaggttctggagttctccatgaaacttgggttaattttgctcagagtatccagagttagccactaggctgcgggtgaaatgggatggagaagaacaacagcaggcttcctggagccacatgggctgactagggcactctgtggctggcctggcatgggctcagcccaggaagaggagaaacgatcccttgcctgcccctccctgtggcagggctaactgcctggccctcctggctcgcagccagccagccccctggcagcaggttctcctcagggcttgggtcttcaacctgtggcgacaggaggcagggcagactgtggaggacaggatgcaggtcagggagagggaaggcaggggtggaccgccatgagcatgaaaagacccgaagcaagttgactcttgcaatgtgcaactgttatgttctgcaaaatgagcaacgatgtatcaaattgatgcaaatttagatgttgatacttacaataaagtttttaatgtgt

SEQ ID NO: 46 - DNA, 2525 bp, Artificial
  cDNA Sequence
atgttcaccagcaccggctccagtgggctctgtgagtaccggcctccgccatcctggctgccccctacacgccaccctaggcacctctttgaggaggctggggcagcggggaccctcgggtttgccggaggtggtggggccgaccctccagacccgcgtccgaaccctgctagttcccggtcttgggggtcagcggaaaccgcccccatttcggcctggaggggcgaatggggacaaagccccgccgcccgccccgaccccacctggtatccccaggtgctctgcccaggagtctcttggggccgctgcaagtgggcaggtgccctggtgttctcgtgggccggccccaggccctttgcggagcgtgtgccgcgctgaaggaaggggccgtcccccttaccatgccccattcttttaggcttgggggaccgaactaactccccccgcccccacttgcaaagttcagcctccgctttagaagctgacctctcagtttcacttggatgtgtttcttcttcagtctccaagaagagtttttagacaaacacacactgatgagagtgctttcaagtggagggaagttaggaagtcgtggcgagggagcgcagctgtgctgctggatgttgctgttttcctggcgtgttagcggtggtcagcagacaaggcgcctctgtcgaagagccttctgctggtccccagtgccctctccctcctgctcgccctcctcctgcctcactgccagaagctctttgtgtatgaccttcacgcagtcaagaacgacttccagcctggcacctgtgtttgctctgtttgtaccattttactgctccataccaagagtccaagtggcacaaattctgggtccgttgtccatcacaaacaagacattgatttatatattgggactgcagcttttcacctctggttcctacatctggattgtagccataagtggacttatgtccggtctgtgctacgacagcaaaatgttccaggtgcatcaggtgctctgcatccccagctggatggcaaaattcttttcttggacacttgaacccatcttctcttcttcagaacccaccagcgaagccagaattgggatgggagccacgctggacatccagagacagcagagaatggagctgctggaccggcagctgatgttctctcagtttgcacaagggaggcgacagagacagcagcagggaggaatgatcaattggaatcgtctttttcctcctttacgtcagcgacaaaacgtaaactatcagggcggtcggcagtctgagccagcagcgccccctctagaagtttctgaggaacaggtcgcccggctcatggagatgggattttccagaggtgatgctttggaagccctgagagcttcaaacaatgacctcaatgtcgccaccaacttcctgctgcagcactgatagtcccaggccaacactgggaccggaccggcagccgagtgacagtgcgtggtccccaccatcagatcagcccggggaccgagcatctctggtgctgatgttcttgtgggaagagggaggttccaccgcacccctgccctcaaccgcaagactgttgccgttttagtgtggagataagtttgccattacattagcatgtattttctatctatattttttattgggcattttccctaggttggagagtcagcactcgttttgaatgtgtttaaaatgcattaaaatggaagatttctgcaggcagttgaatggcactccagatggggaattgctgtaaccctcttactgtaacatgtcatctcctgcgtcgtgatggggagagggtaatgttacttcacaaaggacatgtcagatccttcttcatggacttttttagttactgttttttctctcaaacttgttttcgaatctcctgggagtgagggagaaacagggagctgaatcctcccccaagctgttccaggccagaggactctgcagtaccttctcctacatctagtaacaaagaatggtgataaccatgcactggttcaaggttctggagttctccatgaaacttgggttaattttgctcagagtatccagagttagccactaggctgcgggtgaaatgggatggagaagaacaacagcaggcttcctggagccacatgggctgactagggcactctgtggctggcctggcatgggctcagcccaggaagaggagaaacgatcccttgcctgcccctccctgtggcagggctaactgcctggccctcctggctcgcagccagccagccccctggcagcaggttctcctcagggcttgggtcttcaacctgtggcgacaggaggcagggcagactgtggaggacaggatgcaggtcagggagagggaaggcaggggtggaccgccatgagcatgaaaagacccgaagcaagttgactcttgcaatgtgcaactgttatgttctgcaaaatgagcaacgatgtatcaaattgatgcaaatttagatgttgatacttacaataaagtttttaatgtgtttt

SEQ ID NO: 47 - DNA, 2808 bp, Artificial
  cDNA Sequence
ggcactgaacttactacatcagaactcctgctgaggtataagaggatacgtctaataactcaattgctgtaaacctatgattgtttttctggtttttaaacatctcttcagcctcagattgattacaatgttctttctacttcatttcatcgttctgatcaatgtcaaagattttgcactgactcaaggtagcatgatcactccttcatgccaaaaaggatattttccctgtgggaatcttaccaagtgcttaccccgagcttttcactgtgatggcaaggatgactgtgggaacggggcggacgaagagaactgtggtgacactagtggatgggcgaccatatttggcacagtgcatggaaatgctaacagcgtggccttaacacaggagtgctttctaaaacagtatccacaatgctgtgactgcaaagaaactgaattggaatgtgtaaatggtgacttaaagtctgtgccgatgatttctaacaatgtgacattactgtctcttaagaaaaacaaaatccacagtcttccagataaagttttcatcaaatacacaaaacttaaaaagatatttcttcagcataattgcattagacacatatccaggaaagcattttttggattatgtaatctgcaaatattatatctcaaccacaactgcatcacaaccctcagacctggaatattcaaagacttacatcagctaacttggctaattctagatgacaatccaataaccagaatttcacagcgcttgtttacgggattaaattccttgtttttcctgtctatggttaataactacttagaagctcttcccaagcagatgtgtgcccaaatgcctcaactcaactgggtggatttggaaggcaatagaataaagtatctcacaaattctacgtttctgtcgtgcgattcgctcacagtgctgtttctgcctagaaatcaaattggttttgttccagagaagacattttcttcattaaaaaatttaggagaactggatctgtctagcaatacgataacggaactatcacctcacctttttaaagacttgaagcttctacaaaagctgaacctgtcatccaatcctcttatgtatcttcacaagaaccagtttgaaagtcttaaacaacttcagtctctagacctggaaaggatagagattccaaatataaacacacgaatgtttcaacccatgaagaatctttctcacatttatttcaaaaactttcgatactgctcctatgctccccatgtccgaatatgtatgcccttgacggacggcatttcttcatttgaggacctcttggctaacaatatcctcagaatatttgtctgggttatagctttcattacctgctttggaaatctttttgtcattggcatgagatctttcattaaagctgaaaatacaactcacgctatgtccatcaaaatcctttgttgtgctgattgcctgatgggtgtttacttgttctttgttggcattttcgatataaaataccgagggcagtatcagaagtatgccttgctgtggatggagagcgtgcagtgccgcctcatggggttcctggccatgctgtccaccgaagtctctgttctgctactgacctacttgactttggagaagttcctggtcattgtcttccccttcagtaacattcgacctggaaaacggcagacctcagtcatcctcatttgcatctggatggcgggatttttaatagctgtaattccattttggaataaggattattttggaaacttttatgggaaaaatggagtatgtttcccactttattatgaccaaacagaagatattggaagcaaagggtattctcttggaattttcctaggtgtgaacttgctggcttttctcatcattgtgttttcctatattactatgttctgttccattcaaaaaaccgccttgcagaccacagaagtaaggaattgttttggaagagaggtggctgttgcaaatcgtttcttttttatagtgttctctgatgccatctgctggattcctgtatttgtagttaaaatcctttccctcttccgggtggaaataccagacacaatgacttcctggatagtgatttttttccttccagttaacagtgctttgaatccaatcctctatactctcacaaccaacttttttaaggacaagttgaaacagctgctgcacaaacatcagaggaaatcaattttcaaaattaaaaaaaaaagtttatctacatccattgtgtggatagaggactcctcttccctgaaacttggggttttgaacaaaataacacttggagacagtataatgaaaccagtttcctagcaatcattttggatcactggactttcagtggactacctaaaacaggggacagcttttggaagatgacatctgcaatgcttttcatctttaccaacggcaagcctttctgcacagagagcacagcagaatggctcctgtcactgcattccaatggcagctgtactatctaccaaccatgctgaggacagcaccaaaggttcctctcctcaccccacatgcctgaaaagcacatgtgaattcgtgtatagtgggctgaggtgcagctgatctctagctaatcaacacaacccaccaacaaatgaccacaggttggcactgtgtggtctttcacatcgggttgcactgtccatgaaatagaaacactcacaacatctgattccagtgtggccataataacagaaatctaacaactctttccttgccttttcaatatcaaataaaaccatcagcatcctgctggattgata

SEQ ID NO: 48 - DNA, 957 bp, Artificial
  cDNA Sequence
atggcagcgccaccttctccaggaaggacggccgaccaagcagaccaggtatgcaccttcctcttcaaaaagcctggacggaaaggggctgcaggcctcagaaagcgcccggcctgcgaccccgagcacggagagagcagcagcagcggggacgagggcgacacagtggctcagcccccgcgggtggcaccgaggccccggggcctccacagctggcagaaggcggctcacggcgacaggaggggcgaggaggcggcgcctgagagcctcgacgtggtgtacaggtccacccgctcggcgaagcctgtggggccagaggacatgggggccaccgctgacttcgagcaggacaccgagaaggagcaccatacgccgaccatcctcaagtgcagccagcgggtccaggaggcactgcggggtcgggagcacgaccacatctaccggggaatccacagctacctgaggtacctgaagcccaaggacacgtccatgggcaactcctcctcggggatggcgaggaagggccccatacgtgcgccagggcatctgcgcgccactgtgcgctgggattaccagcctgacatctgcaaggactacaaggagactggcttctgtggcttcggggacagctgcaaattcctccacgaccgttccgattacaagctcgggtgggagattgaacgggagcttgaagagggtcgctactgtatctgcgaggacgaaaaccatgaagtgggaagcgaggaagaggaaataccattcaggtgtttcatatgtcgccaggccttccaaaacccagtcgtcaccaagtgcaggcattatttctgcgagagctgcgcgctggagcacttccgggccaccccgcgctgctacatctgtgaccagccaaccggcggcatctttaaccccgccaaagaactgatggcgaaactgcaaaagcttcaggctgcagaaggt

SEQ ID NO: 49 - DNA, 3528 bp, Artificial
  cDNA Sequence
gcgacccggagcccgctccccacccaccccgcctgctccgccctcccctccgccccgcgccacctttgatggctcggacctcagccggccaccgccagccctgctcgcgcgcccgcgccgccgccgcccgcgggtattaatagccggcgccgccgcgccctcggccgccgggggcttgggagccgccgatcccggagcccgagccgggagagggagccgccgcagccgccggcgctgtggagatattctctaagccgctttcatcatgggagaaatagagcagaggccgaccccaggatcacgactgggggccccggaaaattcggggatcagtaccttggaacgtggacagaagccgcccccaacaccttcaggaaaactcgtgtccatcaaaatccagatgctggatgacacccaggaggcatttgaagttccacaaagagctcctgggaaggtgctgctggatgcagtttgcaaccacctcaacctcgtggaaggtgactattttggcctcgagtttcctgatcacaaaaagatcacggtgtggctggatctcctaaaacccattgtgaaacagattagaaggccaaagcacgttgttgttaagtttgtggtgaaattctttccgcctgaccacacacaactccaagaagaactcacaaggtacctgttcgcgctgcaggtgaagcaggacttggctcaaggcaggttgacgtgtaatgacaccagcgcagctctcttgatttcacacattgtgcaatctgagattggggattttgatgaagccttggacagagagcacttagcaaaaaataaatacatacctcagcaagacgcactagaggacaaaatcgtggaatttcaccataaccacattggacaaacaccagcagaatcagatttccagctcctagagattgcccgtcggctagagatgtatggaatccggttgcacccggccaaggacagggaaggcacgaagatcaatctggccgttgccaacacgggaattctagtgtttcagggtttcactaagatcaatgccttcaactgggccaaggtgcggaagctgagcttcaagaggaagcgctttctcatcaagctccggccagatgccaatagtgcgtaccaggataccttggaattcctgatggccagtcgggatttctgcaagtccttctggaaaatctgtgttgaacatcatgccttctttagactttttgaagagcccaaaccaaagcccaagcccgtcctctttagccgggggtcatcatttcggttcagtggtcggactcagaagcaggttctcgactatgttaaagaaggaggacataagaaggtgcagtttgaaaggaagcacagcaagattcattctatccggagccttgcttcacagcctacagaactgaattcggaagtgctggagcagtctcagcagagcaccagccttacatttggagaaggtgccgaatctccagggggccagagctgccggcgaggaaaggaaccgaaggtttccgccggggagccggggtcgcacccgagccctgcgccgaggagaagccccgcgggtaacaagcaggcggacggagccgcctcggcgcccacggaggaagaggaggaggtcgttaaggataggacccagcagagtaaacctcagcccccgcagccaagcacaggctccctgactggcagtcctcacctttccgagctgtctgtgaactcgcaggggggagtggcccctgccaacgtgaccttgtctcccaacctgagccccgacaccaagcaggcctctcccttgatcagcccgctgctgaatgaccaggcctgcccccggacggacgatgaggatgagggccggaggaagagattcccaactgataaagcgtacttcatagctaaggaagtgtctaccaccgagcgaacatatctgaaggatctcgaagttatcacttcgtggtttcagagcacagtgagcaaagaggacgccatgccggaagcactgaaaagtctcatattcccgaattttgaacctttgcacaaatttcatactaattttctcaaggaaattgagcaacgacttgccctgtgggaaggccgctcaaatgcccaaatcagagattaccaaagaatcggcgatgtcatgctgaagaacattcagggcatgaagcacctggcggctcacctgtggaagcacagcgaggccttggaggccctggagaatggaatcaagagctcccggcggctggagaacttctgcagagactttgagctgcagaaggtgtgttacctaccgctcaacaccttcctcctgcggccactgcaccggctcatgcactacaagcaggtcctggagcggctgtgcaaacaccacccgccgagccacgccgacttcagggactgccgagccgctttggcagagatcacggagatggtggcacagctccacggtacgatgatcaagatggagaatttccagaagctgcacgaactcaagaaagatttgattggcattgacaatcttgtggttccgggaagggagttcatccgtctgggcagcctcagcaagctctcggggaaggggctccagcagcgcatgttcttcctgttcaacgacgtcctgctatacacgagccgggggctgacggcctccaatcagtttaaagtccacgggcagctcccgctctatggcatgacgattgaggagagcgaagacgagtggggggtgccccactgcctgaccctccggggccagcggcagtccatcatcgtggccgccagttctcggtccgagatggagaagtgggttgaggacatccagatggccattgacctggcggagaagagcagcagccccgcccctgagttcctggccagcagcccccctgacaacaagtcccctgatgaagccaccgcggctgaccaggagtcagaggatgacctgagcgcctcgcgcacatcgctggagcgccaggccccgcaccgcggcaacacaatggtgcacgtgtgctggcaccgcaacaccagcgtctccatggtggacttcagcatcgcagtggagaatcagttgtctggaaacctgctgaggaaattcaaaaacagcaacgggtggcagaagctgtgggtggtgttcacaaacttctgcctgttcttctacaaatcacaccaggacaatcatccccttgccagcctgcctctgctcggctactcgctcaccatcccctctgagtccgagaacatccagaaagactacgtgttcaagctgcacttcaagtcccacgtctactacttcagggcggaaagcgagtacacgttcgaaaggtggatggaagtgatccgcagtgccaccagctctgcctcgcgaccccacgtgttgagtcacaaagagtctcttgtgtattgatggccggacacactcgtttccgcagtggctgctttcctggaagacgtttcctttcttctgtattaatgaagcctggtaaaattaacacctgtctgaaaatcaaaaacatggcttcccagcagctc

SEQ ID NO: 50 - DNA, 1017 bp, Artificial
  cDNA Sequence
atggggaaaaaacagaacagaaaaactggaaactctaaaacgcagagcgcctctcctcctccaaaggaacgcagttcctcaccagcaacagaacaaagctggatggagaatgattttgacgagctgagagaagaaggcttcagacgatcaaattactctgagctacgggaggacattcaaaccaaaggcaaagaagttgaaaactttgaaaaaaatttagaagaatgtataactagaataaccaatacagagaagtgcttaaaggagctgatggagctgaaaaccaaggctcgagaactacgtgaagaatgcagaagcctcaggagccgatgcgatcaactggaagaaagggtatcagcaatggaagatgaaatgaatgaaatgaagcgagaagggaagtttagagaaaaaagaataaaaagaaatgagcaaagcctccaagaaatatgggactatgtgaaaagaccaaatctacgtctgattggtgtacctgaaagtgatgtggagaatggaaccaagttggaaaacactctgcaggatattatccaggagaacttccccaatctagcaaggcaggccaacgttcagattcaggaaatacagagaacgccacaaagatactcctcgagaagagcaactccaagacacataattgtcagattcaccaaagttgaaatgaaggaaaaaatgttaagggcagccagagagaaaggtcgggttaccctcaaaggaaagcccatcagactaacagcggatctctcggcagaaaccctacaagccagaagagagtgggggccaatattcaacattcttaaagaaaagaattttcaacccagaatttcatatccagccaaattaagcttcataagtgaaggagaaataaaatactttatagacaagcaaatgttgagagattttgtcaccaccaggcctgccctaaaagagctcctgaaggaagcgctaaacatggaaaggaacaaccggtaccagccgctgcaaaatcatgccaaaatgtaa

SEQ ID NO: 51 - DNA, 3828 bp, Artificial
  cDNA Sequence
atgacaggatcaaattcacacataacaatattaactttaaatataaatggactaaattctgcaattaaaagacacagactggcaagttggataaagagtcaagacccatcagtgtgctgtattcaggaaacccatctcacgtgcagagacacacataggctcaaaataaaaggatggaggaagatctaccaagccaatggaaaacaaaaaaaggcaggggttgcaatcctagtctctgacaaaacagactttaaaccaacaaagatcaaaagagacaaagaaggccattacataatggtaaagggatcaattcaacaagaggagctaactatcctaaatatttatgcacccaatacaggagcacccagattcataaagcaagtcctcagtgacctacaaagagacttagactcccacacattaataatgggagactttaacaccccactgtcaacattagacagatcaacgagacagaaagtcaacaaggatacccaggaattgaactcagctctgcaccaagcagacctaatagacatctacagaactctccaccccaaatcaacagaatatacatttttttcagcaccacaccacacctattccaaaattgaccacatagttggaagtaaagctctcctcagcaaatgtaaaagaacagaaattataacaaactatctctcagaccacagtgcaatcaaactagaactcaggattaagaatctcactcaaagccgctcaactacatggaaactgaacaacctgctcctgaatgactactgggtacataacgaaatgaaggcagaaataaagatgttctttgaaaccaacgagaacaaagacaccacataccagaatctctgggacgcattcaaagcagtgtgtagagggaaatttatagcactaaatgcctacaagagaaagcaggaaagatccaaaattgacaccctaacatcacaattaaaagaactagaaaagcaagagcaaacacattcaaaagctagcagaaggcaagaaataactaaaatcagagcagaactgaaggaaatagagacacaaaaaacccttcaaaaaatcaatgaatccaggagctggttttttgaaaggatcaacaaaattgatagaccgctagcaagactaataaagaaaaagagagagaagaatcaaatagacacaataaaaaatgataaaggggatatcaccaccgatcccacagaaatacaaactaccatcagagaatactacaaacacctctacgcaaataaactagaaaatctagaagaaatggatacattcctcgacacatacactctcccaagactaaaccaggaagaagttgaatctctgaatagaccaataacaggctctgaaattgtggcaataatcaatagtttaccaaccaaaaagagtccaggaccagatggattcacagccgaattctaccagaggtacatggaggaactggtaccattccttctgaaactattccaatcaatagaaaaagagggaatcctccctaactcattttatgaggccagcatcattctgataccaaagccgggcagagacacaaccaaaaaagagaattttagaccaatatccttgatgaacattgatgcaaaaatcctcaataaaatactggcaaaccgaatccagcagcacatcaaaaagcttatccaccatgatcaagtgggcttcatccctgggatgcaaggctggttcaatatacgcaaatcaataaatgtaatccagcatataaacagagccaaagacaaaaaccacatgattatctcaatagatgcagaaaaagcctttgacaaaattcaacaacccttcatgctaaaaactctcaataaattaggtattgatgggacgtatttcaaaataataagagctatctatgacaaacccacagccaatatcatactgaatgggcaaaaactggaagcattccctttgaaaaccggcacaagacagggatgccctctctcaccactcctattcaacatagtgttggaagttctggccagggcaatcaggcaggagaaggaaataaagggtattcaattaggaaaagaggaagtcaaattgtccctgtttgcagacgacatgattgtttatctagaaaaccccatcgtctcagcccaaaatctccttaagctgataagcaacttcagcaaagtctcaggatacaaaatcaatgtacaaaaatcacaagcattcttatacaccaacaacagacaaacagagagccagatcatgggtgaactcccattcacaattgcttcaaagagaataaaatacctaggaatccagcttacaagggatgtgaaggacctcttcaaggagaactacaaaccactgctcaaggaaataaaagaggagacaaacaaatggaagaacattccatgctcatgggtaggaagaatcaatatcgtgaaaatggccatactgcccaaggtaatttacagattcaatgccatccccatcaagctaccaatgactttcttcacagaattggaaaaaactactttaaagttcatatggaaccaaaaaagagcccgcatcgccaagtcaatcctaagccaaaagaacaaagctggaggcatcacactacctgacttcaaactatactacaaggctacagtaaccaaaacagcatggtactggtaccaaaacagagatatagatcaatggaacagaacagagccctcagaaataatgccgcatatctacaactatctgatctttgacaaacctgagaaaaacaagcaatggggaaaggattccctatttaataaatggtgctgggaaaactggctagccatatgtagaaagctgaaactggatcccttccttacaccttatacaaaaatcaattcaagatggattaaagatttaaacgttaaacctaaaaccataaaaaccctagaagaaaacctaggcattaccattcaggacataggcgtgggcaaggacttcatgtccaaaacaccaaaagcaatggcaacaaaagacaaaattgacaaatgggatctaattaaactaaagagcttctgcacagcaaaagaaactaccatcagagtgaacaggcaacctacaacatgggagaaaatttttgcaacctactcatctgacaaagggctaatatccagaatctacaatgaactcaaacaaatttacaagaaaaaaacaaacaaccccatcaaaaagtgggtgaaggacatgaacagacacttctcaaaagaagacatttatgcagccaaaaaacacatgaagaaatgctcatcatcactggccatcagagaaatgcaaatcaaaaccactatgagatatcatctcacaccagttagaatggcaatcattaaaaagtcaggaaacaacaggtgctggagaggatgcggagaaataggaacacttttacactgttggtgggactgtaaactagttcaaccattgtggaagtcagtgtggcgattcctcagggatctagaactagaaataccatttgacccagccatcccattactgggtatatacccaaatgagtataaatcatgctgctataaagacacatgcacacgtatgtttattgcggcactattcacaatagcaaagacttggaaccaacccaaatgtccaacaatgatagactggattaagaaaatgtggcacatatacaccatggaatactatgcagccataaaaaatgatgagttcatatcctttgtagggacatggatgaaattggaaaccatcattctcagtaaactatcgcaagaacaaaaaaccaaacaccgcatattctcactcataggtgggaattga

SEQ ID NO: 52 - DNA, 2597 bp, Artificial
  cDNA Sequence
gtcgggaagatggcgctacgtctgctgcggagggcggcgcgcggagctgcggcggcggcgctgctgaggctgaaagcgtctctagcagctgatatccccagacttggatatagttcctcatcccatcacaagtacatcccccggagggcagtgctttatgtacctggaaatgatgaaaagaaaataaagaagattccatccctgaatgtagattgtgcagtgctcgactgtgaggatggagtggctgcaaacaaaaagaatgaagctcgactgagaattgtaaaaactcttgaagacattgatctgggccctactgaaaaatgtgtgagagtcaactcagtttccagtggtctggcggaagaagacctagagacccttttgcaatcccgggtccttccttccagcctgatgctaccaaaggtggaaagtcctgaagaaatccagtggtttgcagacaaattttcattccacttaaaaggccgaaaacttgaacaaccaatgaatttaatcccttttgtggaaactgcaatgggtttgctcaattttaaggcagtgtgtgaagaaaccctgaaggtcgggcctcaagtaggtctctttctagatgcagtcgtttttggaggagaagactttcgagccagcataggtgcaacaagtagtaaagaaaccctggatattctctacgcccggcaaaagattgttgtcatagcgaaagcctttggtctccaagccatagatctggtgtacattgactttcgagatggagctgggctgcttagacagtcacgagaaggagccgccatgggcttcactggtaagcaggtgattcaccctaaccaaattgccgtggtccaggagcagttttctccttcccctgaaaaaattaagtgggctgaagaactgattgctgcctttaaagaacatcaacaattaggaaagggggcctttactttccaagggagtatgatcgacatgccattactgaagcaggcccagaacactgttacgcttgccacctccatcaaggaaaaatgatctgttaaatgaagctgtcatcagggaatgctgagctgcaatgaccattactgtagagttacaacaagagggtaaagttcatacatggcgacctgtgtcaaatccgtccattgatctgccctccagcacacatttactgagcttctgttacgtgcctgtggttcttggaaagagctttttccttctctacaaggaggaatctgatgcaactgacatcctcaatagctacagagaacttgcaaaggagtagagagaatgtttgaggtccagccttggtgtagagaagcggcagaaacagaaatcccaaaaggtgtcatgcttggctccagctctgtgctctcagaactcccttccctctgggcagaggcccatctgctctgtttacacacctggacctggtgtgaagggaggtttggaggagggtagctccctgaccatttgtggaatcgttcctgcttccaagcagcatgctacaggccagccttcaaagaaagaccagaagccaagtgtactctgtcatcacttaataatgcttgaagcttttcatataacaaaaggaatgaagcagccccgcctcgcagtgtggaagcctgatcattcttccatcagctctgcaccaaaaagcttttcctgagctttgaatattagatctgaccaatatgggtaaccaatgcccttaggtaaggtaaaataggaataaaatagctgtttgcaatgttatttcaccacacagtgtggtagggagggaactgatatgttgcaatgcaaagtaatctagtagtactgtttgtagaacagacaagtgtgtccaatttaaagaatatcaacatcatttttctatatcatactcttgtgaggttggatttaaccacagaggcagaaagttggtctactttgctcgttcctggcaactagcatggtgcctgcccctaatacattttcactgaatgaatgaatcagtgagttaatgaataaataaacaaatgggaggtgttctcctttatattgtgttagaggctgaggatatagaaatatgtaactcagagtcccattccacaagcccatgctagtgagccaacacaaacaaaaaacaactcaaattcaatgtgattaattcctaaaatcatagcactaacattcagtagtcatgtccagctcttcctttatgtcaggtacctagacatagcggaacagaaaacccttcaaaagttcagtctagtctggaaaacaaacatgaagcaaagaaggcacaacaccatatggaaaagcaagacagaaatatgtacagggcagagaggctgcactgtgtcatttaatcacgaagactctgttattagactgctcgaatacacaaagctgtgttaccttggacatgttacttcacctctctgggcttcagttgtctcattctgtaaaatggtgatattactggaactcatctcatagggttgttagtgagtgaatgtttgtaaaacaggatagtgcccagcacatactagtaacaaatgtaaaatacatgaaacaaataaatatttcctgtgtcctctgaactttaaactctcatc

SEQ ID NO: 53 - DNA, 5003 bp, Artificial
  cDNA Sequence
cgcgcagcatgcccgccagcgccccgccgcgccgcccgcggccgccgccgccgtcgctgtcgctgctgctggtgctgctgggcctgggcggccgccgcctgcgtgcggagccgggcgacggcgcgcagacctgggcccgtttctcgcggcctcctgcccccgaggccgcgggcctcttccagggcaccttccccgacggcttcctctgggccgtgggcagcgccgcctaccagaccgagggcggctggcagcagcacggcaagggtgcgtccatctgggatacgttcacccaccaccccctggcacccccgggagactcccggaacgccagtctgccgttgggcgccccgtcgccgctgcagcccgccaccggggacgtagccagcgacagctacaacaacgtcttccgcgacacggaggcgctgcgcgagctcggggtcactcactaccgcttctccatctcgtgggcgcgagtgctccccaatggcagcgcgggcgtccccaaccgcgaggggctgcgctactaccggcgcctgctggagcggctgcgggagctgggcgtgcagcccgtggtcaccctgtaccactgggacctgccccagcgcctgcaggacgcctacggcggctgggccaaccgcgccctggccgaccacttcagggattacgcggagctctgcttccgccacttcggcggtcaggtcaagtactggatcaccatcgacaacccctacgtggtggcctggcacggctacgccaccgggcgcctggcccccggcatccggggcagcccgcggctcgggtacctggtggcgcacaacctcctcctggctcatgccaaagtctggcatctctacaatacttctttccgtcccactcagggaggtcaggtgtccattgccctaagctctcactggatcaatcctcgaagaatgaccgaccacagcatcaaagaatgtcaaaaatctctggactttgtactaggttggtttgccaaacccgtatttattgatggtgactatcccgagagcatgaagaataacctttcatctattctgcctgattttactgaatctgagaaaaagttcatcaaaggaactgctgacttttttgctctttgctttggacccaccttgagttttcaacttttggaccctcacatgaagttccgccaattggaatctcccaacctgaggcaactgctttcctggattgaccttgaatttaaccatcctcaaatatttattgtggaaaatggctggtttgtctcagggaccaccaagagagatgatgccaaatatatgtattacctcaaaaagttcatcatggaaaccttaaaagccatcaagctggatggggtggatgtcatcgggtataccgcatggtccctcatggatggtttcgagtggcacagaggttacagcatcaggcgtggactcttctatgttgactttctaagccaggacaagatgttgttgccaaagtcttcagccttgttctaccaaaagctgatagagaaaaatggcttccctcctttacctgaaaatcagcccctagaagggacatttccctgtgactttgcttggggagttgttgacaactacattcaagtagataccactctgtctcagtttaccgacctgaatgtttacctgtgggatgtccaccacagtaaaaggcttattaaagtggatggggttgtgaccaagaagaggaaatcctactgtgttgactttgctgccatccagccccagatcgctttactccaggaaatgcacgttacacattttcgcttctccctggactgggccctgattctccctctgggtaaccagtcccaggtgaaccacaccatcctgcagtactatcgctgcatggccagcgagcttgtccgtgtcaacatcaccccagtggtggccctgtggcagcctatggccccgaaccaaggactgccgcgcctcctggccaggcagggcgcctgggagaacccctacactgccctggcctttgcagagtatgcccgactgtgctttcaagagctcggccatcacgtcaagctttggataacgatgaatgagccgtatacaaggaatatgacatacagtgctggccacaaccttctgaaggcccatgccctggcttggcatgtgtacaatgaaaagtttaggcatgctcagaatgggaaaatatccatagccttgcaggctgattggatagaacctgcctgccctttctcccaaaaggacaaagaggtggctgagagagttttggaatttgacattggctggctggctgagcccattttcggctctggagattatccatgggtgatgagggactggctgaaccaaagaaacaattttcttcttccttatttcactgaagatgaaaaaaagctaatccagggtacctttgactttttggctttaagccattataccaccatccttgtagactcagaaaaagaagatccaataaaatacaatgattacctagaagtgcaagaaatgaccgacatcacgtggctcaactcccccagtcaggtggcggtagtgccctgggggttgcgcaaagtgctgaactggctgaagttcaagtacggagacctccccatgtacataatatccaatggaatcgatgacgggctgcatgctgaggacgaccagctgagggtgtattatatgcagaattacataaacgaagctctcaaagcccacatactggatggtatcaatctttgcggatactttgcttattcgtttaacgaccgcacagctccgaggtttggcctctatcgttatgctgcagatcagtttgagcccaaggcatccatgaaacattacaggaaaattattgacagcaatggtttcccgggcccagaaactctggaaagattttgtccagaagaattcaccgtgtgtactgagtgcagtttttttcacacccgaaagtctttactggctttcatagcttttctattttttgcttctattatttctctctcccttatattttactactcgaagaaaggcagaagaagttacaaatagttctgaacatttttctattcattcattttgaaataattatgcagacacatcagctgttaaccatttgcacctctaagtgttgtgaaactgtaaatttcatacatttgacttctagaaaacatttttgtggcttatgacagaggttttgaaatgggcataggtgatcgtaaaatattgaataatgcgaatagtgcctgaatttgttctctttttgggtgattaaaaaactgacaggcactataatttctgtaacacactaacaaaagcatgaaaaataggaaccacaccaatgcaacatttgtgcagaaatttgaatgacaagattaggaatattttcttctgcacccacttctaaatttaatgtttttctggaagtagtaattgcaagagttcgaatagaaagttatgtaccaagtaaccatttctcagctgccataataatgcctagtggcttcccctctgtcaaatctagtttcctatggaaaagaagatggcagatacaggagagacgacagagggtcctaggctggaatgttcctttcgaaagcaatgcttctatcaaatactagtattaatttatgtatctggttaatgacatacttggagagcaaattatggaaatgtgtattttatatgatttttgaggtcctgtctaaaccctgtgtccctgagggatctgtctcactggcatcttgttgagggccttgcacataggaaacttttgataagtatctgcggaaaaacaaacatgaatcctgtgatattgggctcttcaggaagcataaagcaattgtgaaatacagtataccgcagtggctctaggtggaggaaaggaggaaaaagtgcttattatgtgcaacattatgattaatctgattatacaccatttttgagcagatcttggaatgaatgacatgacctttccctagagaataaggatgaaataatcactcattctatgaacagtgacactactttctattctttagctgtactgtaatttctttgagttgatagttttacaaattcttaataggttcaaaagcaatctggtctgaataacactggatttgtttctgtgatctctgaggtctattttatgtttttgctgctacttctgtggaagtagctttgaactagttttactttgaactttcacgctgaaacatgctagtgatatctagaaagggctaattaggtctcatcctttaatgccccttaaataagtcttgctgattttcagacagggaagtctctctattacactggagctgttttatagataagtcaatattgtatcaggcaagataaaccaatgtcataacaggcattgccaacctcactgacacagggtcatagtgtataataatatactgtactatataatatatcatctttagaggtatgattttttcatgaaagataagcttttggtaatattcattttaaagtggacttattaaaattggatgctagagaatcaagtttattttatgtatatatttttctgattataagagtaatatatgttcattgtaaaaatttttaaaacacagaaactatatgcaaagaaaaaataaaaattatctataatctcagaacccagaaatagccactattaacatttcctacgtattttattttacatagatcatattgtatatagttagtatctttattaatttttattatgaaactttcctttgtcattattagtcttcaaaagcatgatttttaatagttgttgagtattccaccacaggaatgtatcacaacttaaccgttcccgtttgttagactagtttcttattaatgttgatgaatgttgtttaaaaataattttgttgctacatttactttaatttccttgactgtaaagagaagtaattttgctccttgataaagtattatattaataataaatctgcctgcaactttttgccttctttcataatc

SEQ ID NO: 54 - DNA, 465 bp, Artificial
  cDNA Sequence
atggcggccagcaggaggctgatgaaggagcttgaagaaatccgcaaatgtggaatggaaaacttccgtaacatccaggttgatgaagctaatttattgacttggcaagggcttattgttcctgacaaccctccgtataataagggggccttcagaatcgaaatcaactttccagcagagtacccattcaaaccaccgaggatcacatttaaaacaaagatctatcacccgaacatcgacgaaaaggggcaggtctgtctgccagtaattagtgctgaaaactggaagccagcaaccaaaaccgaccaagtaatccagtccctcatagcactggtgaatgacccgcagcccgagcacccgcttcgggctgacctagctgaagaatactctaacgaccgtaaaaaattctgtaagaatgctgaagagtttacaaagaaatatggggaaaagcgacctgtggactaa

SEQ ID NO: 55 - DNA, 6469 bp, Artificial
  cDNA Sequence
tgtgtttttaggaactatcccttcgacatagtgacattgttaaaccttgttctattcaaggcctctgacaccaacagagagatttatgaaatctccatgcagctcatgcaggcaccaaagctttttgtatactcaaagaaagtcgctgagcaaagaccgggaagtattctctatggaacacacggcccgctgccacccctctacagcgtgtcacttgccctcttgtcatgtgagctggccaggatgtaccctgagctcacactccccctcttctcaggtaagccagcgattccccacaacacaccccaacgggcgccagatcatgcttacctacctgctgccctggctgcacaacatcgagctggtggacagcaggctcctcctcccgggagccccagcagcccagaggacgaagtcaaggaccgggaaggtgacgtgactgcttctcacgggctgagaggaaatggctggggctctccagaagccacgtcactggtcctgaacaacctcatgtacatgacggccaagtatggagatgaagttcctgggccagaaatggaaaatgcttggaatgctttagccaacaatgagaaatggagcaacaacctgaggatcaccttgcagttcctgattagcctctgtggggtcagcagcgacacagttctcctaccctatattaaaaaagtggcaatatacttgtgccgtaacaacaccattcaaaccatggaagagcttctctttgagctgcagcagacagagcccgtgaaccccatcgtccagcattgtgacaacccgcccttctaccgcttcacggccagtagcaaggcttccgcagcagcctcaggaaccacctctagcagcaatacagtggttgctggccaggaaaatttcccagatgctgaggagaacaagatattgaaagaatctgatgaaaggtttagtaatgtcatcagagcccacactcgcctcgagtcaagatacagcaatagctctggaggatcctacgatgaagataaaaatgatccaatttctccctacacgggctggttgctgactattacagagaccaagcagccgcagcccttaccgatgccttgtactggaggatgctgggcccccctggttgactatctcccggagaccatcactccccgggggccactccacaggtgcaatattgctgtaatttttatgactgaaatggtggtggatcacagtgtacgagaagactgggcgcttcatctaccattattacttcatgctgtcttcttaggtttagaccactaccggcctgaagtctttgaacacagcaaaaaactgcttcttcacctcttgattgccctctcttgcaacagcaatttccattccattgcttccgtgctcctgcagacccgagagatgggtgaagctaagactctaaccgtgcagccagcctaccaacctgaatatctctatacaggtggctttgacttcctgagagaggaccagtcatccccggtgcctgactcagggcttagttcaagctccacctcctctagcatcagtctgggaggcagcagtggaaacctcccacagatgacccaggaggtagaagatgtggacacagctgctgaaacagatgagaaggcaaacaagctcattgagtttctcacgaccagggcatttggtccactttggtgccatgaagacatcacacctaaaaatcaaaattcaaagagtgctgaacagctcactaattttctacgtcacgttgtatctgtatttaaagattccaaatcaggcttccatctggagcaccagttgagtgaagttgcattgcagacagccctcgcaagctcttcaaggcactatgctggtcggtccttccagatattccgggccctcaagcaacctctgtcagcacatgccttatctgaccttctctcaagattggtggaggtgataggagaacatggagatgagattcagggttatgtaatggaagcgctcctaaccttggaggcggctgtggataacttgtctgactgcttgaagaacagtgacctcctaactgtattgtcccgctcttcctcaccagatttaagctccagcagtaaactaacagcaagcagaaagagcacaggacaactaaacatgaacccgggaaccaccagcggcaacaccgcaactgccgaacggagccggcatcaacgaagcttctctgtgcccaagaagtttggtgtcatcgaccgatcctctgacccacctcgaagtgccacactggacagaattcaggcttgtacccaacaaggcctctcctcaaaaaccagaagctcatcctccttgaaggacagtctcacggacccatcccacataaaccatcccaccaacctgctggccaccatattctgggtcacagtggccttgatggagtctgattttgagtttgaatacttaatggccttaaggctgttgagcagactactggcacatatgccactcgataaggctgagaaccgagaaaagcttgagaaactccaggcacagctgaagtgggccgacttctccgggctgcagcagctgctgctgaaaggattcacatccctcaccaccacagacctgaccctgcagctcttcagtctgctgacaccagtgtccaaaatatccatggtggatgcatcccacgctattgggtttccactgaatgtcttgtgtctcctgcctcagctgattcagcattttgaaaatcccaatcagttctgtaaggatatagccgaaaggattgctcaggtttgtttagaagagaagaaccccaaactttcaaatcttgcacatgtcatgactctttataaaacgcacagctacacgagggactgtgccacgtgggtcaatgtggtctgtcgataccttcatgaagcatatgctgacattaccttgaatatggttacctacctggcagagctgctggagaagggcctccctagtgtgcagcagcccctgctccaggtgatctacagtcttctcagctacatggacctttctgtcgttcctgtcaaacagttcaatgtggaagttctgaagacaattgaaaaatatgtgcaaagtgttcactggagagaagctctgaatatcttgaagctggtagtttctcggtcagccagccttgttttaccttcataccagcacagtgacctctcaaaaatagaaatacatcgagtgtggactagtgcttccaaggaattacctgggaaaaccctggacttccacttcgatatttcggagactccaatcatcgggaggcggtatgatgagctgcagaattcttctgggcgtgatgggaagcccagggccatggccgtcacccggagcacatcttccacttcctcaggctccaactccaacgtccttgttccagtgagctggaaaaggccccagtattctcagaagagaacaaaagagaagttggtacatgtcctttctctgtgtggccaagaagtaggattgagcaaaaatccatcagtgattttttcatcgtgtggggatctggatctgcttgagcaccagacaagcttggtatcttctgaggacggtgcccgagagcaggagaacatggatgacacaaacagcgagcagcagtttagagtcttcagagacttcgacttcctagatgtggagctggaggatggagagggtgagagtatggacaatttcaactggggagtgcgcagacgttctctggacagcctggataagtgtgatatgcagattctggaggagcgccaactgtcaggaagcactcctagcctgaataaaatgcaccatgaggactccgatgaatcatccgaggaggaggacctcacagccagccagatcctggagcactcagacctaatcatgactctctccccctctgaagagacgaatcccatggagctgctcaccacagcctgtgactcgacccctgcagaacctcattcctttaacaccagaatgtccagctttgatgcttccttgcctgatatgaataatctgcagatttctgagggttcaaaggctgaagctgttcgtgaggaggaggacaccaccgtgcatgaggatgatctttctagttccatcaatgaactcccagcagcttttgaatgcagcgacagctttagcctggacatgactgagggggaagaaaaaggcaatcgggcactggaccagtttaccctggcgagctttggagaaggtgacaggggagtctctccccctccctcgcccttcttctcagccatccttgccgcctttcagcccgcagcctgtgacgatgccgaggaggcctggcgcagccacatcaaccagcttatgtgtgactcagatggctcctgtgctgtgtatacatttcatgtgttctcctccttgtttaagaatattcagaaaaggttctgcttcctaacctgtgatgcagccagttaccttggagataacctccggggaatcggatccaaatttgtcagctcttcccagatgctcacctcctgctctgaatgtcctacactttttgtggatgccgagactctcctttcatgtggacttctggacaagctcaagttcagtgtgttagaactgcaagaatatttggatacctacaacaacaggaaagaggccacactctcttggcttgcaaattgtaaggcaacatttgcagggggatcaagagatggagtaattacctgtcaaccaggggactccgaagaaaagcaattggaactgtgtcagagattatataagctacacttccagctgctattgctttttcagtcctactgtaagctcatcggccaggtgcacgaagttagctccatgccagagctgctgaatatgtccagggaactgagtgacctaaagaaacacctgaaggaagccagtgcagtcattgcagctgaccctctctattcagacggcgcgtggtccgagcccaccttcacgtccactgaagcagccatccagtccatgctggagtgcctgaagaacaacgaactcggcaaagctttgcggcagatcagggagtgcagaagtctgtggcccaatgacatctttggaagcagttctgatgatgaggtccagacactactgaatatttatttccgtcaccaaactctgggacagacgggtacttatgccctggtggggtctaaccagagcctgaccgagatctgcaccaagctgatggagctgaacatggagatccgggacatgatccgcagggcccagagttaccgagtcctcactacttttcttccagactccagtgtttctggcactagtctctgacaggagcctcctgtccccactgggttccaaactggcagtgctgccatgctggggcaacgtcattcagtgtcttctcggccttcaaaaggcttggacagactgttctccctcttgttacctgtagggctttttctaaagaggatggcagaacttccaacgtgtagcaatactataagaaccaaggtagcttagaacgtcctggacagactccactcatcatgctgtgtggcacaaatgtgttacatttgaccgagcatatgcaactcgctactgaagaagtgacttccgttgcataccaaagccgactacactgaacagtaccttcctttctagaaacaattttagattggcaaaagtgcaatgttttcttcactcaaaaaattttatattctcaaacatgtatattctttccctgtcttgttccattttcttttcttttttcttttttctttttcctttctttcgtgggctgagaaaggggcaggcaaaatgaagctggccactgaaaactgtaagatggtcaaaagctgacagcctgtgtatgtgaaaagggaattgtaaatggactgcaatgtaatgtacactgtaatttgaatacaattactgtatctaaaaggagctgctatgaagtacctttcttatgttgctaggctactgtttctgaaagccctggatctctttgcaccaaaaatggtccagatagactctttttaaggatcttggctgctttttactagaaggttgcttttatgagcatatttatactgctgaaggatgagtgttaattttaattaactttgccgttttgtagagaaaactattcacaagataaattccaagtcttttcacctgtcaggcatgcatattttaatatctgtttggatagtcagaagtagaatcataaaggtaaaatatgagttgttactttgtttcttcgatgtcatattttatgtgtaatatatatgtaaagggccattcttaagttctctccttaaacttaatgctgtcaagtgttagatgtgtgcatgtgaacttgttgcactgcagaaacatattcagagtttatctatgtaacttattcactctgtaaatacatttaaagtttttgtgatgtaagcttaattgatattctgttcagaactttctttagactaaaaaaaaaaaaaaagacaaa

SEQ ID NO: 56 - DNA, 10987 bp, Artificial
  cDNA Sequence
gtggcgcgagcttctgaaactaggcggcagaggcggagccgctgtggcactgctgcgcctctgctgcgcctcgggtgtcttttgcggcggtgggtcgccgccgggagaagcgtgaggggacagatttgtgaccggcgcggtttttgtcagcttactccggccaaaaaagaactgcacctctggagcggacttatttaccaagcattggaggaatatcgtaggtaaaaatgcctattggatccaaagagaggccaacattttttgaaatttttaagacacgctgcaacaaagcagatttaggaccaataagtcttaattggtttgaagaactttcttcagaagctccaccctataattctgaacctgcagaagaatctgaacataaaaacaacaattacgaaccaaacctatttaaaactccacaaaggaaaccatcttataatcagctggcttcaactccaataatattcaaagagcaagggctgactctgccgctgtaccaatctcctgtaaaagaattagataaattcaaattagacttaggaaggaatgttcccaatagtagacataaaagtcttcgcacagtgaaaactaaaatggatcaagcagatgatgtttcctgtccacttctaaattcttgtcttagtgaaagtcctgttgttctacaatgtacacatgtaacaccacaaagagataagtcagtggtatgtgggagtttgtttcatacaccaaagtttgtgaagggtcgtcagacaccaaaacatatttctgaaagtctaggagctgaggtggatcctgatatgtcttggtcaagttctttagctacaccacccacccttagttctactgtgctcatagtcagaaatgaagaagcatctgaaactgtatttcctcatgatactactgctaatgtgaaaagctatttttccaatcatgatgaaagtctgaagaaaaatgatagatttatcgcttctgtgacagacagtgaaaacacaaatcaaagagaagctgcaagtcatggatttggaaaaacatcagggaattcatttaaagtaaatagctgcaaagaccacattggaaagtcaatgccaaatgtcctagaagatgaagtatatgaaacagttgtagatacctctgaagaagatagtttttcattatgtttttctaaatgtagaacaaaaaatctacaaaaagtaagaactagcaagactaggaaaaaaattttccatgaagcaaacgctgatgaatgtgaaaaatctaaaaaccaagtgaaagaaaaatactcatttgtatctgaagtggaaccaaatgatactgatccattagattcaaatgtagcaaatcagaagccctttgagagtggaagtgacaaaatctccaaggaagttgtaccgtctttggcctgtgaatggtctcaactaaccctttcaggtctaaatggagcccagatggagaaaatacccctattgcatatttcttcatgtgaccaaaatatttcagaaaaagacctattagacacagagaacaaaagaaagaaagattttcttacttcagagaattctttgccacgtatttctagcctaccaaaatcagagaagccattaaatgaggaaacagtggtaaataagagagatgaagagcagcatcttgaatctcatacagactgcattcttgcagtaaagcaggcaatatctggaacttctccagtggcttcttcatttcagggtatcaaaaagtctatattcagaataagagaatcacctaaagagactttcaatgcaagtttttcaggtcatatgactgatccaaactttaaaaaagaaactgaagcctctgaaagtggactggaaatacatactgtttgctcacagaaggaggactccttatgtccaaatttaattgataatggaagctggccagccaccaccacacagaattctgtagctttgaagaatgcaggtttaatatccactttgaaaaagaaaacaaataagtttatttatgctatacatgatgaaacatcttataaaggaaaaaaaataccgaaagaccaaaaatcagaactaattaactgttcagcccagtttgaagcaaatgcttttgaagcaccacttacatttgcaaatgctgattcaggtttattgcattcttctgtgaaaagaagctgttcacagaatgattctgaagaaccaactttgtccttaactagctcttttgggacaattctgaggaaatgttctagaaatgaaacatgttctaataatacagtaatctctcaggatcttgattataaagaagcaaaatgtaataaggaaaaactacagttatttattaccccagaagctgattctctgtcatgcctgcaggaaggacagtgtgaaaatgatccaaaaagcaaaaaagtttcagatataaaagaagaggtcttggctgcagcatgtcacccagtacaacattcaaaagtggaatacagtgatactgactttcaatcccagaaaagtcttttatatgatcatgaaaatgccagcactcttattttaactcctacttccaaggatgttctgtcaaacctagtcatgatttctagaggcaaagaatcatacaaaatgtcagacaagctcaaaggtaacaattatgaatctgatgttgaattaaccaaaaatattcccatggaaaagaatcaagatgtatgtgctttaaatgaaaattataaaaacgttgagctgttgccacctgaaaaatacatgagagtagcatcaccttcaagaaaggtacaattcaaccaaaacacaaatctaagagtaatccaaaaaaatcaagaagaaactacttcaatttcaaaaataactgtcaatccagactctgaagaacttttctcagacaatgagaataattttgtcttccaagtagctaatgaaaggaataatcttgctttaggaaatactaaggaacttcatgaaacagacttgacttgtgtaaacgaacccattttcaagaactctaccatggttttatatggagacacaggtgataaacaagcaacccaagtgtcaattaaaaaagatttggtttatgttcttgcagaggagaacaaaaatagtgtaaagcagcatataaaaatgactctaggtcaagatttaaaatcggacatctccttgaatatagataaaataccagaaaaaaataatgattacatgaacaaatgggcaggactcttaggtccaatttcaaatcacagttttggaggtagcttcagaacagcttcaaataaggaaatcaagctctctgaacataacattaagaagagcaaaatgttcttcaaagatattgaagaacaatatcctactagtttagcttgtgttgaaattgtaaataccttggcattagataatcaaaagaaactgagcaagcctcagtcaattaatactgtatctgcacatttacagagtagtgtagttgtttctgattgtaaaaatagtcatataacccctcagatgttattttccaagcaggattttaattcaaaccataatttaacacctagccaaaaggcagaaattacagaactttctactatattagaagaatcaggaagtcagtttgaatttactcagtttagaaaaccaagctacatattgcagaagagtacatttgaagtgcctgaaaaccagatgactatcttaaagaccacttctgaggaatgcagagatgctgatcttcatgtcataatgaatgccccatcgattggtcaggtagacagcagcaagcaatttgaaggtacagttgaaattaaacggaagtttgctggcctgttgaaaaatgactgtaacaaaagtgcttctggttatttaacagatgaaaatgaagtggggtttaggggcttttattctgctcatggcacaaaactgaatgtttctactgaagctctgcaaaaagctgtgaaactgtttagtgatattgagaatattagtgaggaaacttctgcagaggtacatccaataagtttatcttcaagtaaatgtcatgattctgttgtttcaatgtttaagatagaaaatcataatgataaaactgtaagtgaaaaaaataataaatgccaactgatattacaaaataatattgaaatgactactggcacttttgttgaagaaattactgaaaattacaagagaaatactgaaaatgaagataacaaatatactgctgccagtagaaattctcataacttagaatttgatggcagtgattcaagtaaaaatgatactgtttgtattcataaagatgaaacggacttgctatttactgatcagcacaacatatgtcttaaattatctggccagtttatgaaggagggaaacactcagattaaagaagatttgtcagatttaacttttttggaagttgcgaaagctcaagaagcatgtcatggtaatacttcaaataaagaacagttaactgctactaaaacggagcaaaatataaaagattttgagacttctgatacattttttcagactgcaagtgggaaaaatattagtgtcgccaaagagtcatttaataaaattgtaaatttctttgatcagaaaccagaagaattgcataacttttccttaaattctgaattacattctgacataagaaagaacaaaatggacattctaagttatgaggaaacagacatagttaaacacaaaatactgaaagaaagtgtcccagttggtactggaaatcaactagtgaccttccagggacaacccgaacgtgatgaaaagatcaaagaacctactctattgggttttcatacagctagcgggaaaaaagttaaaattgcaaaggaatctttggacaaagtgaaaaacctttttgatgaaaaagagcaaggtactagtgaaatcaccagttttagccatcaatgggcaaagaccctaaagtacagagaggcctgtaaagaccttgaattagcatgtgagaccattgagatcacagctgccccaaagtgtaaagaaatgcagaattctctcaataatgataaaaaccttgtttctattgagactgtggtgccacctaagctcttaagtgataatttatgtagacaaactgaaaatctcaaaacatcaaaaagtatctttttgaaagttaaagtacatgaaaatgtagaaaaagaaacagcaaaaagtcctgcaacttgttacacaaatcagtccccttattcagtcattgaaaattcagccttagctttttacacaagttgtagtagaaaaacttctgtgagtcagacttcattacttgaagcaaaaaaatggcttagagaaggaatatttgatggtcaaccagaaagaataaatactgcagattatgtaggaaattatttgtatgaaaataattcaaacagtactatagctgaaaatgacaaaaatcatctctccgaaaaacaagatacttatttaagtaacagtagcatgtctaacagctattcctaccattctgatgaggtatataatgattcaggatatctctcaaaaaataaacttgattctggtattgagccagtattgaagaatgttgaagatcaaaaaaacactagtttttccaaagtaatatccaatgtaaaagatgcaaatgcatacccacaaactgtaaatgaagatatttgcgttgaggaacttgtgactagctcttcaccctgcaaaaataaaaatgcagccattaaattgtccatatctaatagtaataattttgaggtagggccacctgcatttaggatagccagtggtaaaatcgtttgtgtttcacatgaaacaattaaaaaagtgaaagacatatttacagacagtttcagtaaagtaattaaggaaaacaacgagaataaatcaaaaatttgccaaacgaaaattatggcaggttgttacgaggcattggatgattcagaggatattcttcataactctctagataatgatgaatgtagcacgcattcacataaggtttttgctgacattcagagtgaagaaattttacaacataaccaaaatatgtctggattggagaaagtttctaaaatatcaccttgtgatgttagtttggaaacttcagatatatgtaaatgtagtatagggaagcttcataagtcagtctcatctgcaaatacttgtgggatttttagcacagcaagtggaaaatctgtccaggtatcagatgcttcattacaaaacgcaagacaagtgttttctgaaatagaagatagtaccaagcaagtcttttccaaagtattgtttaaaagtaacgaacattcagaccagctcacaagagaagaaaatactgctatacgtactccagaacatttaatatcccaaaaaggcttttcatataatgtggtaaattcatctgctttctctggatttagtacagcaagtggaaagcaagtttccattttagaaagttccttacacaaagttaagggagtgttagaggaatttgatttaatcagaactgagcatagtcttcactattcacctacgtctagacaaaatgtatcaaaaatacttcctcgtgttgataagagaaacccagagcactgtgtaaactcagaaatggaaaaaacctgcagtaaagaatttaaattatcaaataacttaaatgttgaaggtggttcttcagaaaataatcactctattaaagtttctccatatctctctcaatttcaacaagacaaacaacagttggtattaggaaccaaagtgtcacttgttgagaacattcatgttttgggaaaagaacaggcttcacctaaaaacgtaaaaatggaaattggtaaaactgaaactttttctgatgttcctgtgaaaacaaatatagaagtttgttctacttactccaaagattcagaaaactactttgaaacagaagcagtagaaattgctaaagcttttatggaagatgatgaactgacagattctaaactgccaagtcatgccacacattctctttttacatgtcccgaaaatgaggaaatggttttgtcaaattcaagaattggaaaaagaagaggagagccccttatcttagtgggagaaccctcaatcaaaagaaacttattaaatgaatttgacaggataatagaaaatcaagaaaaatccttaaaggcttcaaaaagcactccagatggcacaataaaagatcgaagattgtttatgcatcatgtttctttagagccgattacctgtgtaccctttcgcacaactaaggaacgtcaagagatacagaatccaaattttaccgcacctggtcaagaatttctgtctaaatctcatttgtatgaacatctgactttggaaaaatcttcaagcaatttagcagtttcaggacatccattttatcaagtttctgctacaagaaatgaaaaaatgagacacttgattactacaggcagaccaaccaaagtctttgttccaccttttaaaactaaatcacattttcacagagttgaacagtgtgttaggaatattaacttggaggaaaacagacaaaagcaaaacattgatggacatggctctgatgatagtaaaaataagattaatgacaatgagattcatcagtttaacaaaaacaactccaatcaagcagtagctgtaactttcacaaagtgtgaagaagaacctttagatttaattacaagtcttcagaatgccagagatatacaggatatgcgaattaagaagaaacaaaggcaacgcgtctttccacagccaggcagtctgtatcttgcaaaaacatccactctgcctcgaatctctctgaaagcagcagtaggaggccaagttccctctgcgtgttctcataaacagctgtatacgtatggcgtttctaaacattgcataaaaattaacagcaaaaatgcagagtcttttcagtttcacactgaagattattttggtaaggaaagtttatggactggaaaaggaatacagttggctgatggtggatggctcataccctccaatgatggaaaggctggaaaagaagaattttatagggctctgtgtgacactccaggtgtggatccaaagcttatttctagaatttgggtttataatcactatagatggatcatatggaaactggcagctatggaatgtgcctttcctaaggaatttgctaatagatgcctaagcccagaaagggtgcttcttcaactaaaatacaggcaatatgatacggaaattgatagaagcagaagatcggctataaaaaagataatggaaagggatgacacagctgcaaaaacacttgttctctgtgtttctgacataatttcattgagcgcaaatatatctgaaacttctagcaataaaactagtagtgcagatacccaaaaagtggccattattgaacttacagatgggtggtatgctgttaaggcccagttagatcctcccctcttagctgtcttaaagaatggcagactgacagttggtcagaagattattcttcatggagcagaactggtgggctctcctgatgcctgtacacctcttgaagccccagaatctcttatgttaaagatttctgctaacagtactcggcctgctcgctggtataccaaacttggattctttcctgaccctagaccttttcctctgcccttatcatcgcttttcagtgatggaggaaatgttggttgtgttgatgtaattattcaaagagcataccctatacagtggatggagaagacatcatctggattatacatatttcgcaatgaaagagaggaagaaaaggaagcagcaaaatatgtggaggcccaacaaaagagactagaagccttattcactaaaattcaggaggaatttgaagaacatgaagaaaacacaacaaaaccatatttaccatcacgtgcactaacaagacagcaagttcgtgctttgcaagatggtgcagagctttatgaagcagtgaagaatgcagcagacccagcttaccttgagggttatttcagtgaagagcagttaagagccttgaataatcacaggcaaatgttgaatgataagaaacaagctcagatccagttggaaattaggaaggccatggaatctgctgaacaaaaggaacaaggtttatcaagggatgtcacaaccgtgtggaagttgcgtattgtaagctattcaaaaaaagaaaaagattcagttatactgagtatttggcgtccatcatcagatttatattctctgttaacagaaggaaagagatacagaatttatcatcttgcaacttcaaaatctaaaagtaaatctgaaagagctaacatacagttagcagcgacaaaaaaaactcagtatcaacaactaccggtttcagatgaaattttatttcagatttaccagccacgggagccccttcacttcagcaaatttttagatccagactttcagccatcttgttctgaggtggacctaataggatttgtcgtttctgttgtgaaaaaaacaggacttgcccctttcgtctatttgtcagacgaatgttacaatttactggcaataaagttttggatagaccttaatgaggacattattaagcctcatatgttaattgctgcaagcaacctccagtggcgaccagaatccaaatcaggccttcttactttatttgctggagatttttctgtgttttctgctagtccaaaagagggccactttcaagagacattcaacaaaatgaaaaatactgttgagaatattgacatactttgcaatgaagcagaaaacaagcttatgcatatactgcatgcaaatgatcccaagtggtccaccccaactaaagactgtacttcagggccgtacactgctcaaatcattcctggtacaggaaacaagcttctgatgtcttctcctaattgtgagatatattatcaaagtcctttatcactttgtatggccaaaaggaagtctgtttccacacctgtctcagcccagatgacttcaaagtcttgtaaaggggagaaagagattgatgaccaaaagaactgcaaaaagagaagagccttggatttcttgagtagactgcctttacctccacctgttagtcccatttgtacatttgtttctccggctgcacagaaggcatttcagccaccaaggagttgtggcaccaaatacgaaacacccataaagaaaaaagaactgaattctcctcagatgactccatttaaaaaattcaatgaaatttctcttttggaaagtaattcaatagctgacgaagaacttgcattgataaatacccaagctcttttgtctggttcaacaggagaaaaacaatttatatctgtcagtgaatccactaggactgctcccaccagttcagaagattatctcagactgaaacgacgttgtactacatctctgatcaaagaacaggagagttcccaggccagtacggaagaatgtgagaaaaataagcaggacacaattacaactaaaaaatatatctaagcatttgcaaaggcgacaataaattattgacgcttaacctttccagtttataagactggaatataatttcaaaccacacattagtacttatgttgcacaatgagaaaagaaattagtttcaaatttacctcagcgtttgtgtatcgggcaaaaatcgttttgcccgattccgtattggtatacttttgcttcagttgcatatcttaaaactaaatgtaatttattaactaatcaagaaaaacatctttggctgagctcggtggctcatgcctgtaatcccaacactttgagaagctgaggtgggaggagtgcttgaggccaggagttcaagaccagcctgggcaacatagggagacccccatctttacaaagaaaaaaaaaaggggaaaagaaaatcttttaaatctttggatttgatcactacaagtattattttacaatcaacaaaatggtcatccaaactcaaacttgagaaaatatcttgctttcaaattggcact

SEQ ID NO: 57 - DNA, 1992 bp, Artificial
  cDNA Sequence
atgagcgcgaggctgccggtgttgtctccacctcggtggccgcggctgttgctgctgtcgctgctcctgctgggggcggttcctggcccgcgccggagcggcgctttctacctgcccggcctggcgcccgtcaacttctgcgacgaagaaaaaaagagcgacgagtgcaaggccgaaatagaactatttgtgaacagacttgattcagtggaatcagttcttccttatgaatacacagcgtttgatttttgccaagcatcagaaggaaagcgcccatctgaaaatcttggtcaggtactattcggggaaagaattgaaccttcaccatataagtttacgtttaataagaaggagacctgtaagcttgtttgtacaaaaacataccatacagagaaagctgaagacaaacaaaagttagaattcttgaaaaaaagcatgttattgaattatcaacatcactggattgtggataatatgcctgtaacgtggtgttacgatgttgaagatggtcagaggttctgtaatcctggatttcctattggctgttacattacagataaaggccatgcaaaagatgcctgtgttattagttcagatttccatgaaagagatacattttacatcttcaaccatgttgacatcaaaatatactatcatgttgttgaaactgggtccatgggagcaagattagtggctgctaaacttgaaccgaaaagcttcaaacatacccatatagataaaccagactgctcagggccccccatggacataagtaacaaggcttctggggagataaaaattgcctatacttactctgttagcttcgaggaagatgataagatcagatgggcgtctagatgggactatattctggagtctatgcctcatacccacattcagtggtttagcattatgaattccctggtcattgttctcttcttatctggaatggtagctatgattatgttacggacactgcacaaagatattgctagatataatcagatggactctacggaagatgcccaggaagaatttggctggaaacttgttcatggtgatatattccgtcctccaagaaaagggatgctgctatcagtctttctaggatccgggacacagattttaattatgacctttgtgactctatttttcgcttgcctgggatttttgtcacctgccaaccgaggagcgctgatgacgtgtgctgtggtcctgtgggtgctgctgggcacccctgcaggctatgttgctgccagattctataagtcctttggaggtgagaagtggaaaacaaatgttttattaacatcatttctttgtcctgggattgtatttgctgacttctttataatgaatctgatcctctggggagaaggatcttcagcagctattccttttgggacactggttgccatattggccctttggttctgcatatctgtgcctctgacgtttattggtgcatactttggttttaagaagaatgccattgaacacccagttcgaaccaatcagattccacgtcagattcctgaacagtcgttctacacgaagcccttgcctggtattatcatgggagggattttgccctttggctgcatctttatacaacttttcttcattctgaatagtatttggtcacaccagatgtattacatgtttggcttcctatttctggtgtttatcattttggttattacctgttctgaagcaactatacttctttgctatttccacctatgtgcagaggattatcattggcaatggcgttcattccttacgagtggctttactgcagtttatttcttaatctatgcagtacactacttcttttcaaaactgcagatcacgggaacagcaagcacaattctgtactttggttataccatgataatggttttgatcttctttctttttacaggaacaattggcttctttgcatgcttttggtttgttaccaaaatatacagtgtggtgaaggttgactga

SEQ ID NO: 58 - DNA, 282 bp, Artificial
  cDNA Sequence
atgccttgccgtaggaaagtaattaagacagaaaagttatcaaggattcacaccaaagaccatttgccaaggactatttttaaattgtatcctcaagtgagattagcatctcagcaaacttcagccattgaacagcagagaaacactaaaataaaacctcgttaccttctccctgggagaaccactgttagcaaatatgaaatcatggaacatcagaaaaagaggaaagaacagatgcttcaactttctcacaaaatgtccataactgaaaattcagaatga

SEQ ID NO: 59 - DNA, 2431 bp, Artificial
  cDNA Sequence
ggtgtgactgaagaaatatcaaatgtttcctagtaagacagcaactcaggactctaggatggaagaaggtgtctgaccgtaaattacacctgcagtgcaaccagcagactaatggggatgaggttctggtacaagatgatgaacaccagtatgtcagacaatgacttgggagctggaatcaaggacatgaccaagagcagcaagaacaaaagggagactgacacattgatcactttctcaacctttgatctcttgagaggatggttcacatttgagtaaagacaggggagtttgttttcagaatgacatactagtctgcaggatgaatttcataactgacattgcaccttggactgcaactaggactttcactggaatcagagaaagagttttgaagaaaactgggcataggctcagcaaaaccaaacagaagaggaacagaaaaagaaacaaaaagcagaacagtcagaatagaatcatggaggaaaactcattagaattcttaagtgatcttacaccgggagatcaggacccatctcagagtgaagaggaagacattgaaaagaccagaagagaatcagaatatcccttcattgatggtctacaaaatgaagtcggagattttgtgactggatataaagaaaaaagatggaaaaataaagatcctaaagacagtttccaaaacgttatgtctatagttgaattagacaacacaccaaagaattacctctctaaggaaggtgataacttgtttgtaagtttgttactgaggccaaatgaaatctccgttacttgtccaatactgactcaaaacctttcctgtgtaacaactgatgactgctctggcatgaaggtagaaaagcatattagaaataggcataccatagcattagacacccaggacctttctgcggaaacttcatgcttatttatgaagaagagagaaatagtagataaaaatctctcacatgaacccattctgtgccatcaacatggaatcagaatgtcagataaagttttaagagaggaacaagtgtatacaactaaaatcaatcactgggcttttttcacaaccaatttatctgatgaagatttacagctgggctctgacagacagccctattttggtagctggcctgcaggacctcataagtttatatgtgaacagagaccaaagaaagatagagcatgtaagttggctggtcctgacagcagggggcaatggattcaaatgatcttcacttcggtggcagcatcagaaccaggaaacaatccagaaatattgacagacaaactactgataggaaatgaagatttttcacctccacctgaaactatggattcattcatagaaacaaacctcttcagaagctgcttacctcaaccggatataccaaagaatgccttagaatcaacaaaaaataagaaaaggaggaagaaaaggattttcaatttggtaccaaattttgacttattaggacagagtcgtatcggtgtaaaagaaagggagaaatgtgacctgttaacaaaaaaccatggactaaaaattactttgggagaagaaaaagatagaatttcagaaaggaacagtgaagaggagaataaacaaaaacttatgacctttgatcatcatccattgtggttttaccttgatattatcaaagctacccctttaaatattgatggacagcgttattctcattgcctgtcatttaacagactaaggtgctctgcatctttatacaaaaattatattccttcttttgtgctacataatttatctagtatttggaagccatcttttacaaacaagaaactgtttttgactttcgaatctcagacaagagtaggtaataaactaaatgatgcagggtttatttctccagaaattttacatagtcatcctgatacttcgtgctctttgggagtcacttctgattttcactttttaaatgaaaggtttgatagaaagctgaaaagatgggaagaacctaaggaattaccagctgaggacagccaagacttaacaagcactgactaccgttcccttgagctaccattatcacaagggtttgcctttcaattagtaaagctttttggatctccaggcgttccaatggaatccttgttgcctgatgactatgtggttccccttgactggaagacactaaagatgatctacttgcaatggaagatgtcagtggagaaaagacagaagaagattggttgaaaaatgaaaattccttgaactttgagttctgctgtcttcatggtactgctgaagatcatgatcacggagaaaagtcagagtgctcagtgccaacccaagggattctttccagagacgtacccgttggataccaaaattagtttggataatctgttcaaccattcttgataagttatctgaataataaaaaaactcaacaga

SEQ ID NO: 60 - DNA, 522 bp, Artificial
  cDNA Sequence
atggaggacagtttccttcaatcttttgggaggctgagcctccagccccagcagcagcagcagcggcagcggccgccccggccgcccccgcgggggacacctcctcgccgccacagctttaggaaacacctctacctcctgcgaggcctcccgggctccgggaaaactacactggccagacaattgcagcatgactttcccagggccctgattttcagcacggatgattttttcttcagggaagatggtgcctatgagttcaatcctgacttcctggaggaagctcatgaatggaaccaaaaaagagcaagaaaagcaatgaggaatggcatatcccccattattattgataataccaacctccacgcctgggaaatgaagccctatgcagtcatggtatttcagaccgaacaaaagaatcttttcaggctggaaatggacatggtagttttcaggccagaaatgaagaaacattcatggtgtctcaagagaaaaaatccaccgaatgaaagaacggtatga

SEQ ID NO: 61 - DNA, 414 bp, Artificial
  cDNA Sequence
atgaggaatggcatatcccccattattattgataataccaacctccacgcctgggaaatgaagccctatgcagtcatggcacttgaaaataactatgaagttatattccgagaacctgacactcgctggaaattcaacgttcaagagttagcaagaagaaacattcatggtgtctcaagagaaaaaatccaccgaatgaaagaacggtatgaacacgatgttacttttcacagtgtgcttcatgcagaaaagccaagcagaatgaacagaaaccaggacaggaataatgcattgccttccaacaatgccagatactggaattcctacacagagtttccaaaccggagggcccacggtggatttacaaatgagagctcctatcacagaaggggcggttgtcaccatggatattag

SEQ ID NO: 62 - DNA, 381 bp, Artificial
  cDNA Sequence
atggctgacggtaaggctgggaaggactccggaaaggccaagacaaaggcggtttcccgctcgcagagagccggcttgcagttcccagagggctgtattcatcaacacctgaaatctaggacgacgggtcacagacatgtgggtgcaactgccgctgtgtacagcgcagccatcctggagtacctcaccgcagagggacttgaactggcaggaaatgcatcaaaagacttaaaggtaaagattacccctcgtcacttgcaacttgctattcgtgcagatgaagaattggatctcatcaaggctacaattgctggtggtggtgtcattccacacatccacaaatctctgattgggaagaaaggacaacagaagactgtctaa

SEQ ID NO: 63 - DNA, 1680 bp, Artificial
  cDNA Sequence
acttcagtttggacaactactcacagctactacacagagacccgaacgagtcactgatatacacctggaccaccaccaatggatatacaaatggcaaacaattttactccgccctctgcaactcctcagggaaatgactgtgacctctatgcacatcacagcacggccaggatagtaatgcctctgcattacagcctcgtcttcatcattgggctcgtgggaaacttactagccttggtcgtcattgttcaaaacaggaaaaaaatcaactctaccaccctctattcaacaaatttggtgatttctgatatactttttaccaccgctttgcctacacgaatagcctactatgcaatgggctttgactggagaatcggagatgccttgtgtaggataactgcgctagtgttttacatcaacacatatgcaggtgtgaactttatgacctgcctgagtattgaccgcttcattgctgtggtgcaccctctacgctacaacaagataaaaaggattgaacatgcaaaaggcgtgtgcatatttgtctggattctagtatttgctcagacactcccactcctcatcaaccctatgtcaaagcaggaggctgaaaggattacatgcatggagtatccaaactttgaagaaactaaatctcttccctggattctgcttggggcatgtttcataggatatgtacttccacttataatcattctcatctgctattctcagatctgctgcaaactcttcagaactgccaaacaaaacccactcactgagaaatctggtgtaaacaaaaaggctctcaacacaattattcttattattgttgtgtttgttctctgtttcacaccttaccatgttgcaattattcaacatatgattaagaagcttcgtttctctaatttcctggaatgtagccaaagacattcgttccagatttctctgcactttacagtatgcctgatgaacttcaattgctgcatggacccttttatctacttctttgcatgtaaagggtataagagaaaggttatgaggatgctgaaacggcaagtcagtgtatcgatttctagtgctgtgaagtcagcccctgaagaaaattcacgtgaaatgacagaaacgcagatgatgatacattccaagtcttcaaatggaaagtgaaatggattgtattttggtttatagtgacgtaaactgtatgacaaactttgcaggacttcccttataaagcaaaataattgttcagcttccaattagtattcttttatatttctttcattgggcactttcccatctccaactcggaagtaagcccaagagaacaacataaagcaaacaacataaagcacaataaaaatgcaaataaatatttcatttttatttgtaaacgaatacaccaaaaggaggcgctcttaataactcccaatgtaaaaagttttgttttaataaaaaatttaattattatttcttgccaacaaatggctagaaaggactgaatagattatatattgccagatgttaatactgtaacatactttttaaataacatatttcttaaatccaaatttctctcaatgttagatttaattccctcaataacaccaatgttttgttttgtttcgttctgggtcataaaactttgttaaggaactcttttggaataaagagcaggatgct

SEQ ID NO: 64 - DNA, 1602 bp, Artificial
  cDNA Sequence
cagcaattaaagtcagcccagcaccaactccgacgccaagcgttacactggaaactactttttaaagcaacaaaagagtctaaaacaaaatacaacatttcttaaatacactgtttccagaaagagctattttaacagaagcaactcaaagatatcccttcgacagaagtggaagtgctgaaaaatgctcatctctcacacagacttttgatggacaggaggtgctgctttctgtgaaccactgaagtagagcagctgaaatcacaaaacctggaagacttggctttacgtactcccaattgtgcactagaaaacagctcatctattgctctaacagtctagttcttgatctgctgaccatgacacaaaacattgctgtttctcaacctatgataatttaaagagaacataaggtaataagtatcatgcctaccaacaagctgtaaaatgatcaccctgaacaatcaagatcaacctgtcccttttaacagctcacatccagatgaatacaaaattgcagcccttgtcttctatagctgtatcttcataattggattatttgttaacatcactgcattatgggttttcagttgtaccaccaagaagagaaccacggtaaccatctatatgatgaatgtggcattagtggacttgatatttataatgactttaccctttcgaatgttttattatgcaaaagatgaatggccatttggagagtacttctgccagattcttggagctctcacagtgttttacccaagcattgctttatggcttcttgcctttattagtgctgacagatacatggccattgtacagccgaagtacgccaaagaacttaaaaacacgtgcaaagccgtgctggcgtgtgtgggagtctggataatgaccctgaccacgaccacccctctgctactgctctataaagacccagataaagactccactcccgccacctgcctcaagatttctgacatcatctatctaaaagctgtgaacgtgctgaacctcactcgactgacattttttttcttgattcctttgttcatcatgattgggtgctacttggtcattattcataatctccttcacggcaggacgtctaagctgaaacccaaagtcaaggagaagtccataaggatcatcatcacgctgctggtgcaggtgctcgtctgctttatgcccttccacatctgtttcgctttcctgatgctgggaacgggggagaacagttacaatccctggggagcctttaccaccttcctcatgaacctcagcacgtgtctggatgtgattctctactacatcgtttcaaaacaatttcaggctcgagtcattagtgtcatgctataccgtaattaccttcgaagcatgcgcagaaaaagtttccgatctggtagtctacggtcactaagcaatataaacagtgaaatgttatgaataataaggttctttcatttcaatcccatcaaaattcacttcactaactactctggcgtcaatggatattctgtataatactatcaagtcccttttctcttgaaaaaataaattcattatcttcattttaaaaacttatataaaacatttttgtgaatt

SEQ ID NO: 65 - DNA, 2825 bp, Artificial
  cDNA Sequence
cggaggtgaggtttgttaccgcgattctgagaggtgggcttttagtccctccagacctcggctttagtgctgtctccgcttttctttcaccttcacagaggttcgtgtcttcctaaaagaaggttttattgggaggtaaaggtcaatgcgtaggggtagagtaagatgtcttatggtgaaattgaaggtaaattcttgggacctagagaagaagtaacgagtgagccacgctgtaaaaaattgaagtcaaccacagagtcgtatgtttttcacaatcatagtaatgctgattttcacagaatccaagagaaaactggaaatgattgggtccctgtgaccatcattgatgtcagaggacatagttatttgcaggagaacaaaatcaaaactacagatttgcatagacctttgcatgatgagatgcctggtaatagaccagatgttattgaatccattgattcacaggttttacaggaagcacgtcctccattagtatccgcagacgatgagatatatagcacaagtaaagcatttataggacccatttacaaaccccctgagaaaaagaaacgtaatgaagggaggaatgaggcacatgttctaaatggtataaatgacagaggaggacaaaaagagaaacagaaatttaactctgaaaaatcagagattgacaatgaattattccagttttacaaagaaattgaagagcttgaaaaggaaaaagatggttttgagaacagttgtaaagaatctgaaccttctcaggaacaatttgttccattttatgagggtcataataatggtctcttaaaacctgatgaagaaaagaaagatcttagtaataaagctatgccatcacattgtgattatcagcagaacttggggaatgagccagacaaatatccctgtaatggacaagtaatacctacattttgtgacacttcatttacttctttcaggcctgaatggcagtcagtatatccttttatagtgccctatggtccccctcttcccagtttgaactatcatttaaacattcagagattcagtggtccaccaaatccaccatcaaatattttccaagcccaagatgactctcagatacaaaatggatattatgtaaataattgtcatgttaactggaattgcatgacttttgatcagaacaatgaatatactgactgtagtgagaataggagtagtgttcatccctctggaaatggctgcagtatgcaagatcgatatgtgagtaatggtttctgtgaagtcagagaaagatgctggaaagatcattgtatggacaagcataatggaacagacaggtttgtgaaccagcagtttcaagaggaaaagttaaataaattgcagaagttacttattcttttaagaggtctgcctggttctgggaaaacaacattgtctcgaattctgcttggtcagaatcgtgatggcattgtgttcagcactgatgactattttcaccatcaagatgggtacaggtataatgttaatcaacttggtgatgcccatgactggaaccagaacagagcaaaacaagctatcgatcagggaagatctccagttataatagataacactaatatacaagcttgggaaatgaagccatatgtggaagtggccataggaaaaggatacagagtagagtttcatgaacctgaaacttggtggaaatttgatcctgaagaattagaaaagaggaataaacatggtgtgtctcgaaagaagattgctcagatgttggatcgttatgaatatcaaatgtccatttctattgtaatgaattcagtggaaccatcacacaaaagcacacaaagacctcctcctccacaggggagacagaggtggggaggctctcttggctcacataatcgtgtctgtgtcacaaataatcattaaattagctattttcagctaacacatttgttgttgcacttgaaaaagagttagtgagcctgtcttggagtttaagtagtttcaaataaaaaaaggctacagtgcctcacaaaggatgttcccagcaagttgtttaaattcccagcaagttgttaaagtgtaaataaaaatatatgaaattgtattttaaatgtttttatattctcttgttgtaatactcttggctgttatggaagcacctgagtaatagagtggtgggtaggagctaggatgtttttctacaatcgaattttaaactaatttatctattttatagacactattgaacagttttttaatagttcatatctaaatctaacttttcataaaactttacggtttttccttcactaccttaaatatgcaagaaatactgacttggtatagggtaccttagttttctctattcattagacaggtaaaattatatttcagctgattgatctgtgtgacaaaattatttcttagctataatcagcacatcacttagttcaaacaaaattccccagcaaatgttagatagtaggtatatcagtcacctggggagttttcttcataatatgcatattcatcttgtaatgcatacatagttatcatcctccttctcaacccatctccctaaccccacatgcttgccagttcttgaagggataaagtgattctaataatgttttacttctctctgttcaatttaatgtgatataattctagtataaaaatattttggacagttgcttaacatggtcataagaggatttgtactatagaatatcttctagtactaatttttctgtagagcaaattatatttctctcactggatagtttttagatgtgtttcttcatataaaattaaaaactgagatggaattc

SEQ ID NO: 66 - DNA, 4021 bp, Artificial
  cDNA Sequence
cggggtcagatacctgggggtggggaggggccacagaagacattgccagaccacgctgtcccggcagctttccctgcaactgacagtacctcagagggaaagagtgtgcgtcatcctaaaccatctacctcagaaagcaagcagagcactccctcagagacccaaacagtgggggcacatgtactgcaggtgtgcagtgagcacacatcacattccgcccatccagagcctgctctgaatttgactttggcatcgaaggaaatcccaagtaaactggaagcacaattaggtcagggaaagggagaggccaagctggatctgaaatatgttcctcccaggagagttgaacaggagggaaaggcagcccaggaagggtatctgggatgccacaaggaagagaatctgtcagccttggagggaagggatccatgtggggaagcacacccggaagccaccgatgcacttggccatctgctgaacagtgacctccaccaccttggggtgggaagaggcaactgtgaagagaagagaggagtcaacccaggggagcaggattctctccacaccacccccaaacagggctctgcttccttaggaggggctgataatcagcccactggcaaaatttcaccatgtgcaggtgagaagttgggtgaaaggacatccagcagcttttcaccaggtgacagtcatgtggcttttattcctaataatctgactgacagcaagcccttggatgtcattgaggaggaaaggcggttgggcagtgggaataaggacagtgttatggttttggtgttcaatccttctgttggagagaacaagacggaggtgcctgagcccctggaccctcaaagtggccgctcagaagcacgggaaagcaaagaggtcaccacatctgttgctgaaaacaggaaccttctagagaatgcagataagattgaaagcacctcagcaagagcagattcagttctcaatattccagcacccctccacccagagacaactgtgaacatgacctaccagcctacaacacccagtagcagttttcaggatgttagcgtgttcggtatggatgcggggtcccccttggtagttccaccccctactgatagtgcacgcttgttgaacacgtcccccaaagtgcctgacaagaacacttgccccagtgggatccccaagcctgtcttcacacattccaaggacacaccttcctcgcaggagggaatggagaactatcaggttgaaaaaacagaggagaggacagaaactaagcccatcattatgcccaagcccaagcatgtgaggcccaagatcatcacctacatcaggaggaatccccaggccctgggccaggtggacgcctcgctggttccagtggggcttccatatgccccgcccacatgtaccatgcctcttccccacgaagagaaggcagcaggtggtgacctgaagccatctgccaacctctatgagaaattcaagccagacctgcagaagccaagggtcttcagttccggattgatggtgtctggaatcaagcccccgggacatcctttcagtcaaatgagtgaaaagtttttgcaggaggttacagaccaccctggaaaagaagagttttgttctcctccctatgctcattatgaagtccctccaactttctatcggtcagccatgctccttaagccccagctaggattgggtgcaatgtcccgtttaccatctgcaaagagcaggattctgattgcaagtcagaggtcttcagcgagcgccatccacccaccaggacccataacaacagccaccagtctctacagttccgatccttcagatttaaagaaagcttccagttcaaatgctgcaaaatccaatctcccgaaatctggtctccgtcctcccggatactcacgtctcccggcagccaaactggcggcatttggctttgtccggagctccagcgtctcctcagtctccagcacccagtccggggacagtgcacagccagagcagggccggccagccacccgttcaacctttgggaatgaagaacagccagttctgaaggcatctctgccttctaaggacacacccaagggggccggccgggtggcccctccagcatcctccagtgtgacagcaccccgcaggagtttacttccagcgccaaaatccacttccacacccgctggaacaaagaaagatgctcagaaagatcaagatacgaataaacctgctgtttcatctcctaagagagtagcagcttcaaccaccaagcttcattcaccaggatacccaaagcagaggactgcggcagctcgaaatgggtttccgcccaagccggacccgcaggcccgtgaggctgagcggcagctggtgctgcggctgaaggagcggtgtgagcagcagaccagacagctgggcgttgcgcaaggggagctgaagagggccatctgcggctttgatgccctcgccgtggccacgcagcatttctttagaaagaatgaaagtgcccttgtgaaagaaaaagagctgtcaatcgaacttgcaaacatcagggatgaagttgccttccatacagcaaagtgcgagaaactacaaaaggagaaggaggagctggagaggcggttcgaggacgaggtgaagaggctgggctggcagcagcaggccgagctccaggagctggaggagcggctgcagctgcaattcgaggcggaaatggcgcgcctgcaggaggagcacggtgaccagctgctgagcatccggtgtcaacaccaggagcaggtggaagatctcaccgccagccatgatgctgctctcctagagatggaaaataaccacacagttgccatcacaatcctgcaggatgaccacgaccacaaagtccaagaattgatgtccactcatgagcttgaaaagaaagaattggaagaaaattttgaaaaactgcggctgtcattgcaggaccaggtggacacgctgaccttccagagccagtctctgcgggacagagcccgccgcttcgaagaggccttgaggaagaacacagaggagcagctggagattgcattggctccttatcagcacttggaagaagacatgaagagtctgaagcaggtattagaaatgaagaatcagcaaatacacgagcaagaaaagaagattcttgagctggaaaagctggcagaaaagaacattatcctagaagaaaagatccaggttctccaacagcagaacgaagacctcaaagcaaggattgaccaaaacacagttgtcaccagacagctgtcggaggaaaatgctaacctccaggaatatgttgagaaggaaacccaggagaagaagagattgagccgaaccaatgaagagctgctttggaagctccaaactggggacccgaccagtccgattaaactctcgcccacatctcccgtttaccgcggctcctcctcggggccctcctctccggccagagtcagcacaacacccagatgacgccactacacggcctgcgggagctccggcttctcgtcctccggtctccaccctgagggagcaccgacccggtgccgccggagctggccctgtgcgcatgctcagtagctgcgaatgcatcctaggcgcgtcctcctctgatccccgtgtaagactgccctggtgtcggcacttaggaatgtgtaaatggtaaagtctgatgtgcaaacgttttaccatagttagagccaaaagaaagacacttgcaattgttcttgagcaatgaactttcactgcagaatttcaggttagttacaaaaagctcagttttcaatatacattgaataatcattgtgtactgcaccgatatgtgtgtatatttagatatacgtatatacacatgctgcggttctgaatttcattttttataacatgaagtgctgacatattttagtgaaggtcagcagttttctaacttgtgcctaagaattattgggaaatgaaaatgcatttctatctagcttcccaggaatatttctacccaaaatag

SEQ ID NO: 67 - DNA, 375 bp, Artificial
  cDNA Sequence
atgactcttaatgagcatgctgccttcaagcatctgtttaacaaagcacatcttgcaccgcccttaatccatttaactctgagtggacacagcacatgtttcagagagcacagggttgggggtaaggttacagatcaacaggatcccaaggcagaagaatttttcttagtacagaacaaaatgaaaagtctcccatgtctacttctttctacacagacacggcaaccatccgatttctcaatcttttccccacctttcccccctttctattccacaaaaccgccattgtcatcctggcccgttctcaatgagctgttgggtacacctcccagacggggtggtggccgggcagaggggctcctcacttcccagtag

SEQ ID NO: 68 - DNA, 2542 bp, Artificial
  cDNA Sequence
agagtttccgcacccgggagggagatgcggccggggctcaggctccttgcagttgtaatttagattcgagaagtggtttatcctttgactggaaaagaaaagtagctgcagtattcccccagcacttgctgagagcatgccgtatgccaggctgtgaggctcgagagacaagcagtggaagagttgcggcctgtttcatctctggattgtaaatctgagcctccttctggcccctggaaggggacagcatcaccatggaatgattcctaaccagcataatgctggagccgggagccaccaacctgcagttttcagaatggccgtgttggacactgatttggatcacattcttccatcttctgttcttcctccattctgggctaagttagtagtgggatcggttgccattgtgtgttttgcacgcagctatgatggagactttgtctttgatgactcagaagctattgttaacaataaggacctccaagcagaaacgcccctgggggacctgtggcatcatgacttctggggcagtagactgagcagcaacaccagccacaagtcctaccggcctctcaccgtcctgactttcaggattaactactacctctcgggaggcttccaccccgtgggctttcacgtggtcaacatcctcctgcacagtggcatctctgtcctcatggtggacgtcttctcggttctgtttggcggcctgcagtacaccagtaaaggccggaggctgcacctcgcccccagggcgtccctgctggccgcgctgctgtttgctgtccatcctgtgcacaccgagtgtgttgctggtgttgtcggccgtgcagacctcctgtgtgccctgttcttcttgttatctttccttggctactgtaaagcatttagagaaagtaacaaggagggagcgcattcttccaccttctgggtgctgctgagtatctttctgggagcagtggccatgctgtgcaaagagcaagggatcactgtgctgggtttaaatgcggtatttgacatcttggtgataggcaaattcaatgttctggaaattgtccagaaggtactacataaggacaagtcattagagaatctcggcatgctcaggaacgggggcctcctcttcagaatgaccctgctcacctctggaggggctgggatgctctacgtgcgctggaggatcatgggcacgggcccgccggccttcaccgaggtggacaacccggcctcctttgctgacagcatgctggtgagggccgtaaactacaattactactattcattgaatgcctggctgctgctgtgtccctggtggctgtgttttgattggtcaatgggctgcatccccctcattaagtccatcagcgactggagggtaattgcacttgcagcactctggttctgcctaattggcctgatatgccaagccctgtgctctgaagacggccacaagagaaggatccttactctgggcctgggatttctcgttatcccatttctccccgcgagtaacctgttcttccgagtgggcttcgtggtcgcagagcgtgtcctctacctccccagcgttgggtactgtgtgctgctgacttttggattcggagccctgagcaaacataccaagaaaaagaaactcattgccgctgtcgtgctgggaatcttattcatcaacacgctgagatgtgtgctgcgcagcggcgagtggcggagtgaggaacagcttttcagaagtgctctgtctgtgtgtcccctcaatgctaaggttcactacaacattggcaaaaacctggctgataaaggcaaccagacagctgccatcagatactaccgggaagctgtaagattaaatcccaagtatgttcatgccatgaataatcttggaaatatcttaaaagaaaggaatgagctacaggaagctgaggagctgctgtctttggctgttcaaatacagccagactttgccgctgcgtggatgaatctaggcatagtgcagaatagcctgaaacggtttgaagcagcagagcaaagttaccggacagcaattaaacacagaaggaaatacccagactgttactacaacctcgggcgtctgtatgcagatctcaatcgccacgtggatgccttgaatgcgtggagaaatgccaccgtgctgaaaccagagcacagcctggcctggaacaacatgattatactcctcgacaatacaggtaatttagcccaagctgaagcagttggaagagaggcactggaattaatacctaatgatcactctctcatgttctcgttggcaaacgtgctggggaaatcccagaaatacaaggaatctgaagctttattcctcaaggcaattaaagcaaatccaaatgctgcaagttaccatggtaatttggctgtgctttatcatcgttggggacatctagacttggccaagaaacactatgaaatctccttgcagcttgaccccacggcatcaggaactaaggagaattacggtctgctgagaagaaagctagaactaatgcaaaagaaagctgtctga

SEQ ID NO: 69 - DNA, 2363 bp, Artificial
  cDNA Sequence
ggaaaacttgtctctgcgttgtggggaggacgcgcgctcgcgcgggattttcaagcgtaggcccccgggaactcgagctgccatgagcctctgggtggacaagtatcggccctgctccttgggacggctggactatcacaaggagcaggcggcccagctgcggaacctggtgcagtgtggtgactttcctcatctgttagtgtacggaccatcaggtgctggaaaaaagacaagaattatgtgtattctacgtgaactttatggtgttggagtggaaaaattgagaattgaacatcagaccatcacaactccatctaaaaaaaaaattgaaattagcaccattgcaagtaactaccaccttgaagttaatcctagtgatgctggaaatagtgaccgagtagtcattcaggagatgttgaaaacagtggcacaatcacaacaacttgaaacaaactctcaaagggattttaaagtggtattattgacagaagttgacaaactcaccaaagatgctcagcatgccttgcgaagaaccatggaaaaatatatgtctacctgcagattgatcttgtgctgcaattctacatctaaagtgatcccacctattcgtagtaggtgcttggcggttcgtgtgcctgctcccagcattgaagatatttgccacgtgttatctactgtgtgtaagaaggaaggtctgaatcttccttcacaactggctcatagacttgcagagaagtcttgtagaaatctcagaaaagccctgcttatgtgtgaagcctgcagagtgcaacaatatccttttactgcagatcaagaaatccctgagacagattgggaggtgtatctgagggagactgcaaatgctattgtcagtcagcaaactccacaaaggctccttgaagttcgtggaaggctgtatgagcttctaactcattgtattcctcctgagataataatgaagggccttctctcagaactgttacataattgtgatggacaactgaaaggggaggtggcacaaatggcagcttactatgagcatcgtctacagctgggtagcaaagccatttatcacttggaagcgtttgtggccaaattcatggcactttataagaagttcatggaggatggattggaaggcatgatgttctgacttctgtcagttattcttgcaaagatttctcagtatcagtatttacatacagcttatattaaaagagctgtgggtaaattaactgaacttaatcatgtcgtatttgcgtttttttggtaataacttctctgtgaactattaatcatcctctgagttaaataattgctcctatactattgaagtatgtagttttgtacataacttagagactttagagtctaagaaaatgatcttaatttactttaagcattggttattcaagtattcattgttgatcctcctattctcttccgtctaatctctcacctgctaaaggagatttacacattagaaagcaaagattattttcatttatccagatgaccattttctgccacaggtaacatgattgtttgacacaccattatatttaattctagtttctctcaatgaataattgtatttttgtaggaaatgtaagatttcattctgaaacataattattggtatggacaaaattgcagataccatttctgttgaggctgcagatttccaacttttatttcagtggttcagattagtattaggtcggtactaagaaataagcatgttttcactaatttaagtacttgagactcttgaagaaaattcagaatgaagttctggagaaaggtatgttactgtagtaattactctttgaacaggttttgtgttttgtcattagctctgccctttttaattaaatattttggttcatggaccaaagggtttacttgacaaatttgtgtgacagactccgaacaattcctttactacgaagtataatttataaaataaaatatacccattttaagggtacagtttgatttttgaccagtgaaactatgatcccaatcaaggtatagatgccgtcaccccaaaaagttccctccatatccctttgcagtcagttcatccctaccctggcccagatgatcactgatcttgtcattatagatgagttttgccagttcaagaatttaatggaatcagatattgtaagcattcttgtgtaatacttcattctctctcattattgagattcatccatattgttgaatgtttcactagttaatgtttattgttcaatatttttgtatatacttttaaagcctattcacttgctgatggatctttggtttgtttccaggtttggttattatgaataaagttgctgtgaatacttacgtgt

SEQ ID NO: 70 - DNA, 498 bp, Artificial
  cDNA Sequence
ggcctcaccatctcctctttcttctcccacctctttgacaagaagcagatgcacattctgatggttggattggatgccgctggcaagacgaccattccgtatgaactgaagttaggggagatagtcaccaccattcctaccgttggctgcaatgtggaagcggtagactataaaaacattcgtttcacagtatgggatgctggtggtcaagatagaattaggcctctccggaagtattacttcccaaatacccaatatcttatatttgtggtagatagcaataatcgtgaaagaattaaggaggtagcaggtgagctgcagaaattgcttctggtagatgagttgagagaggcagtgctgctgctttttgagaatcacaggatttgccaaatgctcttcgatctcctcctaacaggacattctgttcaagccacgtgcataacacaaggaactggtctgtgtgagagacctgaccagctgtcaaaggagctttcaaaa

SEQ ID NO: 71 - DNA, 1317 bp, Artificial
  cDNA Sequence
ggaaacggaagtgagcggcggggtcgactgacggtaacggggcagagaggctgttcgcagagctgcggaagatgaatgccagaggacttggatctgagctaaaggacagtattccagttactgaactttcagcaagtggaccttttgaaagtcatgatcttcttcggaaaggtttttcttgtgtgaaaaatgaacttttgcctagtcatccccttgaattatcagaaaaaaatttccagctcaaccaagataaaatgaatttttccacactgagaaacattcagggtctatttgctccgctaaaattacagatggaattcaaggcagtgcagcaggttcagcgtcttccatttctttcaagctcaaatctttcactggatgttttgaggggtaatgatgagactattggatttgaggatattcttaatgatccatcacaaagcgaagtcatgggagagccacacttgatggtggaatataaacttggtttactgtaatagtgtgctgttcatggaaaccgagggctgcatcttgtttatagtcatctttgtactgtaatttgatgtacacaacattaaaagtactgacacctgagaatttctgctcaagtagtatcagtgatcatttaaaatttggaggggtctttggtttacagccatgtgacaattaaaagcactaaagggagatcatgttaaagctcttaatttatattaaaacagtagcctttgtctttaaaaaagttgttgctcatgaatattataaaatgatctacaggtttcaattcaacctgtttctaggtttttttgtaaatttagttttgattaagcattataagcatttgagtctataaactttatagtagcatctttcagaataaacatttttaattgatttcagtggcaactctcaaattgattacaatatgagatatatcagtgtcgtccattaacactcataagaataatatttactgtgtcagtgctattttaggattatagttattgtttgattatttcaggttgaaaagtagaagttccaaggttttgattttggtctggtctttaagtgaaaaattaaagcaaccagtagatgtaggttaaacttttacttcatagacttaatatgtaattaatatattgccaagcaacactgttaaagaaaagtaaaactcattttttcttgttcttaatttatatattacaagatactgtaaggtattctttatgaagttgatatataaaaatttacatttttagaacattagtgaatggatcatcttttacaattaaaagtatattttgattatcagtttcttag

SEQ ID NO: 72 - DNA, 3303 bp, Artificial
  cDNA Sequence
cggcggacagcgatgctcagctggctgcggccgagtcatcgcctagcgctggcagggccgctgaccgaccgacggaggcgccgattggccgattgtccactgcgcagaaggagcagctgctccgcgccccgccgcgccgcgctgaggccgaggtccgcagggccgcggggaagccgagggctgccggagaaccctgcaggtgtcactcgggacgcggaagtgcgcttgccgaggtttgctttacaatacgcttgagactccccgacaagcgtaatttggtcgagttcgacgggaaagtactctccccaccccagcgccggccgcgtagtccgaggttactgtccccggcgcgtcctctgttgccccagtccagaggctgcccttgaacccgggcgcgcacgagcgcagggcatccgaggcgacagcccctggcacggcccgacctgtacccagcctggcaggaagactgtaatcgtgggaatacagctacctacccaggcaatatgaagattttatttgtagaacctgccattttccttagtgcatttgctatgactttgaccggtccactgacaacgcaatatgtttatcggagaatatgggaagaaactggcaactacactttttcatctgatagcaatatttctgagtgtgaaaaaaacaaaagcagcccaatttttgcattccaggaggaagttcagaaaaaagtgtcacgttttaatctgcagatggacataagtggattaattcctggtctagtgtctacattcatacttttgtctattagtgatcactacggacgaaaattccctatgattttgtcttccgttggtgctcttgcaaccagcgtttggctctgtttgctttgctattttgcctttccattccagcttttgattgcatctaccttcattggtgcattttgtggcaattataccacattttggggagcttgctttgcctatatagttgatcagtgtaaagaacacaaacaaaaaacaattcgaatagctatcattgactttctacttggacttgttactggactaacaggactgtcatctggctattttattagagagctaggttttgagtggtcgtttctaattattgctgtgtctcttgctgttaatttgatctatattttattttttctcggagatccagtgaaagagtgttcatctcagaatgttactatgtcatgtagtgaaggcttcaaaaacctattttaccgaacttacatgctttttaagaatgcttctggtaagagacgatttttgctctgtttgttactttttacagtaatcacttatttttttgtggtaattggcattgccccaatttttatcctttatgaattggattcaccactctgctggaatgaagtttttataggttatggatcagctttgggtagtgcctcttttttgactagtttcctaggaatatggcttttttcttattgtatggaagatattcatatggccttcattgggatttttaccacgatgacaggaatggctatgaccgcgtttgccagtacaacactgatgatgtttttagccagggtgccgttccttttcactattgtgccattctctgttctacggtccatgttgtcaaaagtggttcgttcgactgaacaaggtaccctgtttgcttgtattgctttcttagaaacacttggaggagtcactgcagtttctacttttaatggaatttactcagccactgttgcttggtaccctggcttcactttcctgctgtctgctggtctgttactacttccagccatcagtctatgtgttgtcaagtgtaccagctggaatgagggaagctatgaacttcttatacaagaagaatccagtgaagatgcttcagacaggtgactgtgatttaaacaaacaaaaaaaatctatgaatgcacatatcatataccatgacttctgaagactataaatgaattccacaatcagtgcttcactgagaaccaattttacctatcttttcttctaaactgaacagtcagagagacagctcctggctttagcttcttgtggtaccacgcactttgagcactttgtgcgtatcatgcaatatacttgcaatacacagaacaaatttcaaatacgcctcacttttagacttagaagagaaacattaaaacttaagggtgtaaggagggatcaagaaacttgataaggtcaaaagcaataatctctctgacatattccaggctcttacactgagaccaaagagaaatctttacctcagtttcttcatcagcagaatgggtttctggcctctctcagggataattttgaaggcataatgaaaattatgatgaatcactcattggtaggaaaataatgatataagtttcaaatatgtatgattttacctatacttggtaatgctttattttatagagcctgttaagctgctattgatagtcggagcttatatactgtgacttctgaagactatacatgaattccacaatcagtgctttgttgatacaaaatccttaaaagggaggcactttaaagaatatgtatttttcacttttcttaatatgtttcatcggtgacaggcatgataatatttctatatgtaatgggtaattgggaaaaaatagatgataaataaaattgctctaaagaagttaaaaaactgaatgaacagctaatactggtataaagtaactaatgtttggagccaacatttgttccttgtgtcagcaaaaggatattcacattccatgatccctggctgagaattctgcctctagtctttcttacccagctgttgtctatccttgttcaattataaatactgctaagggcatttttaaaatacgatcttgtactccttaaatttgaatccgtcaacacggtcactcataggaaaatgatcaaacaagcaagccagtcatgatttgactccttcccatctcatttcttactgccttacgctcatcctgaggtccaccttggtctctaaaaacaccatgtgttctcatgcctccatgtcttttcacacactgttccatttgctcttcctcccacattacattgaaactttcaagcctcagtcgaaacattgcttcttctggatagcagccttcttgacatccctcctcactccccagtccctacagggcttccatagctctttgtgtgcacttcgatcccagcattttccatcgacttgtaattgtttctgctacctgacaatcatcgccttgagtactgggacaacctttgattactcattatatcctcaataaatatttgttgaact

SEQ ID NO: 73 - DNA, 4291 bp, Artificial
  cDNA Sequence
cgggaggctcggagcgcgccaggcggacactcctctcggctcctccccggcagcggcggcggctcggagcgggctccggggctcgggtgcagcggccagcgggcgcctggcggcgaggattacccggggaagtggttgtctcctggctggagccgcgagacgggcgctcagggcgcggggccggcggcggcgaacgagaggacggactctggcggccgggtcgttggccgcggggagcgcgggcaccgggcgagcaggccgcgtcgcgctcaccatggtcagctactgggacaccggggtcctgctgtgcgcgctgctcagctgtctgcttctcacaggatctagttcaggttcaaaattaaaagatcctgaactgagtttaaaaggcacccagcacatcatgcaagcaggccagacactgcatctccaatgcaggggggaagcagcccataaatggtctttgcctgaaatggtgagtaaggaaagcgaaaggctgagcataactaaatctgcctgtggaagaaatggcaaacaattctgcagtactttaaccttgaacacagctcaagcaaaccacactggcttctacagctgcaaatatctagctgtacctacttcaaagaagaaggaaacagaatctgcaatctatatatttattagtgatacaggtagacctttcgtagagatgtacagtgaaatccccgaaattatacacatgactgaaggaagggagctcgtcattccctgccgggttacgtcacctaacatcactgttactttaaaaaagtttccacttgacactttgatccctgatggaaaacgcataatctgggacagtagaaagggcttcatcatatcaaatgcaacgtacaaagaaatagggcttctgacctgtgaagcaacagtcaatgggcatttgtataagacaaactatctcacacatcgacaaaccaatacaatcatagatgtccaaataagcacaccacgcccagtcaaattacttagaggccatactcttgtcctcaattgtactgctaccactcccttgaacacgagagttcaaatgacctggagttaccctgatgaaaaaaataagagagcttccgtaaggcgacgaattgaccaaagcaattcccatgccaacatattctacagtgttcttactattgacaaaatgcagaacaaagacaaaggactttatacttgtcgtgtaaggagtggaccatcattcaaatctgttaacacctcagtgcatatatatgataaagcattcatcactgtgaaacatcgaaaacagcaggtgcttgaaaccgtagctggcaagcggtcttaccggctctctatgaaagtgaaggcatttccctcgccggaagttgtatggttaaaagatgggttacctgcgactgagaaatctgctcgctatttgactcgtggctactcgttaattatcaaggacgtaactgaagaggatgcagggaattatacaatcttgctgagcataaaacagtcaaatgtgtttaaaaacctcactgccactctaattgtcaatgtgaaaccccagatttacgaaaaggccgtgtcatcgtttccagacccggctctctacccactgggcagcagacaaatcctgacttgtaccgcatatggtatccctcaacctacaatcaagtggttctggcacccctgtaaccataatcattccgaagcaaggtgtgacttttgttccaataatgaagagtcctttatcctggatgctgacagcaacatgggaaacagaattgagagcatcactcagcgcatggcaataatagaaggaaagaataagatggctagcaccttggttgtggctgactctagaatttctggaatctacatttgcatagcttccaataaagttgggactgtgggaagaaacataagcttttatatcacagatgtgccaaatgggtttcatgttaacttggaaaaaatgccgacggaaggagaggacctgaaactgtcttgcacagttaacaagttcttatacagagacgttacttggattttactgcggacagttaataacagaacaatgcactacagtattagcaagcaaaaaatggccatcactaaggagcactccatcactcttaatcttaccatcatgaatgtttccctgcaagattcaggcacctatgcctgcagagccaggaatgtatacacaggggaagaaatcctccagaagaaagaaattacaatcagagatcaggaagcaccatacctcctgcgaaacctcagtgatcacacagtggccatcagcagttccaccactttagactgtcatgctaatggtgtccccgagcctcagatcacttggtttaaaaacaaccacaaaatacaacaagagcctggaattattttaggaccaggaagcagcacgctgtttattgaaagagtcacagaagaggatgaaggtgtctatcactgcaaagccaccaaccagaagggctctgtggaaagttcagcatacctcactgttcaaggaacctcggacaagtctaatctggagctgatcactctaacatgcacctgtgtggctgcgactctcttctggctcctattaaccctctttatccgaaaaatgaaaaggtcttcttctgaaataaagactgactacctatcaattataatggacccagatgaagttcctttggatgagcagtgtgagcggctcccttatgatgccagcaagtgggagtttgcccgggagagacttaaactgggcaaatcacttggaagaggggcttttggaaaagtggttcaagcatcagcatttggcattaagaaatcacctacgtgccggactgtggctgtgaaaatgctgaaagagggggccacggccagcgagtacaaagctctgatgactgagctaaaaatcttgacccacattggccaccatctgaacgtggttaacctgctgggagcctgcaccaagcaaggagggcctctgatggtgattgttgaatactgcaaatatggaaatctctccaactacctcaagagcaaacgtgacttattttttctcaacaaggatgcagcactacacatggagcctaagaaagaaaaaatggagccaggcctggaacaaggcaagaaaccaagactagatagcgtcaccagcagcgaaagctttgcgagctccggctttcaggaagataaaagtctgagtgatgttgaggaagaggaggattctgacggtttctacaaggagcccatcactatggaagatctgatttcttacagttttcaagtggccagaggcatggagttcctgtcttccagaaagtgcattcatcgggacctggcagcgagaaacattcttttatctgagaacaacgtggtgaagatttgtgattttggccttgcccgggatatttataagaaccccgattatgtgagaaaaggagatactcgacttcctctgaaatggatggctcctgaatctatctttgacaaaatctacagcaccaagagcgacgtgtggtcttacggagtattgctgtgggaaatcttctccttaggtgggtctccatacccaggagtacaaatggatgaggacttttgcagtcgcctgagggaaggcatgaggatgagagctcctgagtactctactcctgaaatctatcagatcatgctggactgctggcacagagacccaaaagaaaggccaagatttgcagaacttgtggaaaaactaggtgatttgcttcaagcaaatgtacaacaggatggtaaagactacatcccaatcaatgccatactgacaggaaatagtgggtttacatactcaactcctgccttctctgaggacttcttcaaggaaagtatttcagctccgaagtttaattcaggaagctctgatgatgtcagatacgtaaatgctttcaagttcatgagcctggaaagaatcaaaacctttgaagaacttttaccgaatgccacctccatgtttgatgactaccagggcgacagcagcactctgttggcctctcccatgctgaagcgcttcacctggactgacagcaaacccaaggcctcgctcaagattgacttgagagtaaccagtaaaagtaaggagtcggggctgtctgatgtcagcaggcccagtttctgccattccagctgtgggcacgtcagcgaaggcaagcgcaggttcacctacgaccacgctgagctggaaaggaaaatcgcgtgctgctccccgcccccagactacaactcggtggtcctgtactccaccccacccatctag

SEQ ID NO: 74 - DNA, 1017 bp, Artificial
  cDNA Sequence
atggggaaaaaacagaacagaaaaactggaaactctaaaacgcagagtgcctctcctcctccaaaggaacgcagttcctcaccagcaacagaacaaagctggatggagaatgattttgacgagctgagagaagaaggcttcagacgatcaaattactctgagctacgggaggacattcaaaccaaaggcaaagaagttgaaaactttgaaaaaaatttagaagaatgtataactagaataaccaatacagagaagtgcttaaaggagctgatggagctgaaaaccaaggctcgagaactacgtgaagaatgcagaagcctcaggagccgatgcgatcaactggaagaaagggtatcagcaatggaagatgaaatgaatgaaatgaagcgagaagggaagtttagagaaaaaagaataaaaagaaatgagcaaagcctccaagaaatatgggactatgtgaaaagaccaaatctacgtctgattggtgtacctgaaagtgatgtggagaatggaaccaagttggaaaacactctgcaggatattatccaggagaacttccccaatctagcaaggcaggccaacgttcagattcaggaaatacagagaacgccacaaagatactcctcgagaagagcaactccaagacacataattgtcagattcaccaaagttgaaatgaaggaaaaaatgttaagggcagccagagagaaaggtcgggttaccctcaaaggaaagcccatcagactaacagcggatctctcggcagaaaccctacaagccagaagagagtgggggccaatattgaacattcttaaagaaaagaattttcaacccagaatttcatatccagccaaactaagcttcataagtgaaggagaaataaaatactttatagacaagcaaatgctgagagattttgtcgccaccaggcctgccctaaaagagctcctgaaggaagcgctaaacatggaaaggaacaaccggtaccagccgctgcaaaatcatgccaaaatgtaa

SEQ ID NO: 75 - DNA, 1572 bp, Artificial
  cDNA Sequence
atggcattgacagagacacaaccacagctcctttcagcagacctggtcttagccctccaggtgctcatgctttgggagatgacagaggcaaacaaagtacttaagagaagacaacacccccaacgatctcactgtatttccagcaaaatacttgagtcctacccaggtgaaaagccattgacaaaatctctgcaacgtggagaagacccccaatttgatcaggtcatcagctcaatgagctccctttctgagtactgcctgccttccattctacgtacattatttgactgcgatgaacaacagcgagattatttaatggaaagacgggacctcgccattgattttattttttctttagtattaatagaagttttgaaacagggatccctaacttgtctaattataccctacttaggtaccttggtcccaacactggcaatatgcatattgtggcagacctgtatgcagaagtcattggagtgttggcacaagccaagtaaattccctgctgtaaagaagaaatttatggcggagctaaaagaattacggcacaaagagcagaacccatatgtggttcaaagcattatcagcttaataatgggcatgaaattctttcgaattaagatgtatccagtggaggattttgaggcctctcttcagtttatgcaggaatgtgcacattacttcctcgaggtcaaagacaaagatatcaagcatgccttggctgggctttttgttgaaatacttgttccagttgctgctgctgttaaaaatgaagtaaatgttccctgccttagaaattttgtggaaagcctgtatgacaccacgctggaactttcttctcgaaagaagcattccttggccttgtaccccctggtgacctgtttgctctgtgtcagtcagaagcagctgttcctgaacaggtggcacattttcctcaacaactgcttgtccaaccttaaaaacaaagatcccaagatggctcgagttgcactggaatctctctacagattactttgggtttacatgattcgaattaaatgtgaaagcaacacagctactcagagccgacttataaccatcatcacaacacttttccccaaagggtcccgcggtgtggtaccaagggacatgcctctgaacatctttgtgaaaatcatccagttcattgcccaggaacgtttagattttgcaatgaaagaaatcattttcgattttctttgtgtgggaaaaccagcaaaagcattcagtctcaacccagagagaatgaacattggtttacgggcattcttggtcatagctgatagcttgcagcagaaagatggggaacctcccatgccggttacaggagccgttcttccttcaggaaacacgttaagagtaaagaaaacatatttgagtaaaacactaactgaagaggaagccaaaatgataggcatgtccttatattactctcaagtacgaaaagctgtagacaacattttaaggcaccttgataaagaagtaggaaggtgtatgatgctgactaatgtacagatgttaaacaaagaaccggaagacatgatcacgtga

SEQ ID NO: 76 - DNA, 324 bp, Artificial
  cDNA Sequence
atggccagccagcaggattcgggcttctttgagatcagtatcaaatatttactgaaatcctggagtaatacttctcccgttggcaacggttacatcaagcctccggttccacctgcttctggcacgcacagggagaaagggccgccaaccatgctacccatcaatgtggacccagacagtaaaccaggagaatatgtcctcaaaagtttatttgtcaacttcaccactcaggctgaacgcaagattcgtatcattatggcagagcccctggaaaagccattgacaaaatctctgcaacgtggagaagacccccaatttgatcag

SEQ ID NO: 77 - DNA, 2445 bp, Artificial
  cDNA Sequence
atgtcggtggtggggttggacgtgggctcgcagagctgctacatcgcggtagcccgggccgggggcatcgagaccatcgccaatgagttcagcgaccggtgcaccccgtcagtcatatcatttggatcaaaaaatagaacaatcggagttgcagccaaaaatcagcaaatcactcatgcaaacaatacggtgtctaacttcaaaagatttcatggccgagcattcaatgaccccttcattcaaaaggagaaggaaaacttgagttacgatttggttccattgaaaaatggtggagttggaataaaggtaatgtacatgggtgaagaacatctatttagtgtggagcagataacagccatgttgttgactaagctgaaggaaactgctgaaaacagcctcaagaaaccagtaacagattgtgttatttcagtcccctccttctttacagatgctgagaggcgatctgtgttagatgctgcacagattgttggcctaaactgtttaagacttatgaatgacatgacagctgttgctttgaattacggaatttataagcaggatctcccaagcctggatgagaaacctcggatagtggtttttgttgatatgggacattcagcttttcaagtgtctgcttgtgcttttaacaagggaaaattgaaggtactgggaacagcttttgatcctttcttaggaggaaaaaacttcgatgaaaagttagtggaacatttttgtgcagaatttaaaactaagtacaagttggatgcaaaatccaaaatacgagcactcctacgtctgtatcaggaatgtgaaaaactgaaaaagctaatgagctctaacagcacagaccttccactgaatatcgaatgctttatgaatgataaagatgtttccggaaagatgaacaggtcacaatttgaagaactctgtgctgaacttctgcaaaagatagaagtacccctttattcactgttggaacaaactcatctcaaagtagaagatgtgagtgcagttgagattgttggaggcgctacacgaattccagctgtgaaggaaagaattgccaaattctttggaaaagatattagcacaacactcaatgcagatgaagcagtagccagaggatgtgcattacagtgtgcaatactttccccggcatttaaagttagagaattttccgtcacagatgcagttccttttccaatatctctgatctggaaccatgattcagaagatactgaaggtgttcatgaagtctttagtcgaaaccatgctgctcctttctccaaagttctcacctttctgagaagggggccttttgagctagaagctttctattctgatccccaaggagttccatatccagaagcaaaaataggccgctttgtagttcagaatgtttctgcacagaaagatggagaaaaatctagagtaaaagtcaaagtgcgagtcaacacccatggcattttcaccatctctacggcatctatggtggagaaagtcccaactgaggagaatgaaatgtcttctgaagctgacatggagtgtctgaatcagagaccaccagaaaacccagacactgatgcaaatgaaaaaaaagttgaccagcctccagaagctaaaaagcccaaaataaaggtggtgaatgttgagctgcctattgaagccaacttggtctggcagttagggaaagaccttcttaacatgtatattgagacagagggtaagatgataatgcaagataaattggaaaaagaaaggaatgatgctaaaaatgcagttgaggaatatgtgtatgagttcagagacaagctgtgtggaccatatgaaaaatttatatgtgagcaggatcatcaaaattttttgagactcctcacagaaactgaagactggctgtatgaagaaggagaggaccaagctaaacaagcatatgttgacaagttggaagaattaatgaaaattggcactccagttaaagttcggtttcaggaagctgaagaacggccaaaaatgtttgaagaactaggacagaggctgcagcattatgccaagatagcagctgacttcagaaataaggatgagaaatacaaccatattgatgagtctgaaatgaaaaaagtggagaagtctgttaatgaagtgatggaatggatgaataatgtcatgaatgctcaggctaaaaagagtcttgatcaggatccagttgtacgtgctcaggaaattaaaacaaaaatcaaggaattgaacaacacatgtgaacccgttgtaacacaaccgaaaccaaaaattgaatcacccaaactggaaagaactccaaatggcccaaatattgataaaaaggaagaagatttagaagacaaaaacaattttggtgctgaacctccacatcagaatggtgaatgttaccctaatgagaaaaattctgttaatatggacttggactag

SEQ ID NO: 78 - DNA, 3293 bp, Artificial
  cDNA Sequence
gtgcgatacataaggctgaggaagtgggacctccccttttgggtcggtagttcagcgccggcgccggtgtgcgagccgcggcagagtgaggcaggcaacccgaggtgcggagcgacctgcggaggctgagccccgctttctcccagggtttcttatcagccagccgccgctgtccccgggggagtaggaggctcctgacaggccgcggctgtctgtgtgtccttctgagtgtcagaggaacggccagaccccgcgggccggagcagaacgcggccagggcagaaagcggcggcaggagaagcaggcagggggccggaggacgcagaccgagacccgaggcggaggcggaccgcgagccggccatgtcggtggtggggttggacgtgggctcgcagagctgctacatcgcggtagcccgggccgggggcatcgagaccatcgccaatgagttcagcgaccggtgcaccccgtcagtcatatcatttggatcaaaaaatagaacaatcggagttgcagccaaaaatcagcaaatcactcatgcaaacaatacggtgtctaacttcaaaagatttcatggccgagcattcaatgaccccttcattcaaaaggagaaggaaaacttgagttacgatttggttccattgaaaaatggtggagttggaataaaggtaatgtacatgggtgaagaacatctatttagtgtggagcagataacagccatgttgttgactaagctgaaggaaactgctgaaaacagcctcaagaaaccagtaacagattgtgttatttcagtcccctccttctttacagatgctgagaggcgatctgtgttagatgctgcacagattgttggcctaaactgtttaagacttatgaatgacatgacagctgttgctttgaattacggaatttataagcaggatctcccaagcctggatgagaaacctcggatagtggtttttgttgatatgggacattcagcttttcaagtgtctgcttgtgcttttaacaagggaaaattgaaggtactgggaacagcttttgatcctttcttaggaggaaaaaacttcgatgaaaagttagtggaacatttttgtgcagaatttaaaactaagtacaagttggatgcaaaatccaaaatacgagcactcctacgtctgtatcaggaatgtgaaaaactgaaaaagctaatgagctctaacagcacagaccttccactgaatatcgaatgctttatgaatgataaagatgtttccggaaagatgaacaggtcacaatttgaagaactctgtgctgaacttctgcaaaagatagaagtacccctttattcactgttggaacaaactcatctcaaagtagaagatgtgagtgcagttgagattgttggaggcgctacacgaattccagctgtgaaggaaagaattgccaaattctttggaaaagatattagcacaacactcaatgcagatgaagcagtagccagaggatgtgcattacagtgtgcaatactttccccggcatttaaagttagagaattttccgtcacagatgcagttccttttccaatatctctgatctggaaccatgattcagaagatactgaaggtgttcatgaagtctttagtcgaaaccatgctgctcctttctccaaagttctcacctttctgagaagggggccttttgagctagaagctttctattctgatccccaaggagttccatatccagaagcaaaaataggccgctttgtagttcagaatgtttctgcacagaaagatggagaaaaatctagagtaaaagtcaaagtgcgagtcaacacccatggcattttcaccatctctacggcatctatggtggagaaagtcccaactgaggagaatgaaatgtcttctgaagctgacatggagtgtctgaatcagagaccaccagaaaacccagacactgataaaaatgtccagcaagacaacagtgaagctggaacacagccccaggtacaaactgatgctcaacaaacctcacagtctcccccttcacctgaacttacctcagaagaaaacaaaatcccagatgctgacaaagcaaatgaaaaaaaagttgaccagcctccagaagctaaaaagcccaaaataaaggtggtgaatgttgagctgcctattgaagccaacttggtctggcagttagggaaagaccttcttaacatgtatattgagacagagggtaagatgataatgcaagataaattggaaaaagaaaggaatgatgctaaaaatgcagttgaggaatatgtgtatgagttcagagacaagctgtgtggaccatatgaaaaatttatatgtgagcaggatcatcaaaattttttgagactcctcacagaaactgaagactggctgtatgaagaaggagaggaccaagctaaacaagcatatgttgacaagttggaagaattaatgaaaattggcactccagttaaagttcggtttcaggaagctgaagaacggccaaaaatgtttgaagaactaggacagaggctgcagcattatgccaagatagcagctgacttcagaaataaggatgagaaatacaaccatattgatgagtctgaaatgaaaaaagtggagaagtctgttaatgaagtgatggaatggatgaataatgtcatgaatgctcaggctaaaaagagtcttgatcaggatccagttgtacgtgctcaggaaattaaaacaaaaatcaaggaattgaacaacacatgtgaacccgttgtaacacaaccgaaaccaaaaattgaatcacccaaactggaaagaactccaaatggcccaaatattgataaaaaggaagaagatttagaagacaaaaacaattttggtgctgaacctccacatcagaatggtgaatgttaccctaatgagaaaaattctgttaatatggacttggactagataaccttaaattggcctattccttcaattaataaaatatttttgccatagtatgtgactctacataacatactgaaactatttatattttcttttttaaggatatttagaaattttgtgtattatatggaaaaagaaaaaaagcttaagtctgtagtctttatgatcctaaaagggaaaattgccttggtaactttcagattcctgtggaattgtgaattcatactaagctttctgtgcagtctcaccatttgcatcactgaggatgaaactgacttttgtcttttggagaaaaaaaactgtactgcttgttcaagagggctgtgattaaaatctttaagcatttgttcctgc

SEQ ID NO: 79 - DNA, 396 bp, Artificial
  cDNA Sequence
atgagccgggaggggcgggctccggccagtgtcgggggcacacaagggcctgcttccccctccctttcactgggcgactggaggacaggcggaggagtgtggctgggcggctggaggacaggcggaggagtgtggcagccggacagctggaggacaggcggaggagtgtggtggctggcagggtatgtgtttctggttctgttgagtgatgcttggaagatcgttctgagaggtcagggcagctcccgggaccccagagcactgggctcctgcaggggactaggaggccggcttttatcagctcatgagcttttaaaaatggagagaagggcaggtgtggtggctcatccctataatcccagcactttgggaggtcggggtgagaggatcatttga

SEQ ID NO: 80 - DNA, 2345 bp, Artificial
  cDNA Sequence
atggactccagagcccagctttggggactggccttgaataaaaggagggccactctacctcatcctggagggagcacgaacctaaaggcagacccagaagagctttttacaaaactagagaaaattgggaagggctcctttggagaggtgttcaaaggcattgacaatcggactcagaaagtggttgccataaagatcattgatctggaagaagctgaagatgagatagaggacattcaacaagaaatcacagtgctgagtcagtgtgacagtccatatgtaaccaaatattatggatcctatctgaaggatacaaaattatggataataatggaatatcttggtggaggctccgcactagatctattagaacctggcccattagatgaaacccagatcgctactatattaagagaaatactgaaaggactcgattatctccattcggagaagaaaatccacagagacattaaagcggccaacgtcctgctgtctgagcatggcgaggtgaagctggcggactttggcgtggctggccagctgacagacacccagatcaaaaggaacaccttcgtgggcaccccattctggatggcacccgaggtcatcaaacagtcggcctatgactcgaaggcagacatctggtccctgggcataacagctattgaacttgcaagaggggaaccacctcattccgagctgcaccccatgaaagttttattcctcattccaaagaacaacccaccgacgttggaaggaaactacagtaaacccctcaaggagtttgtggaggcctgtttgaataaggagccgagctttagacccactgctaaggagttattgaagcacaagtttatactacgcaatgcaaagaaaacttcctacttgaccgagctcatcgacaggtacaagagatggaaggccgagcagagccatgacgactcgagctccgaggattccgacgcggaaacagatggccaagcctcggggggcagtgattctggggactggatcttcacaatccgagaaaaagatcccaagaatctcgagaatggagctcttcagccatcggacttggacagaaataagatgaaagacatcccgaagaggcctttctctcagtgtttatctacaattatttctcctctgtttgcagagttgaaggagaagagccaggcgtgcggagggaacttggggtccattgaagagctgcgaggggccatctacctagcggaggaggcgtgccctggcatctccgacaccatggtggcccagctcgtgcagcggctccagagatactctctaagtggtggaggaacttcatcccactgaaattcctttggcatttggggttttgtttttccttttttccttcttcatcctcctccttttttaaaagtcaacgagagccttcgctgactccaccgaagaggtgcgccactgggagccaccccagcgccaggcgcccgtccagggacacacacagtcttcactgtgctgcagccagatgaagtctctcagatgggtggggagggtcagctccttccagcgatcattttattttattttattacttttgtttttaattttaaccatagtgcacatattccaggaaagtgtctttaaaaacaaaaacaaaccctgaaatgtatatttgggattatgataaggcaactaaagacatgaaacctcaggtatcctgctttaagttgataactccctctgggagctggagaatcgctctggtggatgggtgtacagatttgtatataatgtcatttttacggaaaccctttcggcgtgcataaggaatcactgtgtacaaactggccaagtgcttctgtagataacgtcagtggagtaaatattcgacaggccataacttgagtctattgccttgcctttattacatgtacattttgaattctgtgaccagtgatttgggttttattttgtatttgcagggtttgtcattaataattaatgcccctctcttacagaacactcctatttgtacctcaacaaatgcaaattttccccgtttgccctacgccccttttggtacacctagaggttgatttcctttttcatcgatggtactatttcttagtgttttaaattggaacatatcttgcctcatgaagctttaaattataattttcagtttctccccatgaagcgctctcgtctgacatttgtttggaatcgtgccactgctggtctgcgccagatgtaccgtcctttccaatacgattttctgttgcaccttgtagtggattctgcatatcatctttcccacctaaaaatgtctgaatgcttacacaaataaattttataacacgctt

SEQ ID NO: 81 - DNA, 3621 bp, Artificial
  cDNA Sequence
agggcggacagccacgcctctgcggagggcgaccggaagtgctcacgtcttcaccttccccgccacgccaccgtcctttcaggcccagcgtgcagcaggaaggaggactcttttgccgcggactcaagccggaagccgccttcctagtggagacgcgagtgggggaggagcagtccgaggggaacgtgggttgaacgttgcaactagggtggagatcaagctggaacaggagttccgatcgacccggtaccaagaaggggagtgcccgcggcagggttcattgaaaaaatccttagtgatattgacatgtctcaagtgacataaattagccaatgactcggaatgatggattctccgaagattggaaatggtttgccagtgattggaccagggactgatatagggatatcttcactccacatggtggggtatttgggaaaaaattttgattcagctaaagttccatcagatgagtattgccctgcttgtagagagaagggaaagttaaaagccttaaagacttaccgaattagttttcaagaatctatctttttgtgtgaggatctgcagtgcatctatcctttgggctctaaatcacttaataacctaatttctcctgatttggaagaatgtcacactccacataagcctcagaaaaggaagagcttagaaagcagctataaggattcacttcttttagcaaattccaaaaagactagaaattatattgctattgacggtggaaaagttttgaacagcaaacataatggagaagtatatgacgaaacctcgtcaaacttacctgatagtagtggtcaacagaatccaattaggacagctgattccttggagcggaatgagattttggaagctgatactgttgacatggctactacaaaagatcctgctacagttgatgtctctggaactggcagaccttcccctcaaaatgaaggatgtacatctaaactggaaatgccactggagagcaaatgtacatcatttccccaggctttatgtgtccagtggaaaaatgcttatgctctctgttggttagactgtatcctgtcagctttggtgcactcggaagagttaaagaacaccgtgactggactgtgctcgaaggaggaatctatattctggcggttgcttacaaaatataatcaagcaaatacacttctatataccagtcaattgagtggtgttaaagatggagattgtaaaaaacttacctcagaaatatttgcagagatagagacctgtctgaatgaagttagagatgaaatttttattagccttcagccccagcttagatgcacattaggtgatatggaaagccctgtgtttgcatttcccctgctcttaaaactagaaacccacattgaaaagctcttcctatattctttttcttgggactttgaatgttcgcagtgtggacaccaatatcaaaacaggcatatgaagagtctggtcacctttacaaatgtcatccctgagtggcacccacttaatgctgcccattttggtccatgtaacaattgcaacagtaaatcacaaataagaaaaatggtattagaaaaagtatctcccatattcatgttgcactttgtagaaggcttaccacagaatgacttgcagcactatgcatttcattttgaaggctgtctttatcagataacttctgtaattcagtatcgagcaaataatcattttataacatggattttagatgctgatggaagttggctggaatgtgatgacttaaaaggcccatgttctgaaaggcacaagaaatttgaagttcctgcttcagagatacatattgttatttgggaaagaaaaatatcccaagtgacagataaagaagctgcctgccttccacttaaaaagactaatgaccaacacgctctcagtaatgagaaaccagtatctttaacatcgtgttctgtgggtgatgctgcctcagctgaaacagcctcagtaactcaccctaaagatatatcagttgcccctcgtactctttcacaggacacagctgtaactcatggagatcatttactttcaggtccaaaaggtttggttgacaatattttacctctgacacttgaagaaactatccagaaaacagcctcagtttcacagttaaattctgaagctttcctgttagaaaataaacctgtagcagaaaatacaggaattctcaaaaccaatactttgctatcacaagaatcactaatggcttcttcagtatcagctccatgtaatgaaaagcttattcaagaccaatttgtggacataagttttccatcccaagttgtaaatacaaacatgcagtcagtacagctgaatacagaagatactgtaaatactaaatctgtgaataatactgatgctactggtcttatacagggagtgaagtcagtagaaattgagaaggacgctcagttaaaacaattccttacaccaaaaactgaacaattaaaaccagaacgtgtcacatctcaggtatctaatttgaagaaaaaagaaactacagcagattctcaaaccacaacatctaagtcattacagaatcagtctctgaaagaaaatcagaagaagccatttgtgggaagttgggttaaaggcttaataagcaggggtgcttcttttatgccactctgtgtttcagctcataatagaaacactataactgatttacaaccttcagttaaaggggtaaataattttggtggctttaaaactaaaggtataaaccagaaggccagccacgtatccaagaaagctcgtaagagtgcaagtaagcctcctcccatcagtaagccaccagcaggccctccatcgtctaatggcacagctgcccacccacatgctcatgctgcttcagaagttttggaaaagtctggaagcacctcatgtggagctcaactcaaccacagttcttatgggaatggtatttcttcagcaaaccatgaagacttggtggaaggtcagattcataaacttcgtctaaaacttcgtaaaaagctaaaggcagaaaagaagaaattagctgctcttatgtcttccccgcaaagcagaacagttcgaagtgaaaatctagaacaggtgccccaggatgggtctccaaatgattgtgaatcaatagaggacttgttaaatgagctaccatatccaattgatattgccagtgagtctgcatgcaccactgttcctggtgtttccctgtacagtagtcaaactcatgaagaaattttagcggaattattgtctcctacacctgtttcaacagagctgtcagaaaatggggaaggtgactttaggtatttgggaatgggagatagtcatatcccaccaccagtaccaagtgaattcaatgatgtttcccagaacacacatctgagacaggaccataattattgtagccccaccaagaaaaatccatgtgaagttcagccagactctctgacaaataatgcctgcgttagaacattaaacttggagagtccgatgaagactgatattttcgatgagtttttttcctcctcagcattaaatgctttagcaaatgacacattagacctacctcatttcgatgaatatctgtttgagaattattga

SEQ ID NO: 82 - DNA, 2421 bp, Artificial
  cDNA Sequence
gcggccgcaagcacgggggcgaatccccgctgggtcgagggcctgaacgggagccaatcgagcagccgaggctactgccaatcacgcggctccctccaatcccacccgtgccatttccaaaatctcggtcccactgtgcagctcaaatgtggtgttcactctgccaatcgctggaggatagagtgggaacaggaataagcagagttaagaggccaggacaaaagaagttaaagagcgcccaatacatacatgtttttgaaggcgggcagagggaataaagtccccccagtgagggtctatgggcctgattgtgtagttctgatggagccccctttgagcaagaggaacccgccagcgctgagattagcggatttggcaacggctcaggtccagccgcttcagaatatgacaggcttcccggcgctggccggcccgcccgcccactcccaactccgggccgccgtcgcgcacctccgcctgcgggacctgggcgctgaccccggcgtggccaccactccgctcggacccgagcacatggcccaggcgagcacgctgggcctcagccctccctcccaggcgttcccggcacacccggaggctccggcagccgccgcccgtgctgcagccttggtcgcgcaccccggcgcgggcagctacccctgcggcgggggcagcagtggcgcgcagccctccgcgcccccgcccccagcccctcctcttcctcccaccccttcaccccctccccctcccccgcctcctcctcctcctgccctctcgggctacaccaccaccaacagtggcggcggcggcagcagcggcaaaggccacagcagggacttcgtcctccggagggacctttccgccacggcccccgcggcggccatgcacggggccccgctcggaggggagcagcggtccggcaccggctccccccagcacccggccccgcctccccactcggccggcatgttcatctccgccagcggcacctacgcgggcccggacggcagcggcggcccggcgctcttccccgcgctgcacgacacgccgggggccccaggcggccacccgcacccgctcaacggccagatgcgcctggggctggcggcggcagcggcagccgcggcggctgagctgtacggccgcgccgaaccgcccttcgcgccgcgctctggggacgcgcactacggggcggttgcggccgcagcggcggccgccctgcacggctacggagccgtgaacttaaacctgaacctggcggctgcggcggccgcagcagcggccgggcccgggccccacctgcagcaccacgcgccgcccccggcgccgccgccgccgccggcgcccgcgcagcacccgcaccagcaccacccccacctcccaggggcggctggggccttcctgcgctacatgcggcagccaatcaagcaggagctcatctgcaagtggatcgaccccgacgagctggccgggctgccgccgccgccgccgccgccgccgccgccgccgccaccgcccccggccggcggcgccaagccctgctccaaaactttcggcaccatgcacgagctggtgaatcacgtcacggtggagcacgtgggaggccccgagcagagcagccacgtctgcttctgggaggactgtccgcgcgagggcaagcccttcaaggccaaatacaagctcatcaaccacatccgcgtgcacaccggcgagaagccctttccctgccctttccccggctgcggcaaggtcttcgcgcgctccgagaacctcaagatccacaagcgtactcatacaggggaaaagcctttcaaatgtgaatttgatggctgtgacaggaagtttgccaatagcagtgatcggaagaaacattcccatgtccacaccagtgacaagccctactactgcaagattcgaggctgtgacaaatcctacactcacccaagctccctgaggaagcacatgaagattcactgcaagtccccgccaccttctccaggaccccttggttactcatcagtggggactccagtgggcgcccccttgtcccctgtgctggacccagccaggagtcactccagcactctgtcccctcaggtgaccaacctcaatgagtggtacgtttgccaggccagtggggcccccagccacctccacaccccttccagcaacggaaccacctctgagactgaagatgaggaaatttacgggaaccctgaagttgtgcggacgatacattagaatttattattaataataataagtgaaataataagtgggagtccttggaccacatcctaacctgagacaatgccgagcctgagacaaacccgtgactcagacttgccaccgggtctaattagccctatttattcagtatgaaaccctatggtgtttgtacatttaattaatttaattaag

SEQ ID NO: 83 - DNA, 2240 bp, Artificial
  cDNA Sequence
cagtacattgagctccatagagacagcaccggggcaagtgagagccggacgggcactgggcgactctgtgcctcgctgaggaaaaataactaaacatgggcaaaggagatcctaagaagccgagaggcaaaatgtcatcatatgcattttttgtgcaaacttgtcgggaggagcataagaagaagcacccagatgcttcagtcaacttctcagagttttctaagaagtgctcagagaggtggaagaccatgtctgctaaagagaaaggaaaatttgaagatatggcaaaagcggacaaggcccgttatgaaagagaaatgaaaacctatatccctcccaaaggggagacaaaaaagaagttcaaggatcccaatgcacccaagaggcctccttcggccttcttcctcttctgctctgagtatcgcccaaaaatcaaaggagaacatcctggcctgtccattggtgatgttgcgaagaaactgggagagatgtggaataacactgctgcagatgacaagcagccttatgaaaagaaggctgcgaagctgaaggaaaaatatgaaaaggatattgctgcatatcgagctaaaggaaagcctgatgcagcaaaaaagggagttgtcaaggctgaaaaaagcaagaaaaagaaggaagaggaggaagatgaggaagatgaagaggatgaggaggaggaggaagatgaagaagatgaagatgaagaagaagatgatgatgatgaataagttggttctagcgcagttttttttttcttgtctataaagcatttaacccccctgtacacaactcactccttttaaagaaaaaaattgaaatgtaaggctgtgtaagatttgtttttaaactgtacagtgtctttttttgtatagttaacacactaccgaatgtgtctttagatagccctgtcctggtggtattttcaatagccactaaccttgcctggtacagtatgggggttgtaaattggcatggaaatttaaagcaggttcttgttggtgcacagcacaaattagttatatatggggatggtagttttttcatcttcagttgtctctgatgcagcttatacgaaataattgttgttctgttaactgaataccactctgtaattgcaaaaaaaaaaaaaaagttgcagctgttttgttgacattctgaatgcttctaagtaaatacaattttttttattagtattgttgtccttttcataggtctgaaatttttcttcttgaggggaagctagtcttttgcttttgcccattttgaatcacatgaattattacagtgtttatcctttcatatagttagctaataaaaagcttttgtctacacaccctgcatatcataatgggggtaaagttaagttgagatagttttcatccataactgaacatccaaaatcttgatcagttaagaaatttcacatagcccacttacatttacaaactgaagagtaatcaatctactcaaagcatgggattattagaatcaaacattttgaaagtctgtccttgaaggactaatagaaaagtatgttctaacctttacatgaggactctattctttaactcccattaccatgtaatggcagttatattttgcagttcccacattaaagaagacctgagaatgtatccccaaaagcgtgagcttaaaatacaagactgccatattaaattttttgttgacattagtctcagtgaagactatgaaaatgctggctatagatgtcttttcccatttatctaaatatggactgctcaggaaacgagactttccattacaagtatttttaattaattgggccagcttttcaaacaaagatgccacattcaaaatagggtatattttcctatattacggtttgcccctttataaatccaagtagataggaagaaagaagacaaactttgcatctcagtatgaattattcaatttatttgaatgatttttctttacaaaacaaactcattcattagtcatgtttatctgcttaggagtttagggaacaatttggcaattttgtggttttcgagattatcgttttcttaaagtgccagtattttaaaatagcgttcttgtaattttacacgcttttgtgatggagtgctgttttgttatataatttagacttggattctttccatttgcatttgtttatgtaatttcaggaggaatactgaacatctgagtcctggatgatactaataaactaataattgcag

SEQ ID NO: 84 - DNA, 1079 bp, Artificial
  cDNA Sequence
gtggcagccctcggaatcacggggaggtcactgccacaacctggctctttgtaggggggtccaactccaggcaggggatcactgcctgaggtacctctttagagtcctgagtgtggctcctggaccatccccttcccactgcttgtccacgcgcttgcaccgctatgagcgatgacggcaaaggaaaagaaaagcgtcctccctacgaggtggtctgtttcccagtggcagggggagctacggtacacaagcacaggttcacatttatgaagcagccaataagaattcccagcctgagaggaccttggaaccagaaggaattggaggagatttaaacaagctgacccaaggaaagcacaagatctttctatgcattgaagatcaccaaatcaaagataaaagtgctcgaccattatggcctatggcaaactcgggctggctgaagcatccttctcttccatttagaaccctggtgaggccccttagaccaccactgggctgtcctcctccctcctcagagacagagttctgggctgggccatggaggtgtctgtcaacacggcagtagtcctcgttctatggaaaaccagctgttccctgtgacacgactccattcccgcagctgcctgctattcagctgggctgacggacagcagagcacagggttggaagaccaccctctcagacaggtttaccaagaagctcactgagaggcgacacaaacggccaagaacatgaaaagacggtcagtgcccttgcagatggaagcaggcaatcatttttcacctgcaaggctgataaagatgaaatgttctgataatacaggaagagtataaggaaactgtcactcgatggactccaggtgaaatataactaatccagctgccttggagggaaaagatatctttcaaaattgaaatgacaggaatggcagcattatgggtgggagataaagaatctgggtttctttcaggggtgatgaaaatgttctaaaacggattgtggtgacagttttccacaactcggaatatactgaaaaccaccacattgtatacttaaatgggtgggttgtatggtat

SEQ ID NO: 85 - DNA, 2157 bp, Artificial
  cDNA Sequence
cgatcctgccggagccccgccgccgccggcttggattctgaaaccttccttgtatccctcctgagacatctttgctgcaagatcgaggctgtcctctggtgagaaggtggtgaggcttcccgtcatattccagctctgaacagcaacatggggtgcaaagtcctgctcaacattgggcagcagatgctgcggcggaaggtggtggactgtagccgggaggagacgcggctgtctcgctgcctgaacacttttgatctggtggccctcggggtgggcagcacactgggtgctggtgtctacgtcctggctggagctgtggcccgtgagaatgcaggccctgccattgtcatctccttcctgatcgctgcgctggcctcagtgctggctggcctgtgctatggcgagtttggtgctcgggtccccaagacgggctcagcttacctctacagctatgtcaccgttggagagctctgggccttcatcaccggctggaacttaatcctctcctacatcatcggtacttcaagcgtagcgagggcctggagcgccaccttcgacgagctgataggcagacccatcggggagttctcacggacacacatgactctgaacgcccccggcgtgctggctgaaaaccccgacatattcgcagtgatcataattctcatcttgacaggacttttaactcttggtgtgaaagagtcggccatggtcaacaaaatattcacttgtattaacgtcctggtcctgggcttcataatggtgtcaggatttgtgaaaggatcggttaaaaactggcagctcacggaggaggattttgggaacacatcaggccgtctctgtttgaacaatgacacaaaagaagggaagcccggtgttggtggattcatgcccttcgggttctctggtgtcctgtcgggggcagcgacttgcttctatgccttcgtgggctttgactgcatcgccaccacaggtgaagaggtgaagaacccacagaaggccatccccgtggggatcgtggcgtccctcttgatctgcttcatcgcctactttggggtgtcggctgccctcacgctcatgatgccctacttctgcctggacaataacagccccctgcccgacgcctttaagcacgtgggctgggaaggtgccaagtacgcagtggccgtgggctccctctgcgctctttccgccagtcttctaggttccatgtttcccatgcctcgggttatctatgccatggctgaggatggactgctatttaaattcttagccaacgtcaatgataggaccaaaacaccaataatcgccacattagcctcgggtgccgttgctgctgtgatggccttcctctttgacctgaaggacttggtggacctcatgtccattggcactctcctggcttactcgttggtggctgcctgtgtgttggtcttacggtaccagccagagcagcctaacctggtataccagatggccagtacttccgacgagttagatccagcagaccaaaatgaattggcaagcaccaatgattcccagctgggctttttaccagaggcagagatgttctctttgaaaaccatactctcacccaaaaacatggagccttccaaaatctctgggctaattgtgaacatttcaaccagcctcatagctgttctcatcatcaccttctgcattgtgaccgtgcttggaagggaggctctcaccaaaggggcgctgtgggcagtctttctgctcgcagggtctgccctcctctgtgccgtggtcacgggcgtcatctggaggcagcccgagagcaagaccaagctctcatttaaggttcccttcctgccagtgctccccatcctgagcatcttcgtgaacgtctatctcatgatgcagctggaccagggcacctgggtccggtttgctgtgtggatgctgataggcttcatcatctactttggctatggcctgtggcacagcgaggaggcgtccctggatgccgaccaagcaaggactcctgacggcaacttggaccagtgcaagtgacgcacagccccgccccccggaggtggcagcagccccgagggacgcccccagaggaccgggaggcaccccaccctccccaccagtgcaacagaaaccacctgcgtccacaccctcactgca

SEQ ID NO: 86 - DNA, 2681 bp, Artificial
  cDNA Sequence
atgctcctggacgcgggtccgcagttcccggccatcggggtgggcagcttcgcgcgccaccatcaccactccgccgcggcggcggcggcggctgccgccgagatgcaggaccgtgaactgagcctggcggcggcgcagaacggcttcgttgactccgccgccgcgcacatgggagccttcaagctcaacccgggcgcgcacgagctgtccccgggccagagctcggcgttcacgtcgcagggccccggcgcctaccccggctccgctgcggctgccgctgcggccgcagcgctcgggccccacgccgcgcacgttggctcctactctgggccgcccttcaactccacccgggacttcctgttccgcagccgcggcttcggggactcggcgccgggcggcgggcagcacgggctgttcgggccgggcgcgggcggcctgcaccacgcgcactcggacgcgcagggccacctcctcttcccgggcctgccagagcagcacgggccgcacggctcgcagaatgtgctcaacgggcagatgcgcctcgggctgcccggcgaggtgttcgggcgctcggagcaataccgccaggtggccagcccgcggaccgacccctactcggcggcgcaactccacaaccagtacggccccatgaatatgaacatgggtatgaacatggcagcagccgcggcccaccaccaccaccaccaccaccaccaccccggtgcctttttccgctatatgcggcagcagtgcatcaagcaggagctaatctgcaagtggatcgaccccgagcaactgagcaatcccaagaagagctgcaacaaaactttcagcaccatgcacgagctggtgacacacgtctcggtggagcacgtcggcggcccggagcagagcaaccacgtctgcttctgggaggagtgtccgcgcgagggcaagcccttcaaggccaaatacaaactggtcaaccacatccgcgtgcacacaggcgagaaacccttcccctgccccttcccgggctgtggcaaagtcttcgcgcgctccgagaacctcaagatccacaaaaggacccacacaggggagaagccgttccagtgtgagtttgagggctgcgaccggcgcttcgccaacagcagcgacaggaagaagcacatgcacgtccacacctccgataagccctatctctgcaagatgtgcgacaagtcctacacgcaccccagctcgctgcggaagcacatgaaggtccatgagtcctccccgcagggctctgaatcctccccggccgccagctccggctatgagtcgtccacgcccccggggctggtgtcccccagcgccgagccccagagcagctccaacctgtccccagcggcggcggcagcggcggcggcggctgcggcggcggcggccgcggtgtccgcggtgcaccggggcggaggctcgggcagtggcggcgcgggaggcggctcaggcggcggcagcggcagtggcgggggcggcggcggggcgggcggcgggggcggcggcagctctggcgggggcagcgggacagccgggggtcacagcggcctctcctccaacttcaatgaatggtacgtgtgacgggtcggggcctctctccctctccctgtccccaccccagcgcagcagccctccccgcagctagcagcgagggcaccttgtgatcatgttgttaaaattatgaatctgatttttatgatgatgaaaattttaccagcagaaggattttttaaagttttttttttttttttaataataatctaggcatgaagagcaaaaatatcccttccggagtctttgaagctgaaaatataaaacaaataaaaaataaaaaaataaaaacccacaaaaatgttgaaccaaacctccctgctaatctccatgcccacgttctttcccaccctgttcccagtcttctgacaaactgtgtacatagcggactcctcctttctcctccgaggtggttttaaaggctttttggtgtatagaagtttgtccatttgtaaaactccggattgcgttcctccccgccttccgccccttcccttccctaaagtgatgggctttctcttttctctttttagtttacccggtttctttttaagtaatgtggaagaaaatggtttattttgtattgtggtattgaatattgtgttcctttttatgaggcaacctgattgtaaacttcatgtaactatagactggaaaaaatgagccgtgccaaagtctcccttctgtttcttcagcacattgacccatagcacacacatacacaccaccaccaacaacgcttgtgaatgtatttttctgttagctgggtttacatgtgatgttttagtgcttttgcaagttcaatttgttagttcctgtatgaaagattgtgggggaaaaataaacgtcgtgccgttagctttttccgtaataacacccttccttctgtaaatacccgttaccatatttatccatttgtaattaaattatggtattaacttgctacagaggaaacaatatttataaagaatgtttcttaactataaatatgtacaattgtgggcataaactgtttcagattttttatttgaaggttttaagtggtttgatcatttcttgtgatgttttgagagtaatgcatacagaaatataataaaatgtgttgaaactgc

SEQ ID NO: 87 - DNA, 873 bp, Artificial
  cDNA Sequence
acttccccttcctgtacagggcaggttgtgcagctggaggcagagcagtcctctctggggagcctgaagcaaacatggatcaagaaactgtaggcaatgttgtcctgttggccatcgtcaccctcatcagcgtggtccagaatggattctttgcccataaagtggagcacgaaagcaggacccagaatgggaggagcttccagaggaccggaacacttgcctttgagcgggtctacactgccaaccagaactgtgtagatgcgtaccccactttcctcgctgtgctctggtctgcggggctactttgcagccaagttcctgctgcgtttgctggactgatgtacttgtttgtgaggcaaaagtactttgtcggttacctaggagagagaacgcagagcacccctggctacatatttgggaaacgcatcatactcttcctgttcctcatgtccgttgctggcatattcaactattacctcatcttctttttcggaagtgactttgaaaactacataaagacgatctccaccaccatctcccctctacttctcattccctaactctctgctgaatatggggttggtgttctcatctaatcaatacctacaagtcatcataattcagctcttgagagcattctgctcttctttagatggctgtaaatctattggccatctgggcttcacagcttgagttaaccttgcttttccgggaacaaaatgatgtcatgtcagctccgccccttgaacatgaccgtggccccaaatttgctattcccatgcattttgtttgtttcttcacttatcctgttctctgaagatgttttgtgaccaggtttgtgttttcttaaaataaaatgcagagacatgtttt

SEQ ID NO: 88 - DNA, 3502 bp, Artificial
  cDNA Sequence
aaatttcccgggccgggagcgctgggcctgccgggaaggcgctgggacggttacccagcgggccgccggcggtcgtgggcaagcttcgccatgcagagcactgacctaggcaacaaggagagcggcaagatatggcaccgcaagccgtccccggccacgcgggacggaattatagtgaacattattcacaacacttccgattaccatccaaaagttttgcgatttttgaatgtggcttttgatggcacaggcgactgcttaattgctggggaccaccaaggaaatatttatgtttttgacttacatggaaacaggttcaatcttgttcagcgaacagcacaagcttgcacagctctggcctttaatcttcgtaggaaatctgaattccttgtggcattagctgattattctattaaatgttttgatacagtcaccaaggagctagttagctggatgagaggacatgaatcatcagtattttcgatctctgtgcatgcatcagggaaatatgccatcacaacttcttctgatacagcacaattatgggacttggatacctttcagagaaaaagaaagctgaatattcgccagtctgtgggtatacagaaggttttctttctaccattaagtaataccatcctcagctgttttaaagataattccatttttgcctgggaatgtgacacacttttttgcaaatatcaattgccagctccacctgaaagctctagtatattatacaaagtgtttgctgtaaccagagatggccgaatcctggctgctggaggcaagtcaaatcatcttcatttgtggtgcttggaagctaggcagctctttagaattatccagatgcccactaaagttcgagccattcgccatctggaatttcttcctgatagttttgatgctggttctaatcaggttcttggagtactaagtcaagatggtattatgagatttatcaatatgcagacttgtaaacttctctttgagattgggagcctcgatgaaggaattagctcatcagcaattagcccacatggacggtacattgcatctattatggaaaatggaagtctaaacatatattcagttcaggctttaacacaagaaataaataagccacctccgcctttagtgaaagttattgaagatttgcccaagaataaactgagttccagtgatcttaagatgaaagtaacatcagggagagtacagcagccagcaaaatctagggaaagcaaaatgcaaactagaatattaaaacaagacctgactggtgattttgaaagtaaaaagaatgaattaccagatggattaaacaaaaagcgtttacaaatcttattaaaaggctatggtgaatatccaacaaaatacagaatgttcatttggcgctctctgctacaactgcctgaaaatcatactgcgtttagtaccctcatagataaggggactcatgtggcatttctcaaccttcagaagaaataccccatcaaaagtaggaagctactcagagtattacagagaaccttatctgcattagctcactggtctgtcatttttagtgacacaccatatcttccactcttggcatttccatttgtaaaattattccagaacaaccaactcatctgttttgaagttattgctactctcataatcaattggtgtcaacactggtttgaatattttcctaatcctcctatcaatattcttagcatgatagaaaatgttttggcatttcatgacaaggaactgctgcaacacttcatagatcatgatataacctcccagctatatgcatggcctcttcttgaaactgtgttctcagaagtgctgacaagagaggagtggctgaaattgttcgataatatcttttccaaccatccttccttccttctgatgactgttgtagcctacaacatatgttctagaacgcctctgctcagctgtaatcttaaagatgactttgagtttttttttcaccatcggaataacctggatataaatgttgtgattagacaagtttatcatctcatggagaccacgcctactgacattcatccagacagcatgcttaatgtttttgttgcactgacaaaagggcagtatccagtatttaatcaatatccaaagtttattgtggactatcaaacacaggaacgagaaagaataaggaatgatgaattggattacttaagagagaggcagacagttgaagatatgcaagctaaagtcgaccagcaaagagttgaagatgaagcttggtaccagaaacaggagctgcttcgtaaagctgaagaaacaagaagagaaatgctcttacaagaggaggagaaaatgatacaacaaagacagaggctagctgctgtgaaaagagagctgaaagtaaaggaaatgcacttacaagatgctgcaagaaggcgttttctgaagcttcagcaagatcaacaggaaatggaactaagaagactggatgatgaaattgggagaaaggtatatatgagagatcgagaaattgctgccacagccagagacctagaaatgagacagctggaactcgaatcacaaaagagactttatgagaagaatcttactgaaaatcaagaagctcttgcaaaagaaatgcgagcagatgcagatgcctatagacgaaaagtggatcttgaagaacacatgtttcataagctgatagaagcaggtgaaacccagagccagaaaactcagaaggtgattaaagaaaatttggcaaaggctgaacaagcatgcctaaataccgactggcagattcagtctttacataaacaaaaatgtgatgatctacaacgaaacaaatgttaccaggaagtagccaaactccttagggaaaacagaaggaaagaaatagagataataaatgcaatggtggaggaggaagccaagaagtggaaggaagctgaaggaaaagagttccgtttgagatcagcaaagaaagcttctgctctttcagatgcgtctagaaagtggtttttaaagcaagagataaatgcggctgtagaacatgctgaaaatccatgtcataaagaagaacccaggttccaaaatgaacaggactcaagctgtttgcctagaacctcacaattaaatgactcttctgaaatggatccctcaacacagatttctttaaatagaagagcagtagaatgggacaccacgggacagaatcttattaagaaagtgagaaatcttcgccagagactcactgcccgggctcgtcacagatgtcaaacccctcatcttttggctgcatagaatgcatgtcaccttgagacggtcgagagagagacctattttgcaatcagtgacattgatttttagattatttatttaaaattcctataaagatcagccctttgtacagaaaaatgtgtctataaaaattatgtgttatttaattctgatactttttggcttgtaaatggcttcttgaactttttacaataaaaatgttttagaaactgtt

SEQ ID NO: 89 - DNA, 3101 bp, Artificial
  cDNA Sequence
cgccatgcagagcactgacctaggcaacaaggagagcggcaagatatggcaccgcaagccgtccccggccacgcgggacggaattatagtgaacattattcacaacacttccgattaccatccaaaagttttgcgatttttgaatgtggcttttgatggcacaggcgactgcttaattgctggggaccaccaaggaaatatttatgtttttgacttacatggaaacagtcaccaaggagctagttagctggatgagaggacatgaatcatcagtattttcgatctctgtgcatgcatcagggaaatatgccatcacaacttcttctgatacagcacaattatgggacttggatacctttcagagaaaaagaaagctgaatattcgccagtctgtgggtatacagaaggttttctttctaccattaagtaataccatcctcagctgttttaaagataattccatttttgcctgggaatgtgacacacttttttgcaaatatcaattgccagctccacctgaaagctctagtatattatacaaagtgtttgctgtaaccagagatggccgaatcctggctgctggaggcaagtcaaatcatcttcatttgtggtgcttggaagctaggcagctctttagaattatccagatgcccactaaagttcgagccattcgccatctggaatttcttcctgatagttttgatgctggttctaatcaggttcttggagtactaagtcaagatggtattatgagatttatcaatatgcagacttgtaaacttctctttgagattgggagcctcgatgaaggaattagctcatcagcaattagcccacatggacggtacattgcatctattatggaaaatggaagtctaaacatatattcagttcaggctttaacacaagaaataaataagccacctccgcctttagtgaaagttattgaagatttgcccaagaataaactgagttccagtgatcttaagatgaaagtaacatcagggagagtacagcagccagcaaaatctagggaaagcaaaatgcaaactagaatattaaaacaagacctgactggtgattttgaaagtaaaaagaatgaattaccagatggattaaacaaaaagcgtttacaaatcttattaaaaggctatggtgaatatccaacaaaatacagaatgttcatttggcgctctctgctacaactgcctgaaaatcatactgcgtttagtaccctcatagataaggggactcatgtggcatttctcaaccttcagaagaaataccccatcaaaagtaggaagctactcagagtattacagagaaccttatctgcattagctcactggtctgtcatttttagtgacacaccatatcttccactcttggcatttccatttgtaaaattattccagaacaaccaactcatctgttttgaagttattgctactctcataatcaattggtgtcaacactggtttgaatattttcctaatcctcctatcaatattcttagcatgatagaaaatgttttggcatttcatgacaaggaactgctgcaacacttcatagatcatgatataacctcccagctatatgcatggcctcttcttgaaactgtgttctcagaagtgctgacaagagaggagtggctgaaattgttcgataatatcttttccaaccatccttccttccttctgatgactgttgtagcctacaacatatgttctagaacgcctctgctcagctgtaatcttaaagatgactttgagtttttttttcaccatcggaataacctggatataaatgttgtgattagacaagtttatcatctcatggagaccacgcctactgacattcatccagacagcatgcttaatgtttttgttgcactgacaaaagggcagtatccagtatttaatcaatatccaaagtttattgtggactatcaaacacaggaacgagaaagaataaggaatgatgaattggattacttaagagagagacagttgaagatatgcaagctaaagtcgaccagcaaagagttgaagatgaagcttggtaccagaaacaggagctgcttcgtaaagctgaagaaacaagaagagaaatgctcttacaagaggaggagaaaatgatacaacaaagacagaggctagctgctgtgaaaagagagctgaaagtaaaggaaatgcacttacaagatgctgcaagaaggcgttttctgaagcttcagcaagatcaacaggaaatggaactaagaagactggatgatgaaattgggagaaaggtatatatgagagatcgagaaattgctgccacagccagagacctagaaatgagacagctggaactcgaatcacaaaagagactttatgagaagaatcttactgaaaatcaagaagctcttgcaaaagaaatgcgagcagatgcagatgcctatagacgaaaagtggatcttgaagaacacatgtttcataagctgatagaagcaggtgaaacccagagccagaaaactcagaagtggaaggaagctgaaggaaaagagttccgtttgagatcagcaaagaaagcttctgctctttcagatgcgtctagaaagtggtttttaaagcaagagataaatgcggctgtagaacatgctgaaaatccatgtcataaagaagaacccaggttccaaaatgaacaggactcaagctgtttgcctagaacctcacaattaaatgactcttctgaaatggatccctcaacacagatttctttaaatagaagagcagtagaatgggacaccacgggacagaatcttattaagaaagtgagaaatcttcgccagagactcactgcccgggctcgtcacagatgtcaaacccctcatcttttggctgcatagaatgcatgtcaccttgagacggtcgagagagagacctattttgcaatcagtgacattgatttttagattatttatttaaaattcctataaagatcagccctttgtacagaaaaatgtgtctataaaaattatgtgttatttaattctgatactttttggcttgtaaatggcttcttgaactttttacaataaaaatgttttagaaactgtt

SEQ ID NO: 90 - DNA, 2397 bp, Artificial
  cDNA Sequence
gtgacacacttttttgcaaatatcaattgccagctccacctgaaagctctagtatattatacaaagtgtttgctgtaaccagagatggccgaatcctggctgctggaggcaagtcaaatcatcttcatttgtggtgcttggaagctaggcagctctttagaattatccagatgcccactaaagttcgagccattcgccatctggaatttcttcctgatagttttgatgctggttctaatcaggttcttggagtactaagtcaagatggtattatgagatttatcaatatgcagacttgtaaacttctctttgagattgggagcctcgatgaaggaattagctcatcagcaattagcccacatggacggtacattgcatctattatggaaaatggaagtctaaacatatattcagttcaggctttaacacaagaaataaataaggaagaagttcgtgctcaaaattaatcacacagcgagtaactagcagttctgggtgttccaattcttccaagattacatgagattgggtgcatttggagtggcgtttgccacctttttttattctaaaaaaaagtttgtgcctcctcctttttgttttatcttttaaaaaattatacaagtagtgtcttattgcagaaaaaaataagaatgtacagaatagcaaacagacaaatacaaatcactgaaagtctcaccattctcagaagattctgatttatatgttcccaatttcttttctatgtgtgtaaatatatatagtcactcctcattatttgtgcattctatacatgagaattcacctgctcactaaaatttatttgtaacttcaaaattaatagttgcagtgctttcatggtcattcagggacatgcacagagcagtgaaaatttgagtcaccagataccctttttcccagctgaagtcaaatgaggcaacactctgtcttcttatttcagctctcatagtgtaaacaagtatcctttttgtgatctacttaataccatttatttttttgcattttgaagctttttgttaagattctactgcttaaagtggtccccaagcgtagcgctgaagcgctatttattgtttctaaatacaggaaggctgtggcttaccttacagagaaaatacatgtgttaaataaactcattcaggaatgagttatagtgctaagctgtgagttcaatgataaggaatcagcaatgtgtattaaataagatgtctttaaacagaaacacacatatatgtattgattgattaatgaggctctcaggaacctgactctgtgtttcccctaggagcagtgtttcagtattcactaatcgagtgttcatggtgactttatagaaccactgcaaatagtgagaattaactatacatatatgtttctgtgtgtacgcacatgtgtgtgtatgcatacttgtctctaaacatatgggattatactctgctgctgttttgctctttatgtcattatgtatactatataagtatatttttacattataatatgtgctatatattaataaatttttttaaatgtattaatatctgctcttactgagagagttttcagcctgctgaatagtcagttttacagtactagctaaaccttcttttctttttttttttgagatggagtctcactctgtcttccaggctggagtgcagtggtgtgatcttggctcactgcagcctccgcctcccgagttcaaacaattctcctgcctcagcctccctagcagctgggattacaggcgcgtgccaccacgcccagctaatttttgtacttttagtagagatggtgtttcaccatgttggccaggctgctcttgaactcctgaccttggtgatccacccgccttggcctcccaaagtgctgggattacaggcatgagccaccgtgtccagccttgcaaaccttcttaatagaggcaggcagagagctgagaaaaactatggtaagaatgagtcattgagttcctttctgcttgttatctgttgagcaaattgatatcacatgaatagaaaagctagcttggaagtagaatgatcttttttattttttgacacattcccagtaccatcagtgtctttatggctgttccaggctacattaatgttcaattctatattctctataaatcataactcacctttgtctcatttttaccagttttattttcttgtcattggagaatttctggtattgtggtaatagagtaaatgaattcttaagtgttgaaggtttaacactacaaaggtatgtcaagtcaggttgtttctcaggttcttttttgggaggttatacttcatggtagaggataaggctcaaacgggaaattgtgacattttaataaattttaattttaataaaattttagtaaatttc

SEQ ID NO: 91 - DNA, 4262 bp, Artificial
  cDNA Sequence
ctccgtacgggggctttttctgtctgtctgtctggctggcaggctggctttccccctctttcccacggagcccgagccgggcgcccggtggggagtggggagtgggtggggggagccagcagagttccattttggaacgcccgtgccgcgtctccgcgttcccagcccgggtccccgcgttcacagccccagcgcaggtctggatgtaccgactgcttttggaataaaaagattcccaggatgtgagcaacacgggaccgatatgatgcttcctggtgtgtttagtggttggtgccattccaattttctgtgctgaaatcattctgaaaactcaaacagtagacttcagcacacaaggaaagccaaagccatttgagggggaataaagccaaaagcctttcaccttattcgttccaagaatctcaccgccccctccttatccccctccaaaaataagccattgcacacagacaggcagcatggctagcaaacgaaaatctacaactccatgcatggttcggacatcacaagtagtagaacaagatgtgcccgaggaagtagacagggccaaagagaaaggaatcggcacaccacagcctgacgtggccaaggacagttgggcagcagaacttgaaaactcttccaaagaaaacgaagtgatagaggtgaaatctatgggggaaagccagtccaaaaaactccaaggtggttatgagtgcaaatactgcccctactccacgcaaaacctgaacgagttcacggagcatgtcgacatgcagcatcccaacgtgattctcaaccccctctacgtgtgtgcagaatgtaacttcacaaccaaaaagtacgactccctatccgaccacaactccaagttccatcccggggaggccaacttcaagctgaagttaattaaacgcaataatcaaactgtcttggaacagtccatcgaaaccaccaaccatgtcgtgtccatcaccaccagtggccctggaactggtgacagtgattctgggatctcggtgagtaaaacccccatcatgaagcctggaaaaccaaaagcggatgccaagaaggtgcccaagaagcccgaggagatcacccccgagaaccacgtggaagggaccgcccgcctggtgacagacacagctgagatcctctcgagactcggcggggtggagctcctccaagacacattaggacacgtcatgccttctgtacagctgccaccaaatatcaaccttgtgcccaaggtccctgtcccactaaatactaccaaatacaactctgccctggatacaaatgccacgatgatcaactctttcaacaagtttccttacccgacccaggctgagttgtcctggctgacagctgcctccaaacacccagaggagcacatcagaatctggtttgccacccagcgcttaaagcatggcatcagctggtccccagaagaggtggaggaggcccggaagaagatgttcaacggcaccatccagtcagtacccccgaccatcactgtgctgcccgcccagttggcccccacaaaggtgacgcagcccatcctccagacggctctaccgtgccagatcctcggccagactagcctggtgctgactcaggtgaccagcgggtcaacaaccgtctcttgctcccccatcacacttgccgtggcaggagtcaccaaccatggccagaagagacccttggtgactccccaagctgcccccgaacccaagcgtccacacatcgctcaggtgccagagcccccacccaaggtggccaaccccccgctcacaccagccagtgaccgcaagaagacaaaggagcagatagcacatctcaaggccagctttctccagagccagttccctgacgatgccgaggtttaccggctcatcgaggtgactggccttgccaggagcgagatcaagaagtggttcagtgaccaccgatatcggtgtcaaaggggcatcgtccacatcaccagcgaatcccttgccaaagaccagttggccatcgcggcctcccgacacggtcgcacgtatcatgcgtacccagactttgccccccagaagttcaaagagaaaacacagggtcaggttaaaatcttggaagacagctttttgaaaagttcttttcctacccaagcagaactggatcggctaagggtggagaccaagctgagcaggagagagatcgactcctggttctcggagaggcggaagcttcgagacagcatggaacaagctgtcttggattccatggggtctggcaaaaaaggccaagatgtgggagcccccaatggtgctctgtctcgactcgaccagctctccggtgcccagttaacaagttctctgcccagcccttcgccagcaattgcaaaaagtcaagaacaggttcatctcctgaggagcacgtttgcaagaacccagtggcctactccccaggagtacgaccagttagcggccaagactggcctggtccgaactgagattgtgcgttggttcaaggagaacagatgcttgctgaaaacgggaaccgtgaagtggatggagcagtaccagcaccagcccatggcagatgatcacggctacgatgccgtagcaaggaaagcaacaaaacccatggccgagagcccaaagaacgggggtgatgtggttccacaatattacaaggaccccaaaaagctctgcgaagaggacttggagaagttggtgaccagggtaaaagtaggcagcgagccagcaaaagactgtttgccagcaaagccctcagaggccacctcagaccggtcagagggcagcagccgggacggccagggtagcgacgagaacgaggagtcgagcgttgtggattacgtggaggtgacggtcggggaggaggatgcgatctcagatagatcagatagctggagtcaggctgcggcagaaggtgtgtcggaactggctgaatcagactccgactgcgtccctgcagaggctggccaggcctagacagggaagtctgttagaactgctgtgctgatcaacgggacgctccgtctttgaagaaagaagagatggtctctccccagccatgggccacccttgccagtgactccaagtggaactacttagctcgcgtgtgcctggagggtgcgggaagtccagcgactctcagacgcacctcccagaggaccggtgggaattgttcatagtgccaaagtcctactactgcgttttcaatgggtccttgtacatagtttgctcctctgccctagccctcacctcttgctatactggaaccgatttgtacaatgtgggaattttgttacctttttaatcaagggcaacttccttttccagcactaccattgtaaggtttttttcaggagggagggctaaccaccttgcttttctcttttctctttttcttttttttatttttgttttattaatttggggaaaggggtgttagcattagtgccatgatatctactggattttaagtagggagactttatttttaaaggtaggttgaaatttgggagatttctcggcaggaagggctgaaatccaggcccctgtctcaacttggagagaggtgacagacggcagatcttccaaatcaaattcctttccagttcttcccctggctgcctttttgggggtccctgccttagccccacacaaggctttctgaactgccaagaggggatctggcttctcaactgctcggcctcttgggccaggctgtgcccagccagccctgggagaactgggtagcaggtggctgacttctttaagcacctttctaaataccagcagaagaggctcccgcctctgttagcatgatcagtactattgtgacattaaaacaacaacaataagatcttcctatctggagggtacagaggtgaatggctttggttttcatttctcttcttcactgccttttctcggtgtggtatttgacaagattttagctcaaagcctcaccatgaattgattttttttgtttgtgtgtgtgtttgttttgggacaattttagatacctgagtgcactttttcagttagtcctaacttttaaaagaaggaaaaccaagagacatatctggtgtacgtgttgcagtatgaactctggttgcaatccctccccgtcccacactgccccccatttgagtacaccgcacaagtcaaacgctaggaagtttgaataaaaccaatttttctaacttgttgctcatttgttgtaactcaataaagcaaagactaaacattttt

SEQ ID NO: 92 - DNA, 837 bp, Artificial
  cDNA Sequence
ctggagaagattggggaaggcacctatgggacagtgttcaaggccaaaaactgggagactcatgagattgtggctctgaaatgggtgaggctggatgacaatgatgacggtgtgccgagttctgccctccgggagatctgcctactcaaggagctgaagcacaagaacatcgtcaggcttcatgacctcctgcacagcgacaagaagctgactttggttttcaaattctgtcaccagcacctgaaaaagtattttgacagttgcaatggtgatctcgatcctgagattgtaaagtcatttctcttccagctgctaaaaggcctcggattctgtcacagccgcaatgtgctacgcagggacctgaagccccagaacctgctaataaacaggaatggggagctgaaattggctgactttggcctgtctcgagcctttgggtccccatctgctgttactgagggagtggtcacactgtggtaccacccaccagatgtcttctttggggccaagctgtactccacgtccattgacttgtggtcagctggctgcatctttgcagagctggccaatgctggatggcctctttttccaggcaatgacgtcgatgaccagttgaagaggatcttctggctgctagggatgctcaccaaggagcagtggccctccatgaccaagctgccagactataagctgtacccattgtacccggccacaacatccctggtgaacatcgtgcccaaactcagtgccacagggagggatctgctgcagaatcttctgaagtgtaacccctgccaatgtatctcagcagaagaggccctgcagtacccctacttt

SEQ ID NO: 93 - DNA, 4913 bp, Artificial
  cDNA Sequence
acaggtcagagttgactccctgaaaagtgcagccggtttgaaatgcaagatggcggcggcgtggcgctgagaggcgcggcggcccctgcaggagaagacagactgctgctttggacctgttggtaatgatggcctgagctaaacatctaactagaagggatacccttccatttcaaagaacagaatgctaaggaagctgtggcaagtgattggagttgtgcttcaaaaatttcagaaattcagcagtattttatctgccaacaataagctctttacttgattgcaccatgagaaagctgctaatgagacttgttgagcacaaaaatggacttgaagaaccaaaagccattgttttcaaatgaagaacactgaacagttttaagcctcgatgctttttaatcaccactgagcttttcctcataacatcagaatggcaagcaggcgaaaatcaacaacaccttgcatggtccttgccagtgaacaagatccagaccttgagttgatatcagatttggatgaaggtcctcctgtgcttacacctgtagaaaacaccagagcagagagtatctcaagtgatgaagaggttcatgaatctgtggattcagacaatcagcaaaataaaaaagttgaaggtggatatgaatgtaaatattgtacttttcaaactccagatctaaatatgtttacttttcatgtggattcggaacatcccaatgtagtgctaaattcatcctatgtttgtgtcgaatgcaattttcttaccaaaaggtatgatgcactttctgagcataatctgaaatatcacccaggagaagagaattttaagttgactatggtgaaacgtaataaccagacaatctttgaacaaacaataaatgatctgacttttgatggtagttttgttaaagaggagaatgcagagcaagcagaatctacagaagtttcttcttcgggaatatctatcagtaaaactcctatcatgaaaatgatgaaaaataaagtggaaaataaacggattgcagttcatcataactcagttgaggacgttcctgaagagaaagagaatgaaatcaaaccagaccgtgaagaaattgtagaaaatccaagttcttcagcttctgaatctaatacaagtacttccattgtaaacagaatacatccaagtactgccagcacggtagtgacaccagcagcagttcttcctggattggcacaggtgataactgctgtatctgctcagcagaattctaatttgattcccaaagtcttaatccctgttaatagcattcccacctacaatgctgcattggataacaatccccttttacttaacacctacaacaagttcccttacccaacaatgtcagaaattacagttctttctgctcaagcaaaatatacagaggaacagatcaagatatggttttcagcccaacgtttaaaacatggtgttagttggactcccgaggaagtagaggaggcaagaaggaaacaattcaatggaacagtgcatactgtacctcagaccataactgttattcctacacacatttccacagggagtaatggtttaccatctattttacagacatgccaaatagttggtcagcctggtctggtccttactcaagtggctggaacaaacaccttgccagttacagcacctatagccttgacagtggcaggcgttccaagtcaaaataatatacagaaaagtcaggtacctgctgctcagcctactgcagaaacaaagccagcaacagcagcagttccaacttctcaaagtgtcaaacatgaaactgcattggtaaaccctgattcatttggcattcgggcaaaaaagacaaaagagcaactggcagaattaaaagttagctaccttaaaaatcagtttccccatgattcagaaattatcagacttatgaaaataacaggcctgacgaaaggagagattaaaaaatggtttagtgacacaaggtacaaccagagaaattcaaagagtaatcagtgcttacatctcaacaatgattcctctaccaccattattatagactccagtgatgaaaccacggaatccccaactgttggtactgcacagcctaagcaatcctggaatccttttcctgactttactccccaaaagtttaaagagaaaactgcagagcagcttcgtgtccttcaggcaagttttctcaacagctctgtacttacagatgaagaattaaataggttaagggcacaaaccaaacttaccagaagagaaatcgatgcttggtttacagagaagaagaaatcaaaagctttaaaggaagagaaaatggaaatagatgaaagtaatgcaggtagttccaaagaagaagctggagaaacttctcctgcagatgaatctggtgcacctaagtcagggagtacaggcaagatatgtaaaaaaacacctgagcagctgcacatgcttaagagtgcatttgtccggacacagtggccatcaccagaagagtatgacaagttggccaaagaaagcgggcttgctagaacagacatagttagttggtttggggacacccgttatgcttggaagaatggaaacttgaaatggtactactactatcagagcgccaattcaagtagtatgaatggtctgtcttcccttaggaaaagagggagagggagacccaaaggacggggaagaggaagaccgcgtgggcggcctagaggaagcaaaagaattaacaactgggacaggggaccatcactcataaaatttaaaactggaactgcaatacttaaggattattacctgaagcacaagtttcttaatgagcaagaccttgatgaacttgttaacaaatcacatatgggctatgagcaggtcagagagtggtttgcagaaagacagagaagatcagaattaggtatagaattatttgaggaaaatgaggaggaagatgaagttattgatgaccaggaagaggatgaagaagaaacagatgatagtgacacttgggaacctccacgacatgtgaaacggaagctgtctaaatcagatgactgaaatctgcctaaaacgttgaaggagaatcaattcttcaactcaagatgtctgatttactgtgaatttgcccaatctttgatgacattgaaaacgttttggggcatacacactcaaaaagcaggatccaatacccaaaagaaatggaacttaatgttgtgccaaagttaaactactgcagttggtggaagttctgcaatgtaaatagaacactaattaaaaaacaacttgtaaaaatgcaatttaaattttaatacagtacatttttcttctaatatgatggagacattctgaatcttagactttctgagggggtttaatgaccactagagcttgtcctcatattcagtccagtttaatactgtatgtctagtaagatgggctatatattgcctctattctttgagatgtgattaagcttagaactttgaccaaaaattttacagtaaaaattgttagaaatgggtaaaaaaaaaaaaaaaaaaaaaaccctgatttattactatgtcttatttatcagaccctgcactaagattaaaagttgtgcatgggcttatacaatttcaaatgtaaaaacagcctatttatatatgttgaaacaataagattttatggtttcactggcccttaataattggatccttcattaaacacatccatgaataccactgtttctactgttacttgttccattagaagctgatttgctttttattaaactgcaggaaattaattctgaagaaggaaaagaaactgacatggtaatttggatagggtgaagctttgaaataaatactgcaccaaaaatgtgaaaaagaatcacgtagtaaatgtatacttagtgttttcttacaatcgtggaaatcagaaatgtttatacaggtgtcagatcagaatttttaagagttatctttcagtgaaattttataacagtttcagtgaatagagaaaaaattctgaactgatcataatgagttaaaagttagcttttcacttatgaatcatgggagtgttaactgttaactcttgccgtatcaggagactgaaagttcatactaatttacaaactttgtaaagactggtgctgttcattcatattgggaagaaccctttcttttgtgaccataggaccatttttcaaaatgcgctttcttcgtagaagaaatgttcagtttaattagctttggattttaacatgtttttctgaatgaccagatgtaggcttagccagtttattttctctaatttaatggataataaatattaagctcttggttaaatgtttttcagccattgaaaatgttatgaaaaagccttgaatatgcatgctgctttcatttttataaactttttattttttaactatagctttattagtaattccaaaatgctgcaatgtagctgatttcctcactcagacagctggctttgtgggtggcttttttcatactactgttaacttttttaaaaaagaagcaatgtaaagaccgtaatgcactaagctttttttttttcttttacacgtttaaaaacttcttaaagcactctgtaatataatgattaaattgctcccttttataaacattgctaatgtggtctgagttttgtttgacaataattttaatgttctcaaaatttgaaatgtcaagtattagaaatgaagcctttgaatatagttgtttcccttgcaatatgttaactctgtgtagctgtatataactattaatttccctcatctcttttataggcctgataaaactcttctctgacgtttgctagcttttaaatatatttatttgacagagcaaaagaaccctcttctggttgattgtgaccttgaatacaaaataaaagtagtgattag

SEQ ID NO: 94 - DNA, 1286 bp, Artificial
  cDNA Sequence
gcttcctcgttgcccccgccgcgggcgcgagatggattccgggtgctggttgttcggcggcgagttcgaggactcggtgttcgaggagaggccggagcggcggtcaggaccgcccgcgtcctactgcgccaagctctgcgagccgcagtggttttatgaagaaacagaaagcagtgatgatgttgaagtgctgactctcaagaaattcaaaggagacctggcctacagacgacaagagtatcagaaagcactgcaggagtattccagtatctctgaaaaattgtcatcaaccaattttgccatgaaaagggatgtccaggaaggtcaggctcggtgtctggctcacctgggtaggcatatggaggcgctggagattgctgcaaacttggaaaataaagcaaccaacacagaccatttaaccacggtactctacctccagcttgctatttgttcaagtttgcagaacttggagaaaacaattttctgcctgcagaaactgatttctttgcatccttttaatccttggaactggggcaaattggcagaggcttacctgaatctggggccagctctttcagcagcacttgcgtcatctcagaaacagcacagtttcacctcaagtgacaaaactatcaaatccttctttccacactcaggaaaagactgtcttttgtgttttcctgaaaccttgcctgagagctctttattttctgtggaagcgaatagcagtaatagccagaaaaatgagaaagctctgacaaatatccaaaactgtatggcagaaaagagagaaacagtgttgatagagactcagctgaaagcatgtgcctcttttatacgaaccaggcttctgcttcagtttacccaacctcagcaaacatcgtttgctttggagaggaacttaaggactcagcaggaaattgaagataaaatgaaagggttcagcttcaaagaagacactttgctgttgatagctgaggttatgggagaagatatcccagaaaaaataaaagatgaagttcacccagaggtgaagtgtgttggctccgtagccctgactgccttggtgactgtatcctcagaagaatttgaagacaagtggttcagaaagatcaaagaccatttctgtccatttgaaaatcagttccatacagagatacaaatcttggcttagtgggttataaaaaacaaaaccacaaatatcttgtactgtattaattgtccttgtttacttcagacaggatccattgctaatcatggagtataaatgattatttatgttttat

SEQ ID NO: 95 - DNA, 2890 bp, Artificial
  cDNA Sequence
gatgacttggagaacagtcacttcctctttctgggctacagttttctcatcagtaactgaagagcttgcagtaccttcaacattccttcaggtgaggacttctctttgatcactgctatggtttgaatgtgtctcctaaagttcatgtgttggaagcttgatccccagtgcaaaagtgttgggaggtggggcctaatgagaagtaattaggccatgagtattctgccctcatgtattcatgagattaatgtcattatcatgggagcgggtttgttaaaatgagttcggccccttccttctctctctttcttctgccatacagtatgggatgcacagtgcagaaggtcttaccagatactggcaccatgcttttggacttctcagcccccagaaccatgagccaaataaatttctgttcattataaatcacccagtctgtggcatcctgttagagcagcataaatggactaagataatccctataaagagtggcaacagaacagttcccagctcactggcagaatcctatgatcaactagtaatgtctgccagggaaggaggatgagtggcactaacatgtacggtgtgtttgctcactgttctacaggattcaactagaatctctgggtctgtgtgaagaccaagagctgggaacagaagcagggctctagagggaaaagtttctttcggattccttttttttgttttgttttaaagagctgctctgtgagaagacaaggagaaaatggtccctacaggatactcacctctgtctcagggagacactcaagcatttattcaaccaagaaagagaattagttccaggtgaaaggagaaccccagaatacccacctacttttaaaattctcccctatgcatattcaggaaccaatcagaggatctgtaatgcgctgtgagtagaaagggaaggggaatgggaaagaaaaaagtgaagcttggaatggtggaaagtacatgggctctgccatttaccagctaagtgatcttgggcaagtaacttgacctttctgagcctcggtttcctctttggtgaaatgaggactaataatccatttctccctcagtacagacagccagcatgcagtgagcactcagcgatggccaagtatgggagaagccatgctggaatgaacatgtgggaccattttgtgcagtttctcagcgccaacactgactggtcccctgggctcgtgggccgccggcagcctcggctcgttctccagacagtgttccaagaagccacttccagcgaggaagcgttggcctgagaactggaacctctgcggtctctgcaaacacgacaatgacaaacacttgagagggcatgggagaaaggagctccttcatagggcagggaggggtgggcacttgggtgtgaccaaggagaggaggcgcgcctggtcaacagctctccctggcccgtgtccagctccctcctcacacagagaggggggcgcatctcagggatggcatctttcccccccacagggaaattcttatctttgaaacagcatgggaatcgaggcacccaggaggggagcagaggcaggcaggcctccttcaggcccatcctccagctgggctggtggtgccagggaggctccctgcttggtaacaaaggcctgagggagagttgcgaaacccagcaggaaagccggctcaccttcgcctccccctgcggctgggaggagaggaaatatcccatggctgactgtgccaaggaggtgtctgagccagccctcccggcccgagggcagggcaggtggccctgagagataagccaatcccgcagctgcagatgaggagttctgagaagcattgctcaggacagcggtaaatcacttcttggaggtgccctgcacgccggtcctgggagcaggcggcctcccgggggtgcgggagccccactcctccgtggtgtgttccatttgcttcccacatctggaggagctgacgtgccagcctcccccagcaccacccagggacgggaggcatgagccggtcaaggcacctgggcaaaatccggaagcgtctggaagatgtcaagagccagtgggtccggccagccagggctgactttagtgacaacgagagtgcccggctggccacggacgccctcttggatgggggttctgaagcctactggcgggtgctcagccaggaaggcgaggtggacttcttgtcctcggtggaggcccagtacatccaggcccaggccagggagcccccgtgtcccccagacaccctgggaggggcggaagcaggccctaagggactggactccagctccctacagtccggcacctacttccctgtggcctcagagggcagcgagccggccctactgcacagctgggcctcagctgagaagccctacctgaaggaaaaatccagcgccactgtgtacttccagaccgtcaagcacaacaacatcagagacctcgtccgccgctgcatcacccggactagccagaacatttccatccggagtgtggaaggagagatatactgtgccaagtcaggcaggaaattcgctggccaaatccgggagaagttcatcatctcggactggagatttgtcctgtctggatcttacagcttcacctggctctgcggacacgtgcaccggaacatcctctccaagttcacaggccaggcggtggagctgtttgacgaggagttccgccacctctacgcctcctccaagcctgtgatgggcctgaagtccccgcggctggtcgcccccgtcccgcccggagcagccccggccaatggccgccttagcagcagcagtggctccgccagtgaccgcacgtcctccaaccccttcagcggccgctcggcaggcagccaccccggtacccgaagt

SEQ ID NO: 96 - DNA, 2898 bp, Artificial
  cDNA Sequence
ctgcggctgggaggagaggaaatatcccatggctgactgtgccaaggaggtgtctgagccagccctcccggcccgagggcagggcaggtggccctgagagataagccaatcccgcagctgcagatgaggagttctgagaagcattgctcaggacagcggtaaatcacttcttggaggtgccctgcacgccggtcctgggagcaggcggcctcccgggggtgcgggagccccactcctccgtggtgtgttccatttgcttcccacatctggaggagctgacgtgccagcctcccccagcaccacccagggacgggaggcatgagccggtcaaggcacctgggcaaaatccggaagcgtctggaagatgtcaagagccagtgggtccggccagccagggctgactttagtgacaacgagagtgcccggctggccacggacgccctcttggatgggggttctgaagcctactggcgggtgctcagccaggaaggcgaggtggacttcttgtcctcggtggaggcccagtacatccaggcccaggccagggagcccccgtgtcccccagacaccctgggaggggcggaagcaggccctaagggactggactccagctccctacagtccggcacctacttccctgtggcctcagagggcagcgagccggccctactgcacagctgggcctcagctgagaagccctacctgaaggaaaaatccagcgccactgtgtacttccagaccgtcaagcacaacaacatcagagacctcgtccgccgctgcatcacccggactagccaggtcctggtcatcctgatggatgtgttcacggatgtggagatcttctgtgacattctagaggcagccaacaagcgtggggtgttcgtttgtgtgctcctggaccagggaggtgtgaagctcttccaggagatgtgtgacaaagtccagatctctgacagtcacctcaagaacatttccatccggagtgtggaaggagagatatactgtgccaagtcaggcaggaaattcgctggccaaatccgggagaagttcatcatctcggactggagatttgtcctgtctggatcttacagcttcacctggctctgcggacacgtgcaccggaacatcctctccaagttcacaggccaggcggtggagctgtttgacgaggagttccgccacctctacgcctcctccaagcctgtgatgggcctgaagtccccgcggctggtcgcccccgtcccgcccggagcagccccggccaatggccgccttagcagcagcagtggctccgccagtgaccgcacgtcctccaaccccttcagcggccgctcggcaggcagccaccccggtacccgaagtgtgtccgcgtcttcagggccctgtagccccgcggccccacacccgcctccaccgccccggttccagccccaccaaggcccttggggagccccgagtccccaggcccacctctccccgcggccccacgacggcccgcccgccgctgtctacagcaacctgggggcctacaggcccacgcggctgcagctggagcagctgggcctggtgccgaggctgactccaacctggaggcccttcctgcaggcctcccctcacttctgaaggtcccatcccctgctgccctccgcaggcccagggctgggcactccctgagacccaaagacccacctcaacgacgagtggcgttgagccacttccctttgaaaagacactcaaaatcactgccatggttcaatgttcccaggccccaggccatccacttgccggcccccaccagttcttgggttccccgctctagtttgacctgtgcagcacattccagaaggttccagggaggttgtggggcagctagaggacaaaatcatgaaaacagagtccctgtcttccagagatcatccggggctttaatattaatggcccccaaaactccgtaagaagcaggaaatgcagcccaagttttacaaatgggtaaacagaggcactgagagatagatggtagtttggtacttctggttcccagtgcccaggaatggtccactcccaagaaattcaggaaagaaagactgaggagaaggtgtgggaacattctggatgtttcgggagagttggggaaactcctcctcttaggaaaggctaatactagggtatccttgggcccaatgaattaggggtgaggccccagaacccgttatctatgagttgtatgggggagccatctgaagctgtagccaccagggatgcagctagctgaggagtttggggtgttgggttggacaaggcaggttagtagactcagattcttgcttcaaagagccttgggctggcctggaggtccctggagtctagactggacctaggagcttgagttgtcaggggccaggactggccccactgcagtgcccaggccagtcttgagcagcagggagggctcagctgtccccagatccaggtgcctctgaccagcctggtcacctcctgaggaataaatgctgaacctcacaagccccatcattcatttcttctcaattcacagtgcccctctttgtttctggggtggaactaggtcctgagggcacagcctagctgagtgcaaagaaatataggatgcttagaaagcatacaggaggggccaggcgtggtggctcatgcctgtaatcccagaactttgggatgccaaggtggttggattacctgagatcaggtggattacctggtctcgagaccagcctgaccaatatggtgaaaccccgtctctactaaaaatacaaaaattaggctgagacaggagaattgcttgaacccaggaagcagaggttgcaatgagctgagattgcatcactgcactccagcatgggcaacaaagcaagactccgtcac

SEQ ID NO: 97 - DNA, 4933 bp, Artificial
  cDNA Sequence
tgcgagcaacagatccggacgccgcgagctgacccgctctgctgttgggcgatttttttttaattgcagaaaaatttattaaattggaaaatcttgcgtttttcaatggcgctggccccgggtcagcgggcgattttctctgcatcaagatgggctttgccgtttccgtagtgggcaccagtggtggcctgattgtcagtcttctcccggcatttttaaggccaggagccgagcgctgcttgtaggcgaataccctacagagcggtttggctttttaaattactgttattattttgggcagagaacagtcggtctggtgcaccccgtcctcgctgcagaagaggctgcgagtccgaggtgggtctctcggaaggtgaaattccttctggggtgagcgagccccggccccgcgcgcagtccagcggccccgcgtgtgtgccctcgccctgccggagccgggaaaatggaggctgtgattgagaaggaatgcagcgcgctcggaggcctcttccagaccatcatcagcgacatgaaggggagctatccagtttgggaagatttcataaacaaagcaggaaagctgcagtcccagcttcggacaacagtagtagcagcagctgccttcttggacgcctttcagaaagtggctgacatggccaccaacacacgtggtgggaccagggagattggatctgctctcaccaggatgtgcatgaggcacagaagcattgaagccaagctgaggcagttttcgagcgctttaattgattgtctgataaacccacttcaagaacagatggaagaatggaagaaagtggccaaccagctggataaagaccacgcaaaagaatataagaaagcccgccaagagataaaaaagaagtcctcggatacgctgaaactgcagaagaaagcaaaaaaagggagaggtgatatccagcctcagttggacagtgctctccaagatgtcaatgataagtatctcttattggaagaaacagaaaagcaggctgtccggaaggctttgattgaagaacgtggccgattctgtaccttcatctctatgctgcggccagtgattgaagaagaaatctcaatgctaggggaaataacccaccttcagaccatctcggaagatctaaaaagcctgaccatggaccctcacaaactgccctcctcaagtgaacaggtgattctggacttgaaaggttctgattacagctggtcgtatcagacgccaccctcttcccccagcaccaccatgtccagaaagtccagtgtctgcagcagcctgaacagtgtcaacagcagtgactcccggtccagcggctcccactcgcattcccccagctcacattaccgctaccgcagctccaacctggcccagcaggctcctgtgaggctgtccagcgtgtcctcccatgactcaggattcatatcccaggatgccttccagtccaagtcaccatcccccatgccgccagaggcccccaaccagttgtctaacgggttttctcactatagtttatcaagtgagtcccacgtggggcccacgggtgcaggccttttccctcattgcctgcctgcctcccgcctgctccctcgggtcacctctgtccaccttccagactacgctcattattacaccattgggcccggcatgttcccgtcatctcagatccctagctggaaggactgggctaagcctgggccctatgaccagcctctggtgaacaccctgcagcgccgcaaagagaagcgagaaccggaccccaacgggggaggacccactaccgccagcggcccacctgcagcagctgaggaggctcagagaccacggagcatgactgtatcggctgccaccaggcctggtgaggagatggaggcttgtgaggagctggccctggccctgtctcggggcctgcagctggacacccagaggagcagccgggactcgcttcagtgctccagcggctacagcacccagacaaccaccccctgctgctctgaggacaccatcccttcccaagtttcagattatgattatttctctgtaagtggtgaccaggaggcagatcagcaggagttcgacaagtcctccaccattccaagaaacagcgacatcagccagtcctaccgacggatgttccaagccaagcgtccagcctcaactgctggcctccccaccaccctgggacctgctatggtcactccaggggttgcaactatccgacggaccccttccaccaagccttctgtccgccggggaaccattggagctggtcccatccccatcaagacacccgtgatccctgtcaagaccccaaccgtcccagacctcccaggggtgttgccagcccctccagatgggccagaagagcggggggagcacagccctgagtcgccatctgtgggtgagggcccccaaggtgtcaccagcatgccctcctcaatgtggagcggccaagcttccgttaaccctccacttccaggcccgaagcccagtatccctgaggagcacagacaggcaattccagaaagtgaagctgaagaccaggaacgggaacccccaagtgccactgtctccccaggccagattccagagagtgaccctgcagacctgagcccaagggatactccacaaggagaagacatgctgaacgccatccgaaggggcgtgaaactgaagaagaccacgacaaacgatcgctcagcccctcgcttttcttaggttcacaagaaatgcgccggtggggaatgaactgtttcattaataaaacctaatttgtcttgatccattccactctataataaaacaaaagattttgtaggcaactcggaatatagctcttttgaaagtactcgacacctttagataagaattaaaaccaacctatgtaactgacataatcttgatcttttaatttgtaaatattgacaattttctttctgcacattttaatcttagtttcccttttgatttttctgaaggtgccaaattccatttaacttttttacaagtctttgtaaaattttaaatgcataaagggggttggggcaggggaaccacgaagtagttaattttagaaaaggatttactatacttcactcttctttttttttccccacaagcttttgtagatgcattgtagtagtctagcttagaagcaaatgcaagttattttaatgtacaaactaaatgggtaagaggtaaaatcttcatttaaatatactatgttctggatgaaaagagcaggagtaacaattgatgagcaatattcagagtgaagtaaatctggaaatggtagactgtgttgggattggggggagggccatgggaggggtacatcgtcaacatagccgatcctgttacatttaagagtagcctcgtaggttgaatttcttctggtagcttcatggtaaatgcatccgaataagccatactggattgcagtgtttgtttctgtagggtgtttaaggacttgacttcctttctcccatgattcctctggactgcacacagcacccacaaccagccccatgcatgctgctgcctctgggcagtcgtagaatctcccacttcagtttctcgttgattgtactcacctttatggaatccaaatacatccaaaagggtaaggcagttttaaaaatgtgaaaacatttaaaaatgataatagcagggaattcttagattatagtaaatgccttttacttaactgtgcccagcaggctgggtgcgttaaaaagcccaagtattttgaaaaaactcgaacagatttgacaagggtagccagcttggagtctagcaacttgccaatgtgtttaccaatctgggggcttgtttttcttttcttctttcaaataaatggcagttaactggctttacagtaaacattgaagagaggaggatttgtttattgtcactgggaatctgaccactatactgtcctttttttgtattctgggtaaatgttttttggaaaagatttgtcttttctaagtggaagttaaatttgttatactgcccatcccctaaagccaacagagatttgtagatttaaagggatcacatttgaagacaatagtgtttaagaaagcaagcaagtcccttagcagtcaggtcataacagggcacatttctgaccgaaccctctcaaggcagaggaggagtttggtgggtttcatacaccctgcagattcctgttggctctaaccctcaattacctaatcttatgctttaacacataactgcattggatgtgagagtaacgtaccgtatggtcattgttctatatattaacattgaacactgctgcgattgctcaaggacattttatgttacggctttaaagcaaaggcatgattattagaaactatttaagcttttttctttgaaaaacaagctccttttacagaatataaacaacagtagtgcctgtggtttagcccaccaatcttgatgactaaaagtagctgatgcattgtgcatatgatgcttgagatggtttttgcaaaagcagaaatcgctgcaaggtaatcacaatagataaaagtggtattttaaacctttgaaataaatggatgtaactgtaccttggtacagcttttcacttgtttagtttttaaacgttagtataatctgaataaataaaatgttgccaaattcaatgtagaaagaatgtgacaacacaccttgggtagttctgcttgtgtttttgcatattgtaaaagcagtgtcacagctaaaaagaaagaaatcgtttctaacagtaaattattgtgctttagttgctagtttgtactgagagttgacctctccctgtgcagttttttgttctaaacttgtataaataacaattgtgtaatgtgtctccctcctacattgtaacaattgcttcagcctacgttataaataaagaaccactagatt

SEQ ID NO: 98 - DNA, 3268 bp, Artificial
  cDNA Sequence
tttctgccttccgggtttgagagtttaggaccctgggttggtggggtcagagggagagggggtaccttcctcccggaccgctgggggtgcagggcgccttgggtgtagcacccagaacaggtttctgatctctaacttggctgtgatcattgtgatggagcaagaaaaaaaactgttggtctcagattctaacagctttatggagagggagagtttgaaaagccctttcacaggagatacaagtatgaataatttggaaactgttcaccacaataattctaaggcagataaacttaaagagaaaccttcagaatggtctaaaagacatagaccacaacattataagcatgaggatgcaaaagaaatgccactgacatgggttcaagatgagatttggtgtcatgattcctatgagagtgatggcaagtcagagaattggggaaattttatagctaaagaggaggaaaaacccaatcaccaggaatgggactcaggagaacataccaatgcctgtgtccagcagaattcatcctttgtagacagaccctataaatgttccgaatgttggaaaagcttcagtaatagttctcatttgcgtactcaccagaggacccactcaggagaaaagccttataaatgctctgagtgtgcaaaatgtttttgtaacagttctcacctgattcagcatctaagaatgcacacaggagagaagccctaccagtgtggtgaatgtgggaaaagcttcagcaatacctcccatcttattatccatgagagaactcacacgggagagaaaccctacaaatgtcccgagtgtgggaagagattcagcagcagctctcaccttattcagcatcacagatcacatacaggtgaaaaaccatatgaatgttctgtctgcggaaaaggcttcagtcacagctatgtcctaatagaacatcagaggactcacactggagaaaaaccttataagtgccctgattgtgggaagagttttagtcagagttccagcctcattcgccaccagcggacacacacaggtgagaagccctacaaatgtcttgagtgtgaaaaaagctttggttgtaattctactctaataaaacatcagagaatacatacaggagaaaagccttatcaatgtccagaatgtgggaagaattttagtcgtagttcaaaccttattacacaccagaaaatgcacacaggagagaaatcctatgaaagttctgaatatgaggaaagtttgggtcagaactgcaatgtgatagaagaatgcagaatccagttaggagagaaaccatatagatgttgtgaatgtgggaagagttttggccttagctcccatctcattagacatcagagaacacatacaggagaaaaaccttacagatgttctgagtgctggaaaactttcagtcagagttccaccctggtgattcaccaaaggacacatacaggagagaaaccttataaatgtcctgattgtggtgaaagcttcagtcagagctttaaccttatcaggcaccggaggacccacataggggaaaaaccttacaaatgtaccagctgtgagaaatgcttcagcagaagtgcctacctcagtcagcatcggaaaattcacgtagaaaagccttttgagtctcccgacgttggggattttcctcatgaatggacttggaaaaactgttcaggggaaatgcccttcatctcttcattttccgtctcaaattcatcttcctgagtcccaaagcctggttggtgatggttttttcttccttgttggaccatgacaatttaggtattctgtgattgttgtgctataaagtttctttgatgtgtttgtcaaaacatttggaaaaagtcaacctcccagtttaaaggatgggaagaccccaatcaccaggttattggatctgtccagtgagagattcatccaccaaggatgaagaaaggaggacttttaaaaatttaaggtaagatagtaatagcttcaaaagaacacatacagagtaatcctgagagtaagcaaaggaaccatgagaaccgaagctagaattgctattgaattactttattttctcttcccttattgggtagagatacatcattactggcctcaggggtttacccaaagaaagggtatttttgagcaaataatgtgatttcctggctattttgttgggggcttaagatttttttttttcaaatgcatttttagtcactaaaaattaactgtcgtaccatctagaactatactgtccagtaccatagcctctagccgtatgtagctatttgtattaagattaattgaaattttaaatccagttcctcagtcacactagccactttctaagtgctcagtagctctgtgtgaccagcggctactgtattggatattatagaaggttctttcattcaagatcatcattcttgacagacccataaatatttcctataaagactgtagaagtgtgttctggagggtttgctctccaaaaagaattgtaatatagagtagaattgggatagagtattgaagacactgggtttagacattggatattttaatgattgtgtgttctaattcatgtgctgccaactgagttatctagtgatatgacctcactgtcttgaccaaagccagaatagaaggcaggattcctgaattctatcttaaaatttgcaatgaagagccttttccctaaattatcccattatgtaattcttggtcagctcaagaactgggttctttttctaataattaactcactaaatctgagccagtgtccaaggacagtttgtcattaaggagtactgagacttcttagctttggtactgacagttttcttttgcctcttgacataattggtatatggatctgataactgaggtcccatcttccctactcattcctatgggaatgatgctttggaaattattagatatatcctattcccttcctcccatttttttcctgctagtgcaaaaggtagatgagtaggaagattaggactcctgagttgcccatgatttcatctaatttttggattcagaatgtattttatgaataatatgcagagatgcatattaggaatgtgaagccagaatgggtcagttgtagctgctgcaaagttctgtagctgatggtcatttaattgcatgggggttattttatctttcatgattgtggtgcacctgatgctggcggggtatttgtgtgtttttgtattgttatttgattacaaaaataaagcaaaaactaac

SEQ ID NO: 99 - DNA, 2274 bp, Artificial
  cDNA Sequence
tacgccctatacaacttggcttcacatacttttacactaactttatatgatttttaaaaactggtctgatcggacttctcgtcctgggacactgtttactggagtctggccggctctccgtgctcctcttggtacctcattttggggagaaccttaaacccactcgagcagataatctccgccttgaccggtgccaccaaagaagccttggaaccatgtggacttttctgggcattgccactttcacctatttttataagaagttcggggacttcatcactttggccaacagggaggtcctgttgtgcgtgctggtgttcctctcgctgggcctggtgctctcctaccgctgtcgccaccgaaacgggggtctcctcgggcgccagcagagcggctcccagttcgccctcttctcggatattctctcaggcctgcctttcattggcttcttctgggccaaatccccccctgaatcagaaaataaggagcagctcgaggccaggaggcgcagaaaaggaaccaatatttcagaaacaagcttaataggaacagctgcctgtacatcaacatcttctcagaatgacccagaagttatcatcgtgggagctggcgtgcttggctctgctttggcagctgtgctttccagagatggaagaaaggtgacagtcattgagagagacttaaaagagcctgacagaatagttggagaattcctgcagccgggtggttatcatgttctcaaagaccttggtcttggagatacagtggaaggtcttgatgcccaggttgtaaatggttacatgattcatgatcaggaaagcaaatcagaggttcagattccttaccctctgtcagaaaacaatcaagtgcagagtggaagagctttccatcacggaagattcatcatgagtctccggaaagcagctatggcagagcccaatgcaaagtttattgaaggtgttgtgttacagttattagaggaagatgatgttgtgatggggcagtacaaggataaagagactggagatatcaaggaactccatgctccactgactgttgttgcagatgggcttttctccaagttcaggaaaagcctggtctccaataaagtttctgtatcatctcattttgttggctttcttatgaagaatgcaccacagtttaaagcaaatcatgctgaacttattttagctaacccgagtccagttctcatctaccagatttcatccagtgaaactcgagtacttgttgacattagaggagaaatgccaaggaatttaagagaatacatggttgaaaaaatttacccacaaatacctgatcacctgaaagaaccattcttagaagccactgacaattctcatctgaggtccatgccagcaagcttccttcctccttcatcagtgaagaaacgaggtgttcttcttttgggagacgcatataatatgaggcatccacttactggtggaggaatgactgttgcttttaaagatataaaactatggagaaaactgctaaagggtatccctgacctttatgatgatgcagctattttcgaggccaaaaaatcattttactgggcaagaaaaacatctcattcctttgtcgtgaatatccttgctcaggctctttatgaattattttctgccacagatgattccctgcatcaactaagaaaagcctgttttctttatttcaaacttggtggcgaatgtgttgcgggtcctgttgggctgctttctgtattgtctcctaaccctctagttttaattggacacttctttgctgttgcaatctatgccgtgtatttttgctttaagtcagaaccttggattacaaaacctcgagcccttctcagtagtggtgctgtattgtacaaagcgtgttctgtaatatttcctctaatttactcagaaatgaagtatatggttcattaagcttaaaggggaaccatttgtgaatgaatatttggaacttaccaagtcctaagagacttttggaagaggatatatatagcatagtaccataccacttataaagtggaaactcttggaccaagatttggattaatttgtttttgaagttttttgtatataaatatgtaaatacatgctttaatttgcaatttaaaatgaaggggttaaataagttagacatttaaaagaaatgattgttaccataaattagtgctaatgctgaggagaactacagtttttcttttgaatttagtatttgagatgagttgttgggacatgcaaataaaatgaagaatga

SEQ ID NO: 100 - DNA, 4106 bp, Artificial
  cDNA Sequence
aggggcggaagtcggggtctgacccgctccaggtccgggactgcggatagaagaggaccgccgccttgagggaggggtggaaactgggtgccggctccgcgcgcgacctccggccctgcgcgtgcgccgtggcgcggcccggctgacaggttctttaatggaggagccaatctctctgcacacctggtttcatctaataatatacagacaccagctctgaggccagttaatcatccccagtgtccaggcacagagtagtcggtccgcctcacaatgttggactttctagccgagaacaacctctgtggccaagcaatcctaaggattgtttcctgtggtaatgccatcattgctgaacttttgagactctctgagtttattcctgctgtgttcaggttaaaagacagagctgatcaacagaaatatggagatatcatatttgatttcagctattttaagggtccagaattatgggaaagcaaactggatgctaagccagagctacaggatttagatgaagaatttcgtgaaaacaacatagaaattgtgaccagattttatttagcatttcaaagtgtacataaatatattgtagacttaaacagatatctagatgatctcaatgaaggggtttatattcagcaaaccttagaaactgtgcttctcaatgaagatggaaaacaacttctatgtgaagcactgtacttatatggagttatgctactggtcattgaccaaaagattgaaggagaagtcagagagaggatgctggtttcttactaccgatacagtgctgctcgatcttctgctgattcaaatatggacgatatttgtaagctgcttcgaagtacaggttattctagccaaccaggtgccaaaagaccatccaactatcccgagagctatttccagagagtgcctatcaacgaatccttcatcagtatggtcattggtcgactgagatctgatgatatttacaaccaggtctcagcgtatcctttgccggagcatcgcagcacagccctggcaaaccaagctgccatgctgtacgtgattctctactttgagccttccatccttcacacccatcaagcaaaaatgagagagatagtggataaatactttccagataattgggcaagtattagtatttacatggggatcacagttaatctagtagatgcttgggaaccttacaaagctgcaaaaactgctttaaataataccctggacctttcaaatgtcagagaacaggcaagcagatatgctactgtcagtgaaagagtgcatgctcaagtgcagcaatttctaaaagaaggttatttaagggaggagatggttctggacaatatcccaaagcttctgaactgcctgagagactgcaatgttgccatccgatggctgatgcttcatacagcagactcagcctgtgacccaaacaacaaacgccttcgtcaaatcaaggaccagattctaacagactctcggtacaatcccaggatcctcttccagctgctgttagatactgcacaatttgagtttatactcaaagagatgttcaagcaaatgctttcagaaaagcaaaccaaatgggagcattacaagaaagagggttcggagcggatgactgagcttgctgatgtcttttcaggagtgaaacccctaaccagagtggagaaaaatgaaaaccttcaagcttggttcagagagatctcaaaacaaatattgtctttaaattatgatgattctactgctgcgggcagaaaaactgtacaactgatacaagctttggaagaggttcaagaattccaccagttggaatccaatctgcaagtatgtcagtttcttgccgatactcgaaagtttcttcatcaaatgatcagaaccattaacattaaagaggaggttctgatcacaatgcagatcgttggggacctttctttcgcttggcagttgattgacagtttcacatccatcatgcaagaaagcataagggtaaatccatccatggttactaaactcagagctaccttcctaaagcttgcctctgccctcgatctgccccttcttcgtattaatcaggcaaatagccccgacctgctcagcgtgtcacagtactattctggagagttggtatcctatgtgagaaaagttttgcagatcatcccagaaagcatgtttacatctcttctaaagatcataaagcttcagacccacgacattattgaagtgcctacccgcctggacaaagacaagctgagggactatgctcagctaggcccacgatacgaggttgccaagcttactcatgctatttccatttttactgaaggcatcttaatgatgaaaacgactttggttggcatcatcaaggtggatccaaagcagttgctggaagatggaataaggaaagagcttgtgaagcgcgttgcctttgccctgcataggggactgatattcaaccctcgagccaagccaagtgaattgatgcccaagctgaaagagttgggagcgaccatggatggattccatcgttcttttgaatacatacaggactatgtcaacatttatggtctgaagatttggcaggaagaagtatctcgtatcataaattacaacgtggagcaagagtgtaataactttctaagaacgaagattcaagattggcaaagcatgtaccagtccactcatattccaatacccaagtttacccctgtggatgagtctgtaacgtttattggtcgactctgcagagaaatcctgcggatcacagacccaaaaatgacatgtcacatagaccagctgaacacttggtatgatatgaaaactcatcaggaagtgaccagcagccgcctcttctcagaaatccagaccaccttgggaacctttggtctaaatggcttagacaggcttctgtgctttatgattgtaaaagagttacagaatttcctcagtatgtttcagaaaattatcctgagagacagaactgttcaggacactttaaaaaccctcatgaatgctgtcagtcccctaaaaagtattgtcgcaaattcaaataaaatttatttttccgccattgccaaaacacagaagatttggactgcgtatctcgaggctataatgaaggttgggcagatgcagattctgagacaacagattgccaatgaattaaattattcttgtcggtttgattctaaacatctggcagctgctctggagaatctcaataaggctctcctagcagacattgaagcccactatcaggacccttcacttccttaccccaaagaagataacacacttttatatgaaatcacagcctatctggaggcagctggcattcacaacccactgaataagatatacataacaacaaagcgcttaccctattttccaattgtaaactttctatttttgatcgctcagttgccaaaacttcaatacaacaaaaatctgggaatggtctgccgaaaaccgaccgacccggttgattggccaccacttgtcctgggactgctcactctgctgaagcagttccattcccggtacaccgagcagttcctggcgctgattggccagtttatctgctccacggtggagcagtgtacaagccagaagatacctgaaattcctgcagatgttgtgggtgcccttctgttcctggaggattatgttcggtacacaaagctacccaggagggttgctgaagcacatgtgcctaatttcatttttgatgagttcagaacagtgctgtaactgtttttcctacttcttcaatggaaggattgtccttagatcttcccaccatcacaaatgaatttgaagatgaaaagaaactcagttgctcatacaactgcattttttctgtctattatgggaaacatcagacgttctgagtaagatatatctcatggcattagttaatataactgatattgtttaaatcatggtattacatgcaatttatatcagataaaagcagaacacatttttgtactgcctctcttaaatgctgaatgtaactgttatgtataaatccatttagttttatgttctaaagaactatttgtgcaactccagattttcagtaaaatagtattactagt

SEQ ID NO: 101 - DNA, 1047 bp, Artificial
  cDNA Sequence
gacgggctcaccacgcagcagctcttcgccagagccgacagcctcacctacaacgagttcctgattctcccaggattcatagacttcatagctgatgaggcggacctcacctcagcccttacctggaagatcacgctgaagacgccgctgatctcctcctccatggacactgtgacagagggcaacatggccatcacgatggctctggtgggaggtattggtttcattcaccacaactgcaccccagagttccaggccaaggaggtgcggaaggtcaagaagtttgaacatggcttcatcacggaccccatggtgctgagcccctcgcaccctgtgggtgatgtgctggaggccacgatgcggcatggcttctctggtatccccatcactgagacaggcaccatgggcagcaagccggtgggcatcgtcacttcccgagacatcgactttcttgctgagaaggaccacaccaccctcctcagtgaggtgatgatgccaaggattgagctggtggtggctccagcaggagtgatgttgaaagaggcaaatgagatcctgcagcaaagcaagaaagtgaagctgcctatcgtcaatgacgatgatgagctggtggccatcattgccctcaccgacctgaagaaccgagactaccctgtggcctccaaggattcccatgagcagctgctgtgtggggcagctgtgggcacctgtgaggatgacaaataccgcctggacctgctcacccaggcgggtgtcgacgtcatagtcttggacttgtccgaagggaacttgctgtatcaactgatggtgtattacgtcaaacagaagtactcccacctccaggtgattggggggaacgtggtgacagcagcccaggccaagaacctgattgatgctggtgtggacgggctgtgtgtgggcataggctgcggctccctctgcatcacccaggaagtgatggcatgtggttgcccccagggcactgtgtacaaggtggctgagtatgcccggcactttggtgtgcccatcatagccgatggtggcatc

SEQ ID NO: 102 - DNA, 1348 bp, Artificial
  cDNA Sequence
cctctccccccgggctccgcccaccccacgccgggaacccacgcgggccactacaagcccgccctttcctacgtctggtccagtcggtcttcctccggcccgggccctggcccagctagccggccatggaaggtaatggccccgctgctgtccactaccagccggccagccccccgcgggacgcctgcgtctacagcagctgctactgtgaagaaaatatttggaagctctgtgaatacatcaaaaaccatgaccagtatcctttagaagaatgttatgctgtcttcatatctaatgagaggaagatgatacctatctggaaacaacaggcgagacctggagatggacctgtgatctgggattaccatgttgttttgcttcatgtttcaagtggaggacagaacttcatttatgatctcgatactgtcttgccatttccctgcctctttgacacttatgtagaagatgcctttaagtctgatgatgacattcacccacagtttaggaggaaatttagagtgatccgtgcagattcatatttgaagaactttgcttctgaccgatctcacatgaaagactccagtgggaattggagagagcctccgccgccatatccctgcattgagactggagattccaaaatgaacctgaacgatttcatcagtatggatcccaaggtaggatggggcgccgtctacacactatccgaatttacacatcggtttggcagtaaaaactgctgaacttggtctcaagatgtggaactgtggagaaattctaggacatgaacaagctatcctttcatcgaggacagcaaacattatggtacagttggcttggaattatgtctttctcttttaatttgattgagtggaaatctgagtgaatacaaatataaatgaacaacataaaaacttttgttttgacatgtcaaattgaaacttgataaagtgcgtacttgctaagatattcctgtggctcatgcgttacaacacgaggacttaagccagtaatcgtttttgttcagatagaggtgtggaggtagagccagcccctcatgtctgttttggatgttttgtgtctctccagctacattgtaagttccttgagggcagggccatggcccattgctctgtgaatctcaaatgcccataaaaggtgcccataaaatgttttcttgaacatttgaatgtgctgttgtctggaaaggggtaatattgtgagctgaatcagcaataagtattagtctttttggactatggtattgttaaaaagactgcagccctctcagacttgagcgttaattggcttatttatttatggctttaaataaaatcgatttaacgtt

SEQ ID NO: 103 - DNA, 375 bp, Artificial
  cDNA Sequence
atgactcttaacgagcacgctgccttcaagcatctgtttaacaaagcacatcttgcaccgcccttaatccattcaaccctgagtggacacagcacatgtttcagagagcacagggttggaggtaaggtcacagatcaacaggatcccaaggcagaagaatttttcttagtacagaacaaaatgaaaagtctcccatgtctacttcttcctacacagacacggcaaccatccgatttctcaatcttttccccacctttcctgcctttctattccacaaagccgccattgtcatcctggcccgttctcaatgagctgttgggtacacctcccagacggggtggtggccgggcagaggggctcctcacttcccagtag

SEQ ID NO: 104 - DNA, 4806 bp, Artificial
  cDNA Sequence
atggtggttctccgcagcagcttggagctgcacaaccactccgcggcctcggccacgggctccttggacctgtccagtgacttcctcagtctggagcacatcggccggaggcggctccgctcggccggcgcggcgcagaagaaacccgcggcgaccacagccaaagcgggcgatgggtcatcagttaaggaagttgaaacctaccaccggacacgtgctttaagatctttgagaaaagatgcacagaattcttcagattctagttttgagaagaatgtggaaataacggagcaacttgctaatggcaggcattttacaaggcagttggccagacagcaggctgataaaaaaaaagaagagcacagagaagacaaagtgattccagttactcggtcattgagggctagaaacatcgttcaaagtacagaacacttacatgaagataatggtgatgttgaagtgcgtcgaagttgtaggattagaagtcgttatagtggtgtaaaccagtccatgctgtttgacaaacttataactaacactgctgaagctgtacttcaaaaaatggatgacatgaagaagatgcgtagacagcgaatgagagaacttgaagacttgggagtgtttaatgaaacagaagaaagcaatcttaatatgtacacaagaggaaaacagaaagatattcaaagaactgatgaagaaacaactgataatcaagaaggcagtgtggagtcatctgaagagggtgaagaccaagaacatgaagatgatggtgaagatgaagatgatgaagatgatgatgatgatgacgatgatgatgatgatgatgatgatgaagatgatgaagatgaagaagatggagaagaagagaatcagaagcgatattatcttagacagagaaaagctactgtttactatcaggctccattggaaaaacctcgtcaccagagaaagcccaacatattttatagtggcccagcttctcctgcaagaccaagataccgattatcttccgcaggaccaagaagtccttactgtaaacgaatgaacaggcgaaggcatgcaatccacagtagtgactcgacttcatcttcctcctctgaagatgaacagcactttgagaggcggaggaaaaggagtcgtaatagggctatcaataggtgcctcccactaaattttcggaaagatgaattaaaaggcatttataaagatcgaatgaaaattggagcaagccttgccgatgttgatccaatgcaactagattcttcagtacgatttgatagtgttggtggcctgtctaatcatatagcagctctaaaagagatggtggtgtttccattactttatccagaagtctttgaaaaatttaaaattcaacccccaagaggttgtttgttttatgggccacctggaactggaaagactctggttgccagagcacttgccaatgagtgcagtcaaggggataaaagagtagcatttttcatgaggaaaggtgctgattgtctaagtaaatgggtaggagaatctgaaagacagctacgattgctgtttgatcaggcctatcagatgcgcccatcaattattttttttgacgaaattgatggtctggctccagtacggtcaagcaggcaagatcagattcacagttctattgtttccaccctgctagctcttatggatggattggacagcagaggggaaattgtggtcattggtgctacgaacaggctagattctatagatcctgctttacgaaggcctggtcgctttgatagagaattcctctttagcctgcctgataaagaggctcgaaaagagattctaaagattcacaccagggattggaatcccaaaccactggacacatttttagaagagctagcagaaaactgtgttggatactgtggagcagatattaaatcaatatgtgctgaagctgctttatgtgctttacgacgacgctacccacagatctataccactagtgagaaactgcagttggatctctcttcaattaatatctcagctaaggatttcgaggtagctatgcaaaagatgataccagcctcccaaagagctgtgacatcacctgggcaggcactgtccaccgttgtgaaaccactcctgcaaaacactgttgacaagattttagaagccctgcagagagtatttccacatgcagaattcagaacaaataaaacattagactcagatatttcttgtcctctgctagaaagtgacttggcttacagtgatgatgatgttccatcagtttatgaaaatggactttctcagaaatcttctcataaggcaaaagacaattttaattttcttcatttgaatagaaatgcttgttaccaacctatgtcttttcgaccaagaatattgatagtaggagaaccaggatttgggcaaggttctcacttggcaccagctgtcattcatgctttggaaaagtttactgtatatacattagacattcctgttctttttggagttagtactacatcccctgaagaaacatgtgcccaggtgattcgtgaagctaagagaacagcaccaagtatagtgtatgttcctcatatccacgtgtggtgggaaatagttggaccgacacttaaagccacatttaccacattattacagaatattccttcatttgctccagttttactacttgcaacttctgacaaaccccattccgctttgccagaagaggtgcaagaattgtttatccgtgattatggagagatttttaatgtccagttaccggataaagaagaacggacaaaattttttgaagatttaattctaaaacaagctgctaagcctcctatatcaaaaaagaaagcagttttgcaggctttggaggtactcccagtagcaccaccacctgagccaagatcactgacagcagaagaagtgaaacgactagaagaacaagaagaagatacatttagagaactgaggattttcttaagaaatgttacacataggcttgctattgacaagcgattccgagtgtttactaagcctgttgaccctgatgaggttcctgattatgtcactgtaataaagcaaccaatggacctttcatctgtaatcagtaaaattgatctacacaagtatctgactgtgaaagactatttgagagatattgatctaatctgtagtaatgccttagaatacaatccagatagagatcctggagatcgtcttattaggcatagagcctgtgctttaagagatactgcctatgccataattaaagaagaacttgatgaagactttgagcagctctgtgaagaaattcaggaatctagaaagaaaagaggttgtagctcctccaaatatgccccgtcttactaccatgtgatgccaaagcaaaattccactcttgttggtgataaaagatcagacccagagcagaatgaaaagctaaagacaccgagtactcctgtggcttgcagcactcctgctcagttgaagaggaaaattcgcaaaaagtcaaactggtacttaggcaccataaaaaagcgaaggaagatttcacaggcaaaggatgatagccagaatgccatagatcacaaaattgagagtgatacagaggaaactcaagacacaagtgtagatcataatgagaccggaaacacaggagagtcttcggtggaagaaaatgaaaaacagcaaaatgcctctgaaagcaaactggaattgagaaataattcaaatacttgtaatatagagaatgagcttgaagactctaggaagactacagcatgtacagaattgagagacaagattgcttgtaatggagatgcttctagctctcagataatacatatttctgatgaaaatgaaggaaaagaaatgtgtgttctgcgaatgactcgagctagacgttcccaggtagaacagcagcagctcatcactgttgaaaaggctttggcaattctttctcagcctacaccctcacttgttgtggatcatgagcgattaaaaaatcttttgaagactgttgttaaaaaaagtcaaaactacaacatatttcagttggaaaatttgtatgcagtaatcagccaatgtatttatcggcatcgcaaggaccatgataaaacatcacttattcagaaaatggagcaagaggtagaaaacttcagttgttccagatgatgatgtcatggtatcgagtattctttatattcagttcctatttaagtcatttttgtcatgtccgcctaattgatgtagtatgaaaccctgcatctttaaggaaaagattaaaatagtaaaataaaagtatttaaactttcctgatatttatgtacatattaagataaatgtcatgtgtaagataactgataaatattggaactttgctagaacaagaccctgtagtaatagtaataatagttgaagtttggccaactcttaataaagttattttggtaactaatgttttatggcacttaagaataattagcagcgttaaattttgtttgtattaagcacttttaattttatccttcctaaaaatagtttattgtatctgacaagaaacttacttaaccattgtgtccttcccatcttttttgtcatctttgttttcttcaaatgccctcctcccatctgccttgagattccctcgtcttcacttaaaagccagagtgcaagtcatgatttgcgggagggctcttgaaccacttctggctgcaccacaattctgtacttgagtatcacagtcattgtttttgagacaaacatttttataattctaatttgggttaataaagattttaaatattt

SEQ ID NO: 105 - DNA, 1514 bp, Artificial
  cDNA Sequence
agcactcccggagcctgcaacgcttgagatcctctccgcgcccgccaccccgcagggtgccccgcgccgttcccgccgccccgccgcccccgtcgcgggcccctgcaccccgagcatccgccccgggtggcacgtccccgagcccaccaggccggccccgtctccccatccgtctagtccgctcgcggtgccatgccattcctcgggcaggactggcggtcccccgggcagaactgggtgaagacggccgacggctggaagcgcttcctggatgagaagagcggcagtttcgtgagcgacctcagcagttactgcaacaaggaggtatacaataaggagaatcttttcaacagcctgaactatgatgttgcagccaagaagagaaagaaggacatgctgaatagcaaaaccaaaactcagtatttccaccaagaaaaatggatctatgttcacaaaggaagtactaaagagcgccatggatattgcaccctgggggaagctttcaacagactggacttctcaactgccattctggattccagaagatttaactacgtggtccggctgttggagctgatagcaaagtcacagctcacatccctgagtggcatcgcccaaaagaacttcatgaatattttggaaaaagtggtactgaaagtccttgaagaccagcaaaacattagactaataagggaactactccagaccctctacacatccttatgtacactggtccaaagagtcggcaagtctgtgctggtcgggaacattaacatgtgggtgtatcggatggagacgattctccactggcagcagcagctgaacaacattcagatcaccaggcctgccttcaaaggcctcaccttcactgacctgcctttgtgcctacaactgaacatcatgcagaggctgagcgacgggcgggacctggtcagcctgggccaggctgcccccgacctgcacgtgctcagcgaagaccggctgctgtggaagaaactctgccagtaccacttctccgagcggcagatccgcaaacgattaattctgtcagacaaagggcagctggattggaagaagatgtatttcaaacttgtccgatgttacccaaggaaagagcagtatggagatacccttcagctctgcaaacactgtcacatcctttcctggaagggcactgaccatccgtgcactgccaataacccagagagctgctccgtttcactttcaccccaggactttatcaacttgttcaagttctgaatcccagcacatgacaacacttcagaagggtccccctgctgactggagagctgggaatatggcatttggacacttcatttgtaaatagtgtacattttaaacattggctcgaaacttcagagataagtcatggagaggacattggaggggagaaatgcagttgctgactgggaatttaagaatgtgaacttctcactagaattggtatggaaaagcaaaatactgtaaataaactttttttctaacaatttgcc

SEQ ID NO: 106 - DNA, 1659 bp, Artificial
  cDNA Sequence
atgcattgtgagaggtttctatgtatcctgagaataattggaaccacactctttggagtctctctcctccttggaatcacagctgcttatattgttggctaccagtttatccaaacggataattactatttctcttttggactgtatggtgcctttttggcatcacacctcatcatccaaagcctgtttgcctttttggagcaccgaaaaatgaaaaaatccctagaaacccccataaagttgaacaaaacagttgccctttgcatcgctgcctatcaagaagatccagactacttaaggaaatgtttgcaatctgtgaaaaggctaacctaccctgggattaaagttgtcatggtcatagatgggaactcagaagatgacctttacatgatggacatcttcagtgaagtcatgggcagagacaaatcagccacttatatctggaagaacaacttccacgaaaagggtcccggtgagacagatgagtcacataaagaaagctcgcaacacgtaacgcaattggtcttgtccaacaaaagtatctgcatcatgcaaaaatggggtggaaaaagagaagtcatgtacacagccttcagagcactgggacgaagtgtggattatgtacaggtttgtgattcagacactatgcttgacccagcctcatctgtggagatggtaaaagttttagaagaagatcccatggttggaggtgttgggggagatgtccagattttaaacaagtacgattcctggatctcattcctcagcagtgtaagatattggatggcttttaatatagaaagggcctgtcagtcttattttgggtgtgttcagtgcattagtggacctctgggaatgtacagaaactccttgttgcatgagtttgtggaagattggtacaatcaagaatttatgggcaaccaatgtagctttggtgatgacaggcatctcacgaaccgggtgctgagcctgggctatgcaacaaaatacacagctcgatctaagtgccttactgaaacacctatagaatatctcagatggctaaaccagcagacccgttggagcaagtcctacttccgagaatggctgtacaatgcaatgtggtttcacaaacatcacttgtggatgacctacgaagcgattatcactggattctttcctttctttctcattgccacagtaatccagctcttctaccggggtaaaatttggaacattctcctcttcttgttaactgtccagctagtaggtctcataaaatcatcttttgccagctgccttagaggaaatatcgtcatggtcttcatgtctctctactcagtgttatacatgtcgagtttacttcccgccaagatgtttgcaattgcaacaataaacaaagctgggtggggcacatcaggaaggaaaaccattgttgttaatttcataggactcattccagtatcagtttggtttacaatcctcctgggtggtgtgattttcaccatttataaggagtctaaaaggccattttcagaatccaaacagacagttctaattgttggaacgttgctctatgcatgctattgggtcatgcttttgacgctgtatgtagttctcatcaataagtgtggcaggcggaagaagggacaacaatatgacatggtgcttgatgtatga

SEQ ID NO: 107 - DNA, 1362 bp, Artificial
  cDNA Sequence
tgcatgaggggggatagggaagtttggcccaccagaatgatcaccaagacatacaaagtagacctgggccctgggctcccagagaagaaaaagaagaagaaagtggtcaaagaaccagagactcaatattcaattttaaacaatgatgattactttgccaatgtttctcctataagagccacatccccttctaagagtgtagtccataggcaggcacctgagatgcctctagcgaagaaaaaggagaaaaagaagggtgtcagcgccctttgcgaggagcatgtggaacctgagaccacgctgtgtgccagacagacagagaagtcacccagccccaggaagcaggtacttggccacttgaagttcctcagtggggagaagaaaaagaagtcacctcaggctatgtcccatgcctccagggtgaaaacctcctcagacctcagacatagtgaggaggaaaccagagtcggaaagaaacttaaaaaacacaagaaggcaaaaaatagggggcccaggaccagccttctcagtccaggacccttggttctgcaaggccgggatgctgcagacacttgctcagtggggaaggagggtgaggaacaggcaaccttggggcagaaacagaagcagaagagccccagggaacacagtgggaaggtgaagaagaaaaaaaaacaccaggagggagacctcctcccaggccactccaagccctccaggtccttggagagcagcccccataaaggaagtaaaactaaaccagtcaaagttgaggctccggaatatatccccataggagatggccctaaggcccccgcgaagaaaaagatgaagtccaagaagaaggtcaccgaggagccggctctgaaaaggaagaaaaaaaagaggaaagagagtggggtagcaggagacccttggaaggaggaaacaaacatggacttagaggtggtgttggaaaggaaaggcaatatggacgaggcgcacatagaccaggtgaggcgaaagtccttgcaagaagaggtccatcaggagtcaagcaaaacggaagcttctgaaacctggaagtggacgggaacccagtttggccagtgggatactgctggttttgagaacgaggaacagaaactgaaatttctcaaacttatgggtggcttcaaaaatctctgcccaccccccccaacccccagcacgattgcaaggcccaacatggccctcagcaagaaggcagcccacagcctgcagcagaacctgcagcaggactacgaccgggccatgagctggaagtacagccgccgagcctgctttggcttctccaccgccaacaagatcttttatattgacaggaacacttccaagtcagtc

SEQ ID NO: 108 - DNA, 1651 bp, Artificial
  cDNA Sequence
ctagtggacatctgaaaccctaaaacatctcatctgtgcaaaaaagaggaatgagccaggtcgggagagtgagaagctcgcaccacttcgaaagcgtctgcctggatgctgaagttcgggttgttcttgtagctctggatcacgcaggacttcacaccttgtcctccgcactcaatgagagcctgaggccgatccacagagaggagctgcaccttcttcatttcccgaactccccagaagagaacctgaggaaaagaccagcagagccatcaccacagatccacggaggagccccacacctgccctggctctgtgtggaaaagttagacctgctccctgagaaccacgctgtgttcctccaggaaagaactgcacagctttttgagggctcattctttttctctaggtctcccgcccattccatatcacctctcctacaattcaggtggggccactgcccttgagtgccaaagaacaactcagctcctccgctgacccgtacctccactcggtatttgctcagcaccggccgaatgttggcaggaaccgggtagatctgggtgatgtctggtggctcaacgggtgggaggccttgcagcccagaaggaggaacctaccgcacaagacatattctcgttggcaacagcagatgtggttaagctaattacaagaaagctcagaaaaaggagagcagacactgcaaatgcgcaataggcttaaggtaatgaagctgcaggatacaccagcccagatcaagaagctggtaaataatgaggatggcaatgcccaatactgcctggcagtgatgagagtcaataatgtcagctgaatttctccataaagggcttgacttagggttgggccaggaaaagccattactgaatggagatctggaagggaaatggaaagcaatgggacagcaaagggaaacacagccagctcagcaggaagcaagatgggaacttcatggtctccaaggtctccgctccccttctgtgatgctcacttcttgactccctcctgaccttgacccaaagacaggggctgtcaggagtactgcgaggaggtggggaagctttaggcaggcttcctggaactactgttttacttaatatatttgtgcttctgcaacctcatgaggaggtagagatattaaataaagaaacaaaccctttcctttcattttagactacctaatttaagaaaagaatatttgtgtaagttaaaaaaatcctccagtaagctttggactctatccaagggttcagcacacaaacgtctttggagaacaagaggtttggttcacatcataaaagaaaagggatagagattaaagtgttgtgaaaggcgtcgaagcaacaagcaagagagaaagaaacacagaaaggctgagaaaatacccatccatttcttttcagccaggggagatcagtaaaaacctcctgtctccaaaaagcatggacatttttattaaacagcaataggacctggaattagctggaggctgggtacagttgcaggttgctttatacaagtatcacattcctgaagaagtgtgtagactgacgttctgtaaaccagatccaattttaattgccatttaaatggaagtcagtgaaaaactcttttagtaaagcaaatgatcatcacc

SEQ ID NO: 109 - DNA, 639 bp, Artificial
  cDNA Sequence
atgggggacatcttcaccaacttcttaaagggcttttttggcacaaaagaagtgcccatcatcatggtgggcctggatgctgcaaggaagacgccaatcctgtacaagctgaagttgggcgagattatgaccaccgtccccaccttagacttcagcgtggagaatgcggagtacaagaacatcagcttcagcctgtgggatgggtggccaggacaaggccactacttccagtgcacacaaggcctgatcctcgtggtggactgcaatgacagagagctcatggacgaggcccaggaggggctcatgaggatgctagctggggtcaatcttgggatgcagtccccaacaagcggggcctccccaacaccaagaatgcagccgggatcacagacacgttggggctcactccctaccacaggaactggtatattcaggctacccgcaccatcagcggcgacgggctctgtgaaggactggacttgtcccagcagctcccaaaccagaagtgaacgaaccccgatcctctcactcctcctcttgccttccactttactctcatgtagcaaatgtgtagtttggtgtgagtgccagaagctgcctctgtggttgagtcaccatgtgcatctcaccgtgctgtaa

SEQ ID NO: 110 - DNA, 1473 bp, Artificial
  cDNA Sequence
gcatttaatcttagtccagctgatccagatggcaaatcagatccctacattgtgatcaagcttggcaagacagaaatcaaagaccgggataaatacatccctaaacaactgaacccagtatttggaaggtcatttgagatccaagccacattcccaaaagagtccctgctctccatcctgatctatgaccatgacatgattggcacagatgaccttattggtgagaccaagatcgacctggagaaccgcttctacagcaaacaccgagccatctgtggcttgcagagccagtatgagatagaaggatacaatgcctggagagacacgtccaaacccaccgaaatcctcactaagctctgcaaagacaacaagctggatggaccctactttcaccctgggaaaatacagataggaaaccaagtcttttctggaaaaactatcttcactgaagaggacactgatgagacagtggagtcttatgaacacctggccctcaaggttttacactcttgggaggatatcccggaagtcgggtgtaggctggttcctgaacacatagaaactcggccactgtaccacaaggataagccaggaatggagcagggccgcctgcagatgtgggtggacatgtttcccaaggatatgcctcaacctggacctcctgttgacatctctccaaggcgacccaaaggatacgaattgagagtgaccatctggaacactgaagatgtcattttagaggatgagaatatcttcacaggccaaaaatcaagtgatatttatgtgaaagggtggttaaagggcttggaggatgacaagcaggagacagatgtgcattacaactccctgactggagagggcaacttcaactggcgcttcctgtttccctttcagtatctcccagctgagaagcaaatggtcattaccaagagggagaacatcttctctttagagaagatggagtgtaagactcctgctgtgttggtgctgcaggtttgggattttgaaaggctgtcctcagatgacttcctgggcaccctggaaatgaacctcaacagtttccctcgagcagctaagtctgccaaagcctgtgatcttgccaagtttgaaaatgcaagtgaggagaccaagatctctatattccagcaaaaacgtgtgcgtggctggtggcctttttctaaaagcaaagaactcacagtaagtgacagctatgggaggtggaggagatgggggaaaaggttgccattggctcagtgggtctttgtgactggaaacaaaaggttttgcatctttttgcagggcaaggttgaagctgagttccacctagttacagcagaagaagctgagaaaaatcctgttggaaaagcccgaaaggagccagagcccctggccaagcccaaccgcccagacacctccttttcgtggttcatgagcccctttaagtgcctgtactacctcatctggaagaattac

SEQ ID NO: 111 - DNA, 417 bp, Artificial
  cDNA Sequence
atggacatcctcccttaccttcacatgtcacatggcaagtgccctctcctggtgaggggcaagggtgagatggagggagaagccctgttgagctgcttggccatgaacagtttgggggaacaggaagcttgccttgacctcgggtccaagactccctccctagagatctcatcaaataaccaggaaagaccaaccaacagagaagagactggaatcatctgcccagaaagacttttcatctattcttctaaggacagctccaagagattacctgggggactttgtataaaaaataagacaacctgtgttcctgtgcagcttcatccctcatctttccctaagtgtcaagaagcaatagttagtccacaagcacgagtgaaattactgaacaaaattaagatggatacagcactctaa

SEQ ID NO: 112 - DNA, 1194 bp, Artificial
  cDNA Sequence
gcccgctctcacttttcagcggcaggcgaagggggctgaggaaaggaggtgggtctaggcaggggaaattggggtgccaccagacggagacagcttggactaccagaatcaagcactcttttggaagagggtaatctctctccaaaaactgaggacacttaccttccccatatattgagtccagctgtgtttggtggcccaggtactaatttcaagatgccaggacgttccagttcaaattcaggttcaactggtttcatctccttcagtggtgtagagtctgctctctcctccttgaaaaacttccaagcctgtatcaactctggtatggacacagcttctagtgttgctttggatcttgtggaaagtcagactgaagtgagtagtgaatatagtatggacaaggcaatggttgaatttgctacattggatcggcaactaaaccattatgtaaaggctgttcaatctacaataaatcatgtgaaagaagaacgtccagaaaaaataccagatttaaaattattggtagagaagaaatttttggctttacagagcaagaattctgatgcagactttcaaaataatgaaaaatttgtacagtttaaacaacagctgaaagaactaaagaagcaatgtggtcttcaagctgacagagaagctgacggaacagaaggagtggatgaagatataattgtgacccaaagtcagaccaacttcacctgccccattacaaaggaggaaatgaagaagccagtgaaaaataaagtgtgtggccacacctatgaagaggacgccattgttcgcatgattgagtccaggcaaaagcggaagaaaaaggcctattgccctcaaattggctgtagccacacggatataagaaagtcagatcttatccaggatgaagcacttagaagggcaattgagaaccataacaagaaaagacatcgtcattccgagtaggaaaagccacctgcctgcagggacaccagcagcctacctcctaccccagctgtctgttgagagcagtgctgaccccagcagttagggactggctgcatagcatacttgttgggggtaaaacttgttgcttttatgtgtgcttgaaaacatttttcaaagttacacaacagaaatgcaatcatattgtttatttttaagtgttctataatgttaaataaaactttgatcatctgc

SEQ ID NO: 113 - DNA, 1017 bp, Artificial
  cDNA Sequence
atggggaaaaaacagaacagaaaaactggaaactctaaaacgcagagcgcctctcctcctccaaaggaacgcagttcctcaccagcaacagaacaaagctggatggagaatgattttgatgagctgagagaagaaggcttcagacgatcaaattactctgagctacgggaggacattcaaaccaaaggcaaagaagttgaaaactttgaaaaaaatttagaagaatgtataactagaataaccaatacagagaagtgcttaaaggagctgatggagctgaaaaccaaggctcgagaactacgtgaagaatgcagaagcctcaggagccgatgcgatcaactggaagaaagggtatcagcaatggaagatgaaatgaatgaaatgaagcgagaagggaagtttagagaaaaaagaataaaaagaaatgagcaaagcctccaagaaatatgggactatgtgaaaagaccaaatctacgtctgattggtgtacctgaaagtgatgtggagaatggaaccaagttggaaaacactctgcaggatattatccaggagaacttccccaatctagcaaggcaggccaacgttcagattcaggaaatacagagaacgccacaaagatactcctcgagaagagcaactccaagacacataattgtcagattcaccaaagttgaaatgaaggaaaaaatgttaagggcagccagagagaaaggtcgggttaccctcaaaggaaagcccatcagactaacagcggatctctcggcagaaaccctacaagccagaagagagtgggggccaatattcaacattcttaaagaaaagaattttcaacccagaatttcacatccagccaaactaagcttcataagtgaaggagaaataaaatactttatagacaagcaaatgttgagagattttgtcaccaccaggcctgccctaaaagagctcctgaaggaagcgctaaacatggaaaggaacaaccggtaccagccgctgcaaaaccatgccaaaatgtaa

SEQ ID NO: 114 - DNA, 2484 bp, Artificial
  cDNA Sequence
gaaacccagagacctcctggggagccgccgccgccgccctctcggccatcgctgcctccgccgcctgctccacctcgagggacgcgagcgggcggcggggctggccgtgagagagacaggagaggaaggagggcaggggcggagttgcccgccttagcccccgcccccggccgcggccccgggccctgccccgcgcggccctgcccggcccaccgagccctggtgtggcagcggctcatggcggccgtggggcccccgcagcagcaggtgcggatggcccatcagcaggtctgggcggcgctcgaagtggcgctccgggtgccctgcctttacatcatcgacgccatcttcaactcctacccggattccagccaaagccggttctgcatcgtgctccagatcttcctccggctctttggtgtatttgcatccagtattgttctgatcttgtcacaacgatcacttttcaagttttacacgtacagctcagcctttctgttagctgcaacttcagtgttggtgaattattatgcttctttgcacattgacttctatggtgcctacaacacgtcagcttttggaattgagctgcttcctcgaaaaggtccctcgctgtggatggcacttatcgttctacagctaacatttggaattggatacgttacactactccagattcattccatctattcacaattaattattttggatctcttggttcctgtaataggcttaatcacagagctaccattacacatcagagagactttactgtttacttcttccttgattctcacattaaatacagtgtttgtcctggcagtgaaactgaagtggttttattattccacacgatatgtttatcttttggtgaggcacatgtatcgaatttacggattacagttattgatggaggacacatggaagaggattcgtttcccagacatactacgagtcttttggctaacaagagttacagctcaggctacagtgttaatgtacatcttaaggatggcaaatgaaactgattccttctttatttcttgggatgatttttgggacctcatttgcaatcttataattagtgggtgcgattctacactaactgtactgggcatgagtgctgtaatttcctcagtagcccattatttggggcttggaatattggcctttattggatcaactgaggaagatgacaggcgtcttggctttgttgcacctgttttattttttattttggctcttcagactgggttaagtgggctaagaccagaagagagacttattcgcttaagtagaaacatgtgccttttattaactgcagtcctgcattttatccatggaatgacagaccctgtattaatgtctctcagtgcctctcatgtgtcatcttttcgtagacattttcctgtgctgtttgtctctgcttgcctgtttattcttcctgtcttactcagttatgttctttggcatcactatgcactaaatacatggttgtttgcagttacagcattttgtgtggaactgtgcttaaaagtaattgtttctctcactgtttatacgttattcatgattgatggctactataatgtcctctgggaaaagcttgacgattatgtctactacgttcgttcaacaggcagtattattgaatttatatttggagttgtaatgtttggaaatggggcttacactatgatgtttgagtcgggaagtaaaattcgggcttttatgatgtgcctacatgcatattttaacatctacttacaagccaaaaatggctggaagacatttatgaatcgtaggactgctgtgaagaaaattaattcacttcctgaaataaaagggagccgcttacaagaaataaatgatgtatgtgcaatctgctatcatgagtttacaacatctgctcgtattacaccgtgtaatcattatttccatgcactttgccttcggaaatggctgtacattcaagatacttgtccaatgtgccatcagaaagtatacatcgaagatgatatcaaggataattcaaatgtatctaacaacaatggatttattccacccaatgaaactccagaggaagctgtaagagaagctgctgctgaatctgacagggaattgaacgaagatgacagtacagattgtgatgatgatgttcaaagagaaagaaatggagtgattcagcacacaggcgcagcagctgaagaatttaatgatgatactgactgatgaaaatagcatttattaatgattgaggtatttgtttaaaattcagttcatccaaaatggagtaatatccttcaccttcagtgtgtaaccaagcacaaaaacagtatcaatgttgaatctgtgaatggttttccgtttactgtgatgtgctactgtaaatatacctctttaattacttctggtctctttggtgacctgtttaaatttgtgtacattattgtacatagaataaaatgttttcacatttttatg

SEQ ID NO: 115 - DNA, 1135 bp, Artificial
  cDNA Sequence
gcccgtctccgccttctgcatcgcggcttcggcggcttccacctagacacctaacagtcgcggagccggccgcgtcgtgagggggtcggcacggggagtcgggcggtcttgtgcatcttggctacctgtgggtcgaagatgtcggacatcggagactggttcaggagcatcccggcgatcacgcgctattggttcgccgccaccgtcgccgtgcccttggtcggcaaactcggcctcatcagcccggcctacctcttcctctggcccgaagccttcctttatcgctttcagatttggaggccaatcactgccaccttttatttccctgtgggtccaggaactggatttctttatttggtcaatttatatttcttatatcagtattctacgcgacttgaaacaggagcttttgatgggaggccagcagactatttattcatgctcctctttaactggatttgcatcgtgattactggcttagcaatggatatgcagttgctgatgattcctctgatcatgtcagtactttatgtctgggcccagctgaacagagacatgattgtatcattttggtttggaacacgatttaaggcctgctatttaccctgggttatccttggattcaactatatcatcggaggctcggtaatcaatgagcttattggaaatctggttggacatctttattttttcctaatgttcagatacccaatggacttgggaggaagaaattttctatccacacctcagtttttgtaccgctggctgcccagtaggagaggaggagtatcaggatttggtgtgccccctgctagcatgaggcgagctgctgatcagaatggcggaggcgggagacacaactggggccagggctttcgacttggagaccagtgaaggggcggcctcgggcagccgctcctctcaagccacatttcctcccagtgctgggtgcacttaacaactgcgttctggctaacactgttggacctgacccacactgaatgtagtctttcagtacgagacaaagtttcttaaatcccgaagaaaaatataagtgttccacaagtttcacgattctcattcaagtccttactgctgtgaagaacaaataccaactgtgcaaattgcaaaactg

SEQ ID NO: 116 - DNA, 711 bp, Artificial
  cDNA Sequence
ccttccggctggccccgctcagtcacccgcagcaggcgtgcagtttcccggctctccgcgcggccggggaaggtcagcgccgtaatggcgttcttggcgtcgggaccctacctgacccatcagcaaaaggtgttgcggctttataagcgggcgctacgccacctcgagtcgtggtgcgtccagagagacaaataccgatactttgcttgtttgatgagagcccggtttgaagaacataagaatgaaaaggatatggcgaaggccacccagctgctgaaggaggccgaggaagaattctggtaccgtcagcatccacagccatacatcttccctgactctcctgggggcacctcctatgagagatacgattgctacaaggtcccagaatggtgcttagatgactggcatccttctgagaaggcaatgtatcctgattactttgccaagagagaacagtggaagaaactgcggagggaaagctgggaacgagaggttaagcagctgcaggaggaaacgccacctggtggtcctttaactgaagctttgccccctgcccgaaaggaaggtgatttgcccccactgtggtggtatattgtgaccagaccccgggagcggcccatgtagaaagagagagacctcatctttcatgcttgcaagtgaaatatgttacagaacatgcacttgccctaataaaaaatcagtgaaatggtc

SEQ ID NO: 117 - DNA, 1020 bp, Artificial
  cDNA Sequence
ggccacttccgcttccgctggggaggtcctccatgcgcagtcatgagtcgcttcaagtttatcgatattggtatcaacttgactgaccctatgttcagaggaatttataggggggttcaaaagcatcaagatgacttacaggatgtaatagggagagctgtcgagattggtgttaaaaagtttatgattacaggtggaaatctacaagacagtaaagatgcactgcatttggcacaaacaaatggtatgtttttcagtacagttggatgtcatcctacaagatgtggtgaatttgaaaagaataaccctgatctttacttaaaggagttgctaaatcttgctgaaaacaataaagggaaagttgtggcaataggagaatgcggacttgattttgaccgactgcagttttgtcccaaagatactcaactcaaatattttgaaaaacagtttgaactgtcagaacaaacaaaattaccaatgtttcttcattgtcgaaactcacatgctgaatttttggacataatgaaaagaaatagagatcggtgtgtagggggagtggtgcattcatttgatggtaccaaggaagcagcagctgctttgattgacttggatctttatataggatttaatggttgctcactgaaaactgaagctaatttggaagttttgaagtcaattcctagtgaaaaattaatgattgagacagatgcaccttggtgtggagtcaaaagtacacatgctggatcaaaatatataagaactgcatttcctaccaaaaagaagtgggaaagtgggcactgcttaaaagacagaaatgaaccctgccatataattcaaatattggagataatgtcagcagtgagagatgaggatccactggaattagccaatacactatataacaatactattaaagtattttttcctggaatataattggtatatgtcttccactttccatcatgtatgtaaaatttcatagtaaaacttcctgatagtttcaataaagaaattatctgc

SEQ ID NO: 118 - DNA, 1362 bp, Artificial
  cDNA Sequence
attgccataaccatcaccgaggctcgccagctggtgggtgagaacattgacccagttgtgaccattgagattggggatgagaagaagcaaagcacagtgaaggaaggaaccaacagcccattttataatgaatactttgtcttcgacttcattgggccccaagtgcatctttttgacaagatcatcaaaatctccgtaagtatagcattggtggtaatagttgtggagaggtgggagacattttgggcattggggactctctgggacaactcagcatacttagcggggaatagattcaggagggcaagtgtcagttgtgtactgattggctctttcaaagtagacctggggaccgtgtacaaccaacctggtcatcagttctgcaacaagtgggccctgctcacagaccctggtgacatcaggactggcaccaaggggtacctgaaatgtgacatcagtgtcatgggaaaaggtgatgtcttgaagaccagccctaaaacttctgacaccgaggagccaatagaaaagaaccttttgatccccaatgggtttccactggagagaccgtgggccagattctatgtgagactctacaaagcagaagggttgcccaaaatgaattcaagcatcatggcgaacgtcaccaaggcatttgtgggtgacagtaaggacctggtggatccctttgtggaggtctcctttgctgggcagatggggcgaaccacagtgcagaagaactgtgctgatcctgtgtggcatgaacaggtgatcttcaaggaaatgttccctcccttgtgtcggagggtgaaaatccaggtgtgggatgaaggcagcatgaatgacgtagccctggcaacccatttcattgacctgaagaaaatctccaacgaacaggatggagacaaaggctttctgcccacctttgggcctgcctggattaacctgtatggctcgcccaggaaccacagtctgatggatgactaccaggaaatgaacgaaggctttggggaaggtgtgtcattcaggggcagaatcttggtagaaattgctgtggaaatcctctcaggacgggcacaggaatctaaattttccaaggccctgaaggagctcaagttgccttccaaggacaaagactccaaatcttccaaaggtaaagacaaggctgacaaaactgaagatggaaaatcccaacaggcttcaaacaaaactaactcaaccgaggtggaggtggaatcgttcgatgtccccccggaggtagaaaaaaatgaggaatttttactctttggagcattttttgaagctaccatgattgaccggaagattggagataaacccatcagctttgaagtttctattggtaag

SEQ ID NO: 119 - DNA, 1713 bp, Artificial
  cDNA Sequence
atggacgaggagtcactagatgggctgctcttcaaagaccacgacttctcttctgacttgttgaggcagctcaacagcttaaggcaaagcaggatcctgactgatgtgagcatctgtgccggtgcccgggagatcccctgccaccgcaacgtgctggcctccagcagcccctacttcagggctatgttctgcagcagcttccgggagaagagtgaagccaaagtgcagctgaaaggcattgaccccccaaccctggaccagatcgtctcctacgtgtatacgggggaggcacatattgccactgacaatgtcctccccgtgatggaggccgcctccatgctacagttccccaagctgtttgaggcctgctcctcgtacttgcagagccagttggcccccagcaactgcctgggtatgatcagactctcagaaatcttaagctgcgagaccctcaagaagaaagccagggaggtggcactgacgtccttcccagaggtggccgcatcggccgacctgaaggagctctgtgccttggagttgagggactatctcggagatgatgggctctgtggggaggaggaaaaggtgtttgaggccctcatggtttggatcaagcatgacctccaggcccggaagcgatacatgcaggaactgttcaagcaggtcaggctgcagtacatccacccagccttctttcaccacttcatcgccaacgatgccctcctgcagtcctcgcctgcatgccagatcatcttggagaccgccaagagacagatgttctctttgtgtggcaccaccgtcccagactgcaaactcctgttgcatgtccctccaagaaactcttaccaagatttcctcatcctcttgggcggaaggaaggacagccagcagaccaccagggacgtcctactgtacagcaaacagaccggccaatggcagagccttgccaaactcccgacacggctgtacaaggcctctgccatcaccttgcaccgcagcatctatgtgctggggggcatggctgtcagctcagggaggagtctggtcagtcacaatgtctacatcttctccctgaaactcaatcagtggaggctgggggagcccatgctggtggcccgctactcccacagaagcactgcccataagaacttcatcttctccatcggggggattggagaagggcaggagctcatgggctccatggaaaggtatgacagcatctgcaatgtctgggagagtatggccagcatgcccgtgggggtgctccaccccgcagtcgctgtgaaagaccaaagactctatctctttggaggagaggacatcatgcagaaccctgtgcgccttatccaggtttatcacatttccagaaactcgtggttcaaaatggagacaagaatgatcaagaacgtgtgtgcccctgcagtggtgcttggggagcggattgtcattgtgggaggttacacaaggaggattcttgcttatgaccctcaatccaacaaatttgtcaaatgtgcggacatgaaagaccggaggatgcaccatggggccacagtgatgggaaacaaactctacgtgacgggcgggcggcggctgaccacggactgcaacattgaggactccgcctccttcgattgctacgaccccgagacggacacctggacatcccagggacagctgccgcacaagctctttgaccatgcctgcctcactctc

SEQ ID NO: 120 - DNA, 1518 bp, Artificial
  cDNA Sequence
ctcttcaaagaccacgacttctcttctgacttgttgaggcagctcaacagcttaaggcaaagcaggatcctgactgatgtgagcatctgtgccggtgcccgggagatcccctgccaccgcaacgtgctggcctccagcagcccctacttcagggctatgttctgcagcagcttccgggagaagagtgaagccaaagtgcagctgaaaggcattgaccccccaaccctggaccagatcgtctcctacgtgtatacgggggaggcacatattgccactgacaatgtcctccccgtgatggaggccgcctccatgctacagttccccaagctgtttgaggcctgctcctcgtacttgcagagccagttggcccccagcaactgcctgggtatgatcagactctcagaaatcttaagctgcgagaccctcaagaagaaagccagggaggtggcactgacgtccttcccagaggtggccgcatcggccgacctgaaggagctctgtgccttggagttgagggactatctcggagatgatgggctctgtggggaggaggaaaaggtgtttgaggccctcatggtttggatcaagcatgacctccaggcccggaagcgatacatgcaggaactgttcaagcaggtcaggctgcagtacatccacccagccttctttcaccacttcatcgccaacgatgccctcctgcagtcctcgcctgcatgccagatcatcttggagaccgccaagagacagatgttctctttgtgtggcaccaccgtcccagactgcaaactcctgttgcatgtccctccaagaaactcttaccaagatttcctcatcctcttgggcggaaggaaggacagccagcagaccaccagggacgtcctactgtacagcaaacagaccggccaatggcagagccttgccaaactcccgacacggctgtacaaggcctctgccatcaccttgcaccgcagcatctatgtgctggggggcatggctgtcagctcagggaggagtctggtcagtcacaatgtctacatcttctccctgaaactcaatcagtggaggctgggggagcccatgctggtggcccgctactcccacagaagcactgcccataagaacttcatcttctccatcggggggattggagaagggcaggagctcatgggctccatggaaaggtatgacagcatctgcaatgtctgggagagtatggccagcatgcccgtgggggtgctccaccccgcagtcgctgtgaaagaccaaagactctatctctttggaggagaggactcatgcagaaccctgtgcgccttatccaggaggattcttgcttatgaccctcaatccaacaaatttgtcaaatgtgcggacatgaaagaccggaggatgcaccatggggccacagtgatgggaaacaaactctacgtgacgggcgggcggcggctgaccacggactgcaacattgaggactccgcctccttcgattgctacgaccccgagacggacacctggaca

SEQ ID NO: 121 - DNA, 1374 bp, Artificial
  cDNA Sequence
ctcttcaaagaccacgacttctcttctgacttgttgaggcagctcaacagcttaaggcaaagcaggatcctgactgatgtgagcatctgtgccggtgcccgggagatcccctgccaccgcaacgtgctggcctccagcagcccctacttcagggctatgttctgcagcagcttccgggagaagagtgaagccaaagtgcagctgaaaggcattgaccccccaaccctggaccagatcgtctcctacgtgtatacgggggaggcacatattgccactgacaatgtcctccccgtgatggaggccgcctccatgctacagttccccaagctgtttgaggcctgctcctcgtacttgcagagccagttggcccccagcaactgcctgggtatgatcagactctcagaaatcttaagctgcgagaccctcaagaagaaagccagggaggtggcactgacgtccttcccagaggtggccgcatcggccgacctgaaggagctctgtgccttggagttgagggactatctcggagatgatgggctctgtggggaggaggaaaaggtgtttgaggccctcatggtttggatcaagcatgacctccaggcccggaagcgatacatgcaggaactgttcaagcaggtcaggctgcagtacatccacccagccttctttcaccacttcatcgccaacgatgccctcctgcagtcctcgcctgcatgccagatcatcttggagaccgccaagagacagatgttctctttgtgtggcaccaccgtcccagactgcaaactcctgttgcatgtccctccaagaaactcttaccaagatttcctcatcctcttgggcggaaggaaggacagccagcagaccaccagggacgtcctactgtacagcaaacagaccggccaatggcagagccttgccaaactcccgacacggctgtacaaggcctctgccatcaccttgcaccgcagcatctatgtgctggggggcatggctgtcagctcagggaggagtctggtcagtcacaatgtctacatcttctccctgaaactcaatcagtggaggctgggggagcccatgctggtggcccgctactcccacagaagcactgcccataagaacttcatcttctccatcggggggattggagaagggcaggagctcatgggctccatggaaaggaggattcttgcttatgaccctcaatccaacaaatttgtcaaatgtgcggacatgaaagaccggaggatgcaccatggggccacagtgatgggaaacaaactctacgtgacgggcgggcggcggctgaccacggactgcaacattgaggactccgcctccttcgattgctacgaccccgagacggacacctgg

SEQ ID NO: 122 - DNA, 1469 bp, Artificial
  cDNA Sequence
ctgttgtaaactttgcctgtaggaggactgatctcttgatgaaatacagaaaaaccatctcagaaaaaggaaaatgggcaatcgtcatgctaaagcgagcagtcctcagggttttgatgtggatcgagatgccaaaaagctgaacaaagcctgcaaaggaatggggaccaatgaagcagccatcattgaaatcttatcgggcaggacatcagatgagaggcaacaaatcaagcaaaagtacaaggcaacgtacggcaaggagctggaggaagtactcaagagtgagctgagtggaaacttcgagaagacagcgttggcccttctggaccgtcccagcgagtacgccgcccggcagctgcagaaggctatgaagggtctgggcacagatgagtccgtcctcattgaggtcctgtgcacgaggaccaataaggaaatcatcgccattaaagaggcctaccaaaggctatttgataggagcctcgaatcagatgtcaaaggtgatacaagtggaaacctaaaaaaaatcctggtgtctctgctgcaggctaatcgcaatgaaggagatgacgtggacaaagatctagctggtcaggatgccaaagatctgtatgatgtatgggaaggccgctggggcactgatgagcttgcgttcaatgaagtcctggccaagaggagctacaagcagttacgagccacctttcaagcctatcaaattctcattggcaaagacatagaagaagccattgaagaagaaacatcaggcgacttgcagaaggcctatttaactctcgtgagatgtgcccaggattgtgaggactattttgctgaacgtctgtacaagtcgatgaagggtgcggggaccgatgaggagacgttgattcgcatagtcgtgaccagggccgaggtggaccttcaggggatcaaagcaaagttccaagagaagtatcagaagtctctctctgacatggttcgctcagatacctccggggacttccggaaactgctagtagccctcttgcactgagccaagccagggcaataggaacacagggtggaaccgcctttgtcaagagcacattccaaatcaaacttgcaaatgagactcccgcacgaaaacccttaagagtcccggattactttcttggcagcttaagtggcgcagccaggccaagctgtgtaagttaagggcagtaacgttaagatgcgtgggcagggcaccttgaactctggcttagcaagcatctaggctgcctcttcactttcttttagcatggtaactggatgttttctaaacactaatgaaatcagcagttgatgaaaaaactatgcatttgtaatggcacatttagaaggatatgcatcacacaagtaaggtacaggaaagacaaaattaaacaatttattaattttccttctgtgtgttcaatttgaaagcctcattgttaattaaagttgtggattatgcctct

SEQ ID NO: 123 - DNA, 1753 bp, Artificial
  cDNA Sequence
ctaggaagaaacttggagctgttcaggcgatccagcctccaatcgctgctgctcttgtactcggttggcccgggcggcgctgaactgtcgggagcctaggccatggggcagcctgggccttctgcagtgtgaggcgcggggcctcccgcgtcgctccgctgacaggctgcgggcgggcaggcgggaggcgtagtgtgggtcgcggtggcggccccggccgccggccctggccgcggcatcatgaacatagacgtggagttccacatccggcacaactacccctggaacaagttgccggccaacgtgagacagagtcttggaaattcacagagagaatatgaaaagcaggttgtcctgtacagtatccgcaatcagttacgatatagaaataacttagttaaacatgtcaagaaagatgaacgcagatactatgaggaactgctaaagtacagccgagatcatctcatgctgtacccttaccatctatcggatattgtatgttatgtttgtctataaaagaaaaaatactaatattaaataatttcttacgactctgagtcactcacttatttttccaataattgatattgtacattcctagtgccattaggtatgtatgtatgtaacttttacagtttttcagctgaaagttgtaagtattttttttttttgatcggggctctttaatctcattttaatttcctttgtttgaactgtagttattttatttattcctatattaaccatctaaaccaactgtaatgacatgtacactaatacagaattgaacatttgtagttgttggcagtgaacccagttgttggtgaatttaaagcttaaaatatgggaatgatttgctgctatatttcctttgagagagaaaggaggaagaaatagaacctaatagtgatcatgaattttagggaaagtaccgaagaaccatggggtcccctctggtttcttgtgttgaatgaggcaagggtaatcatctgattccgagctgaagacctctggtcctcttaaggagggagagtgcatttttagagcttttagcaaaatgtgaaaagctgatgtttgcgccttgctttgtgaatttggctttgttttacttatacattaactcatgtaatctcttaaatcttacaagcattgatccatttcaacaaaaaggtaaatttaaaatgcagactttgttatttgccaaagaagattcatgaaaaatttacgtccaattattttgcaaatagttaatttcatttggctttttaccatgttccttcctttctttttcccgcttccttaatgtaatttaaaccctggcaaacattctttagaaaccaagaggaaagaaagaacaaatatcaaaaaagacatagaatttaatattgatacaatttcacctctaaaatggatttgaagaaatgcaactttatatcaaaaaatgtcatctgatttcctttgtttcttttttaaattatgtaatcagatgattttatgtttttttttcaggggagcggaatattggtttcttttacttgttgttttcagttttctctgccattcatgtttcttttttgtgttcagtgtttcaaatacaatttgtatttaaggattttaaaataccaaactgtaactgagtacagtggatcgttttctgttaggatgttaatattatacaatgaaatctataaagtgttgtcaatttgattattgacacatataacatgtttacaaataaactgtggtattgatc

SEQ ID NO: 124 - DNA, 3329 bp, Artificial
  cDNA Sequence
gcggccgcccccagcgaggctccgggagcccttgcctgcgggggtccggggactcgagccggcctccgcctcccggacgcacagccagcgtggtccccgcgtgcaacgcgagcgccggggagtggctcctgctttgcccctcgtgggggccgagccaagaccagtctgcaaactccatcccgccggctggaagaagtcgcggagccggcaccaaacccgcagcgtcttcccgcgcggatcccgggacttaaaaagccggggccaccccggcccaggacgggatgcgggtcggtccggtgcgctctgccatgagcggcgcctcgcagccccgcggcccggccctgctcttcccagccacccgaggcgtcccggccaaacgcctgctggacgccgacgacgcggcggctgtggcggccaagtgcccgcgcctctccgagtgctccagccccccggactacctcagcccccccggctcgccctgcagcccgcagcccccgcctgccgctccgggggccggcggaggctccgggagcgcgccggggcccagccgcatcgccgactacctgctgctgcccctagccgagcgcgagcatgtgtcccgggcgctgtgcatccacactggacgcgagctgcgctgcaaggtgtttcccattaaacactaccaggacaaaatcaggccttacatccagctgccatcgcacagcaacattactggcattgtggaagtgatccttggggaaaccaaggcctatgtcttctttgagaaggactttggggacatgcactcctatgtgcgaagccggaagaggctgcgggaagaggaagccgcccggctcttcaagcagattgtctccgccgtcgcccactgccaccagtcagccatcgtgctgggggacctgaagcttaggaagttcgtcttctccacggaggagagaacccagcttagactagaaagtctagaagacacacacataatgaagggggaagatgatgctttgtcagacaaacatggctgcccagcctacgtgagccctgagatcctcaacaccactgggacctactccggaaaggctgcggacgtttggagcctgggggtgatgctctacacccttctggttggacgataccccttccatgactcagaccccagtgcccttttctccaaaattcggcgtggacagttctgcattcctgagcacatttcccccaaagccaggtgcctcattcgcagcctcttgagacgggagccctccgagagactcactgcccccgagatcctactgcacccctggtttgagtccgtcttggaacccgggtacatcgactcagaaataggaacttcagaccagattgttccagagtaccaggaggacagtgacattagttccttcttctgctaatccccaaaacctcagaaacctcataattcttaacacctggcatttccatttctaaagatggacaggccctttggcgtggtaccaaccagataatgactgcatcaggatgaaagctgctgaactcggcatggcgcctcctcttctctgttgggatgagtgactttattgatttgagcagcatatgctgtgattggctgccctgcaaatttgtttcccttaaggaaccctcaccaactatctctgctggatttgggagttccgcatcttttgtggagggcagagtatggacatcttacacccggtggtcaagtgtgtaataaacttgagcattcgaatgggagaaaaagcaaatcgcacaatgacatattttgagtaataaccgtatttttcacagggtgacaaattgggccaataaatctgccatctttgaactcatctttggtggctagactgctacggcagcttctctgatgggaaagttccttttttggcttaacactcaccctttcttcacactcacatttaccaatgactctgctccgtttttggagcagactgttttaagttgctcaggagcctgatggaaccatgaaccgagactcttctctgtttcctgccaagacctcatctgcactaatgccttctccctgaccttgacacttccccctttagctataaaagcacttaccagccgaacgtggaacagtatcacaaaagattccatctcccaacgatttcagaactctgagctcagagagactccagattttaaaaaataatttgagtgcttggaaactattagctttttaagttccttccaaatatgttagtacctaccctttactttttccccaagaccatctcagggtggagcattctgtctaagagaagaaagataaggaggctcccacccacctctcccaagagcagacattaaacatctttgtgctttgaagagagtgaattttggatagtcttgtgattctcagactaacttccagaattatactttaacccctcccagatatggtccgcctttggcattgtgtgtacatctgcagttttgcatggtgggttgttaatatttcaaatgtgtggtttatgaatacgtctgtataatcggcttctggagtgaaacagcaaaccccaaatcttcaaagttggaaggaactttaaaaatcatccggtccaatctctttcctctttctgccacctcccaaggcagaaatcccctcttcagcttcttttgtaggtgggaatccagcctctgttagatatgtccagagatggaaactcactcccctacaaaagatggagcttaatggagaaattgcaactttcattaaaaaacaaattcagatgaaatatcagtaactgtcttggacagtgctgaaatcaggtggttaaacgggtaaacaaaatatactgtattttgagaaatggcacaaaaacaggcagtcatctttaagggctatgcctaggcaaactactaacatgcattgtgagaatgccgtgtatacctcacgtactgtgtactttgtacatatattttaccttttatacctatgttcgattttgttttgttttgttttgttctggctttgaggcttgttttgttgtctgtgtctgtctgaataacctgcgtgtctaaaaccacgtgaaatgtgaatgattattggcaatattaccttgacagaatcatgggactttgagaagagggaggacagaggcctctgtcgcactaacgctctcgtggttgctcgactgttgtatctgtgatacattatccgactaaggactctgggctggcagggccttctgccgggaaagctagaaacactaggttcttcctgtacatacgtgtatatatgtgaacagtgagatggccgtttctgacttgtagagaaattttaataaacctggtttcgt

SEQ ID NO: 125 - DNA, 2216 bp, Artificial
  cDNA Sequence
agaaattcttcagaaggaaaacagcccgtgatcttctaccaataaagccagtggaaattgccatagaggcgtggtgggtggtgcaggctggctatatcacagaagatgacatcaagatatgcactttgcctgagaaatgcgctgttgataagatcatcgattcaggccctcaactctctggatcactagattacaatgtagtacatagtttgtataacaaaggatttatttatctggatgtaccaatatctgatgacagttgtatagcagttccacctcttgaaggttttgtaatgaatcgagtgcaaggtgattattttgaaactctactctataagatatttgtttcaatagatgagcacacaaatgttgcagagcttgcaaatgtccttgagattgacttatccctggttaagaatgctgtttcaatgtattgccgattgggctttgcccataagaagggacaagtaattaatttggatcaacttcattcatcatggaagaatgttccatccgtaaacagattaaagagtaccttagatccacagaagatgctcttgtcatgggatggaggggaaagtaggagtcctgtacaagaagcttcatcggcaactgacactgatacaaatagtcaagaagatccagctgacacagccagtgtaagcagcctgagtctgtctacaggacacacgaagcgcatcgcattcctgtttgactccactcttactgccttcttaatgatgggaaatctttcaccaaacttgaaaagtcatgcagtcacaatgtttgaagtaggcaaactctcagatgagtctctggacagctttcttatagaactagaaaaggttcagagcactggtgaaggagaagcacagagatattttgatcatgcacttactctgagaaacacaatactgtttctgcgtcataacaaagatctagttgcgcaaactgcacagccagaccaacccaattatggttttcctctggatctcttacgctgtgaaagccttcttggtttggaccctgcaacttgcagcagagttctaaacaaaaattacacgctgcttgtttccatggctcccctcaccaatgaaatccggcctgtcagcagctgcacccctcagcatattggaccagctatcccagaagtcagctctgtctggtttaaactgtacatttatcatgtcactggacaaggaccaccatcccttttattgtccaaaggtacaagacttcgaaaactgccagatatatttcagagttatgatcgattgctaataacatcttggggtcatgatcctggagtagttcctacctcaaatgtgctcacgatgttgaatgatgctttaacacattctgcagttttaattcaggggcatggtctgcatgggataggagaaactgtccatgtcccatttccatttgatgaaacagaactacaaggagagttcactcgtgtcaatatgggtgttcataaagcattgcagatactaaggaacagagtggacttacagcatctctgtggatatgtcaccatgttgaatgcttccagccaacttgcagatagaaaactcagtgatgcttctgatgagagaggagaacctgatttggcttctggctcagatgtaaatgggagtacagagtcatttgaaatggtcattgaggaagcaactatagattcagcaacaaagcaaacctctggtgccacaacagaagcagattgggttcctctcgagctgtgctttggaattccactgttcagttccgaattaaaccggaaagtttgtaggaaaattgctgcacatggcctttgcagaaaagagagccttcaaaacctcttacattccagtagaaaactctctctgcaagtccttaactttgttcactcattccaggaaggtgcttcaatattggatattcacacagagcccagtttttcaagtttgctttcacagtcatcgtgtgctgacatgggtgttccacttcctgcaaaaaacttaatatttaaagatggtgtcttatcagaatggagtggacggtcaccttcctcacttcttattgctaatctccatttgcaataatttggttacaccatttgttgctcacactttctgccttttttctttcttaacgttagctttatagtgtcagccactaaaaagcatcctgctgctgcagtgcaattcttgcttaactaatattaaaagttgggg

SEQ ID NO: 126 - DNA, 2032 bp, Artificial
  cDNA Sequence
tttccggcaccggcatggccgggtgagctgcaggctaccttatttaagaccgggaatttagtcagcctggtgagccgactctgaggagatggagtatcgctgaggtgatgagagagaatgtggttgttagcaacatggagagagaaagtgggaagcccgtggctgttgtcgcagttgtgactgagccttggtttacccagcgatacagagaatatctccagaggcagaaactctttgatacacagcaccgtgtggaaaagatgccggatggctcggtggcgctaccggtgctgggagagacgcttccagagcagcacctgcaggagctgaggaatcgtgttgccccaggcagtccctgtatgctcacgcagctcccggatcctgttccttcgaagagggcccagggttgttcacctgcccaaaaattgtgtcttgaggtgagtcgctgggtggagggtcggggagtcaagtggtcagccgagttggaggctgatttgccccgatcatggcaacggcatggtaatctcttgttgctgagtgaagactgtttccaagccaagcagtggaaaaatctgggaccggaactctgggagaccgttgccttggcacttggcgtccagcgtttggcaaaacgagggcgggtatcaccggatggtactcgaactccagcagtgacactgctgctgggtgaccatggctgggtagagcatgtggataatggtatccgttataagtttgacgtgacccagtgtatgttctcctttggaaacatcactgagaagcttcgagtggcatcgttgtcctgtgctggagaagtgctggtggatctctatgcagggattggttattttacattgcctttcctagttcatgctggtgctgccttcgtccatgcttgtgagtggaatccccatgctgtagttgctctgagaaataaccttgagatcaatggagtagcagatcggtgccaaatacactttggagataacagaaaactgaagctctcaaatattgcagatagggtgatcctggggctgattcccagctctgaagaaggctggcccattgcctgccaagtgttaaggcaggatgctggaggcattttgcatatccaccaaaatgtggaatctttcccagggaagaatcttcaggctcttggagtcagcaaagtagagaaagagcattggctgtatcctcagcaaattaccaccaaccaatggaaaaatggagctaccagggattctaggggaaaaatgctgtcaccagccaccaagccagagtggcaaaggtgggcagaatctgcagaaactcgaatcgccactcttcttcagcaggtgcatgggaaaccatggaagacacaaattctgcacatccaaccagtgaaatcctatgctccccatgtggatcacatagtcctggatctggaatgctgcccctgtccttcagttggctagaggaggtagatcctgggacacatgggatccacgtgcgagtggcccttaaatgtatcagttcagtccaggttgtcatcccttttgtcccctggtgatcagtttttttcatattttatagccctgaaagcaggctctagatcaattcaaattatttcatttgtctttcattgataacagaaaatgaaatacctgtttgggagaagcagcatggcccattgaaatgaggctcatctgtgcaattatgaattccaaattctgacctcagttctggaattgaagtttcagtatgttttggcctcgggtttcgttatttgcaaaatgagagtttctttgaactgtctcacgtgactattaagcaactatacacaggacatcggttattttagagtgaaagacacagtgctttttccaaattgctctggctaccatatagaaaattgactgaaggagggccaagatggaaacagagagaccagtgaggaggcttctgtggttgtccaggtctgaggtgatggtaacttggactcggatggtggtaatgggaggtagattgatatgataaataaaattgacagacc

SEQ ID NO: 127 - DNA, 3221 bp, Artificial
  cDNA Sequence
ggggtagcggcggcggcggcggctgcggctcgggagcgcggctgctttgagggctcgggaaccttacagagtggggacgtggggaggctagagggtgagaaagctggcgggagagtagggcggcgctggaggagggcggtgcgtggctgactcatcctctggaagatcagactgacagagacacacactagcccgccccgcccgcccgcgccgctcctcctcagccgggaggcgcccgcccgcaccgaccgcccgccctctccgggcgctgtccgggcccggccgtctcagagaaagtttttcccatcggaggggcgggagccgccgcgggccttttggaaaggaagtggggacggaacaggaggcgagagccgcgcgggcccgcggagtgcatggtgcccggcgcctcggctgcctggcaggaggacctcggggcggggtcgagctgagcccagctccttctcgcctcagccgcgccagaaaccgccttgccggacggccgcgggggtcccagctcctcagctcgccatgtcccggctgctgccgctgctgaggagccggaccgcgcgcagcctgaggccgggcccggccgccgccgccgcgccccgcccgccgtcctggtgctgctgcgggcgggggctgctggcgctcgcgccccccggcggcttgccgggcggccccaggcggctgggcacgcaccccaagaaggagcccatggaggcgctgaacacggcgcagggcgcgcgcgacttcatctacagcctgcactccacggagaggagctgcctgctcaaagagctgcaccgcttcgagtctattgccattgcccaagaaaaattggaagctccaccacccaccccaggacagctgagatatgtattcatccacaatgcgatacctttcatagggtttggctttttggataatgcaattatgattgttgctggaacccatattgaaatgtctattggaattattttgggaatttcaactatggcagctgctgctttgggaaatcttgtgtcagatctagctggacttggacttgcaggctacgttgaagcattggcttccaggttaggcctgtcaattcctgatctcacaccaaagcaagttgacatgtggcaaacacgtcttagtacacatttgggcaaagctgttggggtgactattggctgcattctaggaatgtttcctttaattttctttggaggaggtgaagaagatgaaaaactggaaacgaaaagttaatcctcttagaatacctataaaaagatgtaaactaatgtacctcagtaattaaatatgctgtcacaacatttaggaattaagacagtaacagtatagatatgggatcaaataatttagcatgtattatggaaaacactaacttattgtggcttgatcttcttaggacatcttttttaaaaagctgtttagtatcattttgtgtatattgttgaaatgctttttcatcaatagcagtcaacattttatcctttctttttatattcataatgttatttaagtgtcattgatgtactgtattgacttggggtttgcttatttgttacttaacatgtgtacatgcatgaaagcatttttcgttgttccctgatagttacatttcaaccttgggatttttccaaattacttaagatgtttaatgtcagttaaagatttttttaccctctttttgggaacatcaattttgtactgttatgcagtaaacatttataataatataatttcagtcatttcttaactgtcacatctattgaaaatggatatagatacaggttttaagtattttaagtatatattacttattttaattttctgactttactattttaagggccagagggttaatcacaaagagcaattatgtggtctccctgctacatgaaaccgtgtatactaacaagcgtacaatttttagttgattttttttaaccttttagtttcccagttttgaataattacatggtggattctgacttttgaggggaagcaaatgattattttagagtctttgaaatggggattgtggaattagattgaactaagggatttaacatgatgcttggaaattaagagactaaagctttttttaaaaaaaggtggaaaataggaactgtcaagaaggtttatggtataaatgatgaagttgaagtgatgtttgaaagattaatgagatacaatttatattatttggtaaggtttttttttttccctccaaagatgtcatcttctcatctgaatggaataagtctgaataccccatattcatactcctaatctcattatatcttatttagtgaattttatttatgaataatttctgttgaagtgaaaactagatatttaatattttgcttttttgctacatagtctactcaaaaattacatgaggagaaatcctttttccctttgtttttcttttttcttcttttgtggtatttaaagcatattttaggttgaagttacttatttctagtcttgtacttctggcttaagtataaccatgtaagaattataaattttagttttctgaacccttaaacttttttagcatgtggtctgttacacatgctaaaaaattagtcttacttgtaacagcgtaattaaacacatcatggaggagagaaacttaaaattaaaatagtattttggcttttgaagttatttgtgttgctaaatagatgcagaggttttacagcagtttattttaaggttttatttatacataattactttgaactcttcagagtagatattttttcacaaggcagtttgtcataaattctctcatgcgcttcagaatgcataagtgccatcctttaatcatagactttgaggagagaaagcataaaaatatagcatataatctaaaaataaatatataacatgcacaaataatgtgacattcttactgaatcaaatcatgattctagaacttgagatcttaaatagaatttcggtttgtatcttccatataataaccacacacagataaccacacaaaaaatcctttgtaaaatttctgattgataggattagagtgcttaaatttttggggggggaagggtggggtaaagtgtaagtgctttcttttgtccctaacttgtgtattgatggcagtccactctgttttctaaaaatgtattttactgtggtgcttaacttcttattaattaaatcccgtatcagaaaccttg

SEQ ID NO: 128 - DNA, 4217 bp, Artificial
  cDNA Sequence
gccctcagcatcggaccagagtacttggtatctggatgaatcgacactcactgacaacatcaaaaagacactgcacaagttctgtggcccctcccctgtggtcttcagtgatgtgaactccatgtatctgtcttccacggagccgccagccgctgctgaatgggcatgtctgctgcgccctctgaggggccgtgagccagagggcgtctggaacctgctaagcattgtgcgggagatgttcaagcggagggacagcaatgctgcccccttgttggaaatcctcactgaccagtgcctcacctatgaacagataacaggttggtggtatagcgtacgtacctcagcctcacacagcagtgccagtgggcacacgggccgtagcaacgggcagtcagaggtggcagcccatgcctgtgccagcatgtgtgacgagatggtcacactgtggaggctggccgtgctggaccctgcactcagcccccagcggcgccgggaactgtgtacgcagctgcggcagtggcaactgaaggtgattgagaacgtcaagcggggccaacacaagaagacgctggagcggctcttccccggcttccggccagcggtggaggcctgctacttcaactgggaagaggcctacccacttcctggtgtcacctacagcggcactgacaggaagctggcactgtgctgggcccgggccctgccctctcggccaggtgcctcccgctctgggggcctggaggaatcccgggaccggccccgaccccttcctactgagccagctgtgcggcccaaggagcctgggaccaagcgaaagggcttgggtgagggggtcccctcatcacagcggggtccccgccgcctctcagctgaagggggagataaagctctacataagatgggtccaggtgggggcaaagccaaggcactgggtggggctggcagtgggagcaagggctcagcaggtggcggaagcaagcgacggctgagcagcgaagacagctccctggagccagacctggccgagatgagcctggatgacagcagcctggccctgggcgcagaggccagcaccttcgggggattccctgagagccctccaccctgtcctctccacggtggctcccgaggcccttccactttccttcctgagcccccagatacttatgaagaagatggtggtgtgtacttctcggaagggcctgagcctcccacagcctctgttggcccccctggcctactgcctggggatgtctgtacccaggacgacctcccttctacagatgagagtggcaatgggcttcccaaaaccaaagaggcagcccctgcagttggagaggaggatgatgactaccaggcgtactatctgaatgcccaggatggggctgggggcgaggaagagaaggccgagggcggggctggggaggagcacgacctgtttgctgggctgaagccactggaacaggagagtcgcatggaggtactgtttgcctgtgctgaggccctgcatgcgcatggctatagcagtgaggcctcccgtctcactgtggagcttgcccaggatctgctagccaacccacccgacctcaagggcaagaagaacaaggtatccacgagccgtcagacctgggtggctaccaacaccctgagcaaggcggccttcctgttgacagtgctaagtgagcgtccagagcaccacaacctggccttccgagttggcatgtttgccttggagctacagaggcctccagcttctaccaaggccttggaggtgaagctggcataccaggagtctgaggtggctgccctgctcaagaagatccctctgggtccaagtgagatgagtaccatgcggtgccgggcagaggaacttcgggaggggacactctgtgactatcggcctgtgttgcctctcatgctggccagtttcatctttgacgttctctgtgctccaggttcccggcccccaagtcgcaactggaacagcgagacacctggggatgaggagcttggatttgaagcagcagttgctgccttgggcatgaagacaacagtgagcgaggcagaacatcccctcttatgtgaaggcacacgtcgggagaagggtgacctggcattagcactaatgatcacttacaaggacgaccaggccaagcttaagaagatcttagacaaactcttggaccgagagagccagacacataagccacagacgctgagttctttctactcatctagccgcccaaccacagccagccagaggtctccttcaaagcacgggggcccatctgccccaggggccctgcaaccactgacctcaggctctgcagggcctgctcaaccagggagtgtggcaggggctgggccaggccccactgagggcttcacagagaagaatgtgcctgagagttccccacattccccctgtgagggtcttccatctgaggcagctttgaccccaaggccagaagggaaggttcctagccgcttggcacttggcagtcgtggaggctataatggacggggatgggggtccccaggacggcctaagaagaagcacacaggcatggccagcattgacagcagtgcccctgaaacaacatcggatagttcccccaccttaagccggagaccacttcgagggggctgggcccccacctcctggggtcgaggtcaggacagtgacagcattagcagctcttcttcggactccctgggctcctcatcctccagtggaagtcgccgggccagtgccagtggaggagcccgggcgaagactgttgaagttggcaggtacaagggccgccgccccgagagtcatgcccctcatgtacccaatcagccatcagaggcagctgcacacttctacttcgagctggcgaagacagtgctgatcaaggcagggggcaacagcagcacttccattttcacacatccatcttcctcagggggccaccagggtcctcaccgcaacctgcacctttgcgccttcgagattgggctttatgcccttggcctgcacaactttgtttctcccaactggctctcacgtacttattcttcccacgtttcctggattacaggccaggccatggagataggcagcgcagccctgactatactggtagaatgctgggatgggcacctgacaccccctgaggttgcatccctggctgacagggcatcacgggcaagagactccaatatggtgagggcggcagcagagctggccctgagctgcctgcctcacgcccatgcattgaaccctaatgagatccagcgggccctggtgcagtgcaaggaacaggacaacctgatgttggagaaggcctgcatggcagtggaagaggcagctaagggtgggggcgtgtaccctgaagtgttgtttgaggttgctcaccagtggttctggctgtatgagcaaactgcaggtggctcatccacagcccgtgaaggggctacaagctgtagtgccagtgggatcagggcaggtggggaagctgggcggggtatgcctgagggtagagggggcccagggactgagccggttacagtggcagcggcagcagtgacagcagcagccacagtggtgcccgtcatatcggtggggtctagtttatacccgggtccaggactggggcatggccactcccctggcctgcacccctacactgctctacagccccacctgccctgtagccctcagtatctcactcacccagctcaccctgcccaccccatgcctcacatgccccggcctgccgtcttccctgtgcccagctctgcatacccacaggtgagaccagtgttctgctggggggtaaggcatgggaaaatactgggaattcatagggggttggagtgggtactctgggagtataattggtcagtcggagagtcctggtgaggtggtgggagtctgggggacccagcccaactaaaataagaaatgacggccgggcatggtggctcatgcctgtaatcccagcactttgagaggccgatgtgggtggatcacttgaggtcaggagttcgagaccagcctggccaacatggggaaaccccgtctctactaaaaattagctgagtgcacgcctgtaatcccagcttcttgggaggctgagatgggaatcacttgaacctgggaggcagaggttgcagtgagccgatatcgtgccactgcactccagcctggaggacagagcgagactctatct

SEQ ID NO: 129 - DNA, 3611 bp, Artificial
  cDNA Sequence
cgtactatctgaatgcccaggatggggctgggggcgaggaagagaaggccgagggcggggctggggaggagcacgacctgtttgctgggctgaagccactggaacaggagagtcgcatggaggtactgtttgcctgtgctgaggccctgcatgcgcatggctatagcagtgaggcctcccgtctcactgtggagcttgcccaggatctgctagccaacccacccgacctcaaggtagagccgccccctgccaagggcaagaagaacaaggtatccacgagccgtcagacctgggtggctaccaacaccctgagcaaggcggccttcctgttgacagtgctaagtgagcgtccagagcaccacaacctggccttccgagttggcatgtttgccttggagctacagaggcctccagcttctaccaaggccttggaggtgaagctggcataccaggagtctgaggtggctgccctgctcaagaagatccctctgggtccaagtgagatgagtaccatgcggtgccgggcagaggaacttcgggaggggacactctgtgactatcggcctgtgttgcctctcatgctggccagtttcatctttgacgttctctgtgctccagtggtttctcccacaggttcccggcccccaagtcgcaactggaacagcgagacacctggggatgaggagcttggatttgaagcagcagttgctgccttgggcatgaagacaacagtgagcgaggcagaacatcccctcttatgtgaaggcacacgtcgggagaagggtgacctggcattagcactaatgatcacttacaaggacgaccaggccaagcttaagaagatcttagacaaactcttggaccgagagagccagacacataagccacagacgctgagttctttctactcatctagccgcccaaccacagccagccagaggtctccttcaaagcacgggggcccatctgccccaggggccctgcaaccactgacctcaggctctgcagggcctgctcaaccagggagtgtggcaggggctgggccaggccccactgagggcttcacagagaagaatgtgcctgagagttccccacattccccctgtgagggtcttccatctgaggcagctttgaccccaaggccagaagggaaggttcctagccgcttggcacttggcagtcgtggaggctataatggacggggatgggggtccccaggacggcctaagaagaagcacacaggcatggccagcattgacagcagtgcccctgaaacaacatcggatagttcccccaccttaagccggagaccacttcgagggggctgggcccccacctcctggggtcgaggtcaggacagtgacagcattagcagctcttcttcggactccctgggctcctcatcctccagtggaagtcgccgggccagtgccagtggaggagcccgggcgaagactgttgaagttggcaggtacaagggccgccgccccgagagtcatgcccctcatgtacccaatcagccatcagaggcagctgcacacttctacttcgagctggcgaagacagtgctgatcaaggcagggggcaacagcagcacttccattttcacacatccatcttcctcagggggccaccagggtcctcaccgcaacctgcacctttgcgccttcgagattgggctttatgcccttggcctgcacaactttgtttctcccaactggctctcacgtacttattcttcccacgtttcctggattacaggccaggccatggagataggcagcgcagccctgactatactggtagaatgctgggatgggcacctgacaccccctgaggttgcatccctggctgacagggcatcacgggcaagagactccaatatggtgagggcggcagcagagctggccctgagctgcctgcctcacgcccatgcattgaaccctaatgagatccagcgggccctggtgcagtgcaaggaacaggacaacctgatgttggagaaggcctgcatggcagtggaagaggcagctaagggtgggggcgtgtaccctgaagtgttgtttgaggttgctcaccagtggttctggctgtatgagcaaactgcaggtggctcatccacagcccgtgaaggggctacaagctgtagtgccagtgggatcagggcaggtggggaagctgggcggggtatgcctgagggtagagggggcccagggactgagccggttacagtggcagcggcagcagtgacagcagcagccacagtggtgcccgtcatatcggtggggtctagtttatacccgggtccaggactggggcatggccactcccctggcctgcacccctacactgctctacagccccacctgccctgtagccctcagtatctcactcacccagctcaccctgcccaccccatgcctcacatgccccggcctgccgtcttccctgtgcccagctctgcatacccacagggtgtgcatcctgcattcctaggggctcagtacccttattcagtgactcctccctcacttgctgccactgctgtgtctttccccgttccttccatggcacccatcacagtacatccctaccacacagagccagggcttccactgcccaccagtgtggcctgtgagttgtggggccagggaacagtgagcagtgtccatccagcatccacgtttccagccatccaaggtgcctcactgcctgccctgaccacacagcccagccctctggtgagcggaggttttccaccgcccgaggaggagacacacagtcagccagtcaatccccacagcctgcaccacctgcatgctgcctaccgtgtcggaatgctggcactggagatgctgggtcgccgggcacacaacgatcaccccaacaacttctcccgctcccccccctacactgatgatgtcaaatggttgctggggctggcagcaaagctgggagtgaactacgtgcaccagttctgtgtgggggcagccaagggggtgctgagcccgtttgtgctgcaggagatcgtcatggagacgctgcagcggctgagtcccgctcatgcccacaaccacctgcgtgccccggccttccaccaactggtgcagcgctgccagcaggcatacatgcagtacatccaccaccgcttgattcacctgactcctgcggactacgacgactttgtgaatgcgatccggagtgcccgcagcgccttctgcctgacgcccatgggcatgatgcagttcaacgacatcctacagaacctcaagcgcagcaaacagaccaaggagctgtggcagcgggtctcactcgagatggccaccttctccccctgagtctttcacccttagggtcctatacagggacccaggcctgtggctatgggggcccctcacacagggggagtgaaacttggctggacagatcatcctcactcagttccctggtagcacagactgacagctgctcttgggctatagcttggggccaagatgtctcacaccctagaagcctagggctgggggagacagccctgtctgggagggggcgttgggtggcctctggtatttatttggcatttataaatatataaactccttttttactct

SEQ ID NO: 130 - DNA, 1020 bp, Artificial
  cDNA Sequence
ggggctcagtacccttattcagtgactcctccctcacttgctgccactgctgtgtctttccccgttccttccatggcacccatcacagtacatccctaccacacagagccagggcttccactgcccaccagtgtggccttgagcagtgtccatccagcatccacgtttccagccatccaaggtgcctcactgcctgccctgaccacacagcccagccctctggtgagcggaggttttccaccgcccgaggaggagacacacagtcagccagtcaatccccacagcctgcaccacctgcatgctgcctaccgtgtcggaatgctggcactggagatgctgggtcgccgggcacacaacgatcaccccaacaacttctcccgcccccctacactgatgatgtcaaatggttgctggggctggcagcaaagctgggagatcgtcatggagacgctgcagcggctgagtcccgctcatgcccacaaccacctgcgtgccccggccttccaccaactggtgcagcgctgccagcaggcatacatgcagtacatccaccaccgcttgattcacctgactcctgcggactacgacgactttgtgaatgcgatccggagtgcccgcagcgccttctgcctgacgcccatgggcatgatgcagttcaacgacatcctacagaacctcaagcgcagcaaacagaccaaggagctgtggcagcgggtctcactcgagatggccaccttctccccctgagtctttcacccttagggtcctatacagggacccaggcctgtggctatgggggcccctcacacagggggagtgaaacttggctggacagatcatcctcactcagttccctggtagcacagactgacagctgctcttgggctatagcttggggccaagatgtctcacaccctagaagcctagggctgggggagacagccctgtctgggagggggcgttgggtggcctctggtatttatttggcatttataaatatataaactccttttttactct

SEQ ID NO: 131 - DNA, 824 bp, Artificial
  cDNA Sequence
ggggtgggcgggctggcccatggctgagacctctctcccagagctggggggagaggacaaagccacgccttgccccagcatcctggagctggaggagctcctgcgggcagggaagtcttcttgcagccgtgtggacgaagtttggcccaaccttttcataggagatgcggccacggcaaacaaccgctttgagctgtggaagctgggcatcacccacgtgctgaacgccgcccacaagggcctctactgtcagggcggccctgacttctacggcagcagtgtgagctacctgggggtgccagcccacgacctccctgattttgacatcagtgcctacttctcctctgcggctgacttcatccaccgtgccctcaacacgcctgggggccgcgtgctggtacactgtgccatgggggtaagccgctctgccacacttgtcctggccttcctcatgatctgtgagaacatgacgctggtagaggccatccagacggtgcaggcccaccgcaatatctgccctaactcaggcttcctccggcagctccaggttctggacaaccgactggggcgggagacggggcggttctgatctggcaggcagccaggatccctgacccttggcccaaccccaccagcctggccctgggaacagcaggctctgctgtttctagtgaccctgagatgtaaacagcaagtgggggctgaggcagaggcagggatagctgggtggtgacctcttagcgggtggatttccctgacccaattcagagattctttatgcaaaagtgagttcagtccatctctataataaaatattcatcgtc

SEQ ID NO: 132 - DNA, 1019 bp, Artificial
  cDNA Sequence
gcatcctggagctggaggagctcctgcgggcagggaagtcttcttgcagccgtgtggacgaagtttggcccaaccttttcataggagatgcaaacagcatcaagtgtgcggagacaggcggctgaaagccagcagcacgaactgcccgtcagagaagtgcacagcctgggccagatactcccacaggatggactcactgcagaagcaggacctccggaggcccaagatccatggggcagtccaggcatctccctaccagccgcccacattggcttcgctgcagcgcttgctgtgggtccgtcaggctgccacactgaaccatatcgatgaggtctggcccagcctcttcctgggagatgcgtacgcagcccgggacaagagcaagctgatccagctgggaatcacccacgttgtgaatgccgctgcaggcaagttccaggtggacacaggtgccaaattctaccgtggaatgtccctggagtactatggcatcgaggcggacgacaaccccttcttcgacctcagtgtctactttctgcctgttgctcgatacatccgagctgccctcagtgttccccaaggccgcgtgctggtacactgtgccatgggggtaagccgctctgccacacttgtcctggccttcctcatgatctgtgagaacatgacgctggtagaggccatccagacggtgcaggcccaccgcaatatctgccctaactcaggcttcctccggcagctccaggttctggacaaccgactggggcgggagacggggcggttctgatctggcaggcagccaggatccctgacccttggcccaaccccaccagcctggccctgggaacagcaggctctgctgtttctagtgaccctgagatgtaaacagcaagtgggggctgaggcagaggcagggatagctgggtggtgacctcttagcgggtggatttccctgacccaattcagagattctttatgcaaaagtgagttcagtccatctctataataaaatattcatcgtc

SEQ ID NO: 133 - DNA, 426 bp, Artificial
  cDNA Sequence
atggcagctgaagaaattaatgaggactatccagtagaaattcacgattatttgtcagcatttgcgaattccattgatgctgtggatgagatgctgaagaacatgatgtctgtttctagaaatgagttgttgcagaagttggacccacttgaacaagcaaaagtggatttggtttctgcatacacattaaattcaatgttttgggtttatttggcaactcaaggagtgaatcctaaggaacatccagtaaagcaggaattggaaagaatcagagtatatatgaacagagtcaaggaaataacagacaagaaaaaggctggcaagctggacagaggtgcagcttcaagatttgtaagaaatgccctctgggaaccaaaaccgaaaaatacatccaaagttgcccataaaggaaaaagtaaaagttaa

SEQ ID NO: 134 - DNA, 2036 bp, Artificial
  cDNA Sequence
gaagcgcgctcccggggaggtgttgcagccatggctacggcagccggcgcgacctactttcagcgaggcagtctgttctggttcacagtcatcaccctcagctttggctactacacatgggttgtcttctggcctcagagtatcccttatcagaaccttgggcccctgggccccttcactcagtacttggtggaccaccatcacaccctcctgtgcaatgggtattggcttgcctggctgattcatgtgggagagtccttgtatgccatagtattgtgcaagcataaaggcatcacaagtggtcgggctcagctactctggttcctacagactttcttctttgggatagcgtctctcaccatcttgattgcttacaaacggaagcgccaaaaacaaacttgaagttgtctgaaagcttgctctacacttttacattcatcctcacccttttttttgtggggtagaggaggtgcagtaatttactcagtgatctttctactttctagaaactgtccttcaaagctctttaagaccccctcgttagtcagttttttctcttatatgctctggttgagcttgaatagaccagttgttacttaagaaagaaacagagaaagattttagcttttcaatcctatttggcagaggacttcagctaccttcttacagtctttggctgtgttggtaccctcgtgtgctctgagctaagccacatactaaactgactttttggtttgtatacccttgctcccgccttctgatgaaaacaccttaccctcacaaccaccatctttcctctcctttccaaagctctttccaccttgctgcactaagataaagtgacacttccactatatgtcaattccacacacatttattaggtacctgtgaggtaggatcctatcctctcaaacttccatttctcatgctacagagaaagataaggaagatgagcaagtgcctggaatggggcaggctgagcagtcacacaggcatagaggcacgctgagaacctggaggggagactgcagagtgccttccctgatgctgcagccggaagtgatccttccctccacctggcccctgggacactgtgctctgcagtgtgcagggcctgatggcactgctagattgctccttcagctcagggccacagcttaaacagctttacctttcccctcagcacctgtcccactatcttgcacacaggtgctctaaccatgtttattgaacaaaggagggaaactgatttcactttcacttgttcattatcattccaatttttatgtgaaaatggcacaacccatttggggtaccctcaccccaaaataaaagcccaagtctacctttgactggtaccaccttttttgtggtttcgttggtgagaaacctttatctttttcatacctttctattctcaatcacttctccaaaagtgtgtctttccagctctgatttattcaaaacacaagcatttctgtttagagattctagcccatgggttatctggctagttattacctctcctgttcacttagttatactttattattgctcacaggctggggaggcagaatgactctgtcaccactaggagccattagggcttcttccctggaggactgcctgcttgctttctggggacactagccctcatttcccttctgtggtacagtggggcaaattatttgtattaagcaaacatttatgggaaacaacccgctcccgaaaacggagcccccaagtaaagcacaaccctgaaagattatgaactatgaattgtctctggtagagataaatttctgcaaacatatctcagtcttccctctgtttctctggtgattaagaagttcctttttggtaaggaaaaggatttttaaccatagagttaggcatcatggaaattcaaaccagatttcttaatacctggtcttcctcaaagagaaataataacagtaatagtggtgctgggaacaatatggcagattattgaatgaaattgattaacttgaataaaatgctgtgaattttctcta

SEQ ID NO: 135 - DNA, 1530 bp, Artificial
  cDNA Sequence
atgagctaccctggctatcccccgcccccaggtggctacccaccagctgcaccaggtggtggtccctggggaggtgctgcctaccctcctccgcccagcatgccccccatcgggctggataacgtggccacctatgcggggcagttcaaccaggactatctctcgggaatggcggccaacatgtctgggacatttggaggagccaacatgcccaacctgtaccctggggcccctggggctggctacccaccagtgccccctggcggctttgggcagcccccctctgcccagcagcctgttcctccctatgggatgtatccacccccaggaggaaacccaccctccaggatgccctcatatccgccatacccaggggcccctgtgccgggccagcccatgccaccccccggacagcagcccccaggggcctaccctgggcagccaccagtgacctaccctggtcagcctccagtgccactccctgggcagcagcagccagtgccgagctacccaggatacccggggtctgggactgtcacccccgctgtgcccccaacccagtttggaagccgaggcaccatcactgatgctcccggctttgaccccctgcgagatgccgaggtcctgcggaaggccatgaaaggcttcgggacggatgagcaggccatcattgactgcctggggagtcgctccaacaagcagcggcagcagatcctactttccttcaagacggcttacggcaaggcgagctgcggggatttgatcaaagatctgaaatctgaactgtcaggaaactttgagaagacaatcttggctctgatgaagaccccagtcctctttgacatttatgagataaaggaagccatcaagggggttggcactgatgaagcctgcctgattgagatcctcgcttcccgcagcaatgagcacatccgagaattaaacagagcctacaaagcagaattcaaaaagaccctggaagaggccattcgaagcgacacatcagggcacttccagcggctcctcatctctctctctcagggaaaccgtgatgaaagcacaaacgtggacatgtcactcgcccagagagatgcccaggagctgtatgcggccggggagaaccgcctgggaacagacgagtccaagttcaatgcggttctgtgctcccggagccgggcccacctggtagcagttttcaatgagtaccagagaatgacaggccgggacattgagaagagcatctgccgggagatgtccggggacctggaggagggcatgctggccgtggtgaaatgtctcaagaataccccagccttctttgcggagaggctcaacaaggccatgaggggggcaggaacaaaggaccggaccctgattcgcatcatggtgtctcgcagcgagaccgacctcctggacatcagatcagagtataagcggatgtacggcaagtcgctgtaccacgacatctcgggagatacttcaggggattaccggaagattctgctgaagatctgtggtggcaatgactga

SEQ ID NO: 136 - DNA, 753 bp, Artificial
  cDNA Sequence
atgttcctgtttccatcattccctgtccttctcctgtctgtggtgacagcttcctgctccaaaacaaaagcctgtgcagatacccagaagacctgctccatgattacctgtggcatccccgtcaccaatggcaccccaggcagagatgggcgagatagacccaagggggaaaagggagagccaggtcaagggctcagaggtttgcagggccctcctgggaagatggggcccccaggaaacacagggacttctggaattccaggacctaggggccaaaaaggagatcgtggggacaattcaggtctggcttcccagggaactcagactgcttgcctactgtcctgcgctgggctccaaacccagccagcctcactcaccatttgtggtttcagtgtaagccttctccttggggaaaatgggaagaagcttttcgtgaccaatggtgagcggatgcctttctccaaagtgaaggctctgtgtgctgggctccaggccacagtggctgcccccaagaatgccgaggagaataaggccatccaggatgtggccaaagacactgccttcctgggcatcacagatgaggcaactgaaggccagttcatgtacttgacgggcaggaggctgacctacagcaactggaagaaggatgagccaaatgaccacggctcaggggaggactgcgttattctcctgaacaacgggctctggaatggcatctcctgcacctcctccttcattgccatctgtgagttt

SEQ ID NO: 137 - DNA, 1271 bp, Artificial
  cDNA Sequence
agtttgcttggagctcctggggcctaacaaaaagaaacctgccatgctgctcttcctcctctctgcactggtcctgctcacacagcccctgggctacctggaagcagaaatgaagacctactcccacagaacaatgcccagtgcttgcaccctggtcatgtgtagctcagtggagagtggcctgcctggtcgcgatggacgggatgggagagagggccctcggggcgagaagggggacccaggtttgccaggagctgcagggcaagcagggatgcctggacaagctggcccagttgggcccaaaggggacaatggctctgttggagaacctggaccaaagggagacactgggccaagtggacctccaggacctcccggtgtgcctggtccagctggaagagaaggtcccctggggaagcaggggaacataggacctcagggcaagccaggcccaaaaggagaagctgggcccaaaggagaagtaggtgccccaggcatgcagggctcggcaggggcaagaggcctcgcaggccctaagggagagcgaggtgtccctggtgagcgtggagtccctggaaacacaggggcagcagggtctgctggagccatgggtccccagggaagtccaggtgccaggggacccccgggattgaagggggacaaaggcattcctggagacaaaggagcaaagggagaaagtgggcttccagatgttgcttctctgaggcagcaggttgaggccttacagggacaagtacagcacctccaggctgctttctctcagtataagaaagttgagctcttcccaaatggccaaagtgtcggggagaagattttcaagacagcaggctttgtaaaaccatttacggaggcacagctgctgtgcacacaggctggtggacagttggcctctccacgctctgccgctgagaatgccgccttgcaacagctggtcgtagctaagaacgaggctgctttcctgagcatgactgattccaagacagagggcaagttcacctaccccacaggagagtccctggtctattccaactgggccccaggggagcccaacgatgatggcgggtcagaggactgtgtggagatcttcaccaatggcaagtggaatgacagggcttgtggagaaaagcgtcttgtggtctgcgagttctgagccaactggggtgggtggggcagtgcttggcccaggagtttggccagaagtcaaggcttagaccctcatgctgccaatatcctaataaaaaggtgaccat

SEQ ID NO: 138 - DNA, 1530 bp, Artificial
  cDNA Sequence
ctggcagactacctgatcagcagcggcaccagctacgtgcccgaggacgggctcaccgcgcagcagctcttcaccagcaccaacggcctcacctacaatgacttcctgattctcccaggattcatagacttcatagctgatgatgaggtggacctgacctcagccctgacccacaagctgaagacgccgctgatctcctcccctgtggacactacagaggctgacatggcaatcgggatggctctgatgggaggtattggtttcattcaccacaactgcaccccagagttcgaggccaatgaggtgctgaaggtcaagaagtttgaacagggcttcatcacggaccctgtggtgctgagccccttgcacaccgtgggtgatttggaggccaagatgctgcatggcttctctggtatccccctcactgagacgggcaccatgggcagcaagctggtgggcatcatcacctcccgagacgtcgactttcttgctaagaaggagcacgccaccttcatcagtgaggtgatgacgccaaggatggaactggtggtggctttgaaaggtgtgacgttgaaagaggcaaatgagatcctgcagcgtaacaagaaagggaagctgcctatcgtcagtgatcgcgatgagctggtggccatcattgcccgcactgacctgaagaagaatcgagactaccctctggcctccaaggattcccacaaacagctgctgtgcagggcagctgtgggcacccgtgaggatgacgaatgccacctggacctgctcacccaggcgggtgtcaatgttgtagtcttggactcatcccaagggagctcggtgtatcagatcaccatggtgcattacatcaaacagaagtacccccacctccaggtgattggggggaacgtggtgacagcagcccaggccaagaacctgatggacgctcgtgtggacgggctgcatgtgggcatgggctacggctccatctgcattacccagaaagtgatggcctgcggttggccccagggcactgctgtgtacaaggtggccaagtatgcccagtgctttggtgtgcccatcatagtcgatggtggcatccagactgtggggcacgtggtcaaggccctggcccttggagcctccacagtgatgatgggcctgctggccaccaccacggaggcacctggtgagtacttcttcttagaaagggtgcagctcaagaagtaccagggcatgggctcactggatgccatggagaagagcagcagcagccagaaacgatacttcagcaagggggataaggtgaagatcgcacagggtgtctcgggctccatccaggacaaagggtccattcagaagttcgtgccctacctcatagcgggcatccagcacagctgccaggatatcggggcccgcagcctgtctgtcctttggtccatgatgtactcaggggagctcaagtttgagaagcagaccatgtcggcccagatcaagggtggtgtccatggcctgcactcgtatgagaagcagctgtga

SEQ ID NO: 139 - DNA, 7125 bp, Artificial
  cDNA Sequence
tctacctacagcgtcctgtccaccatgccctcagactcagaaagcagcagctccctcagcagtgtgggcactaccgggaaggcgccgtccccaccacccctcctcactgaccagcaagtgaatgagaaggtggagaacctctccattcagctgcggctgatgacccgggagagaaacgagctccgcaagcgcctggcctttgctacgcatggcacggcctttgacaagaggccctaccacaggctgaatcctgactatgagaggctgaagatccagtgcgtgcgagccatgtcggacctgcagagcctgcagaaccagcacaccaacgccttgaagaggtgtgaggaggtggccaaggagactgacttctaccacacactccacagccggctcctgagtgaccagactcggctgaaggatgacgtggacatgctgaggcgggagaatgggcagctgctgcgggagcgaaacctgctgcagcagtcatgggaggacatgaagcggctccacgaggaggaccagaaggagatcggtgacctccgtgcccagcagcagcaggtgttgaagcacaacgggtcatccgagattctcaacaaactgtatgacacggccatggacaagttggaggtggtcaagaaggactatgacgcccttcggaagaggtacagtgagaaagtcgccatccacaatgcagacctgagccgcctggagcagctgggggaggagaaccagcggttgctgaagcagacagagatgctgacccagcagagggacacggccatccagctgcagcaccagtgcgccctctccctgaggaggtttgaggcgatccaccatgagctgaacaaggccacggcgcagaacaaggacctgcagtgggagatggagctgctgcagtcagagctgaccgagctgagaaccacgcaggtgaagacagcaaaggagtcggagaaatacagggaggagcgggacgctgtgtacagcgagtacaagctcatcatgagtgagcgtgaccaggtcatctctgagctggacaagctgcagaccgaagtggagctggccgagtccaagctcaagagcagcacatctgagaagaaggcggccaatgaggagatggaggcgctgcggcagatcaaagacacggtgacaatggatgctgggagagccaacaaggaggttgaaatccttcgaaagcagtgcaaggctctgtgccaggagctgaaggaagccctccaggaggcggatgtggccaagtgccggcgggactgggccttccaggagcgagacaagattgtagcagagcgtgacagcatccggacactgtgtgacaacctgaggcgggagcgggaccgtgcggtgagcgagctggctgaggccctgcgcagcctggatgacacccgcaagcagaagaatgatgtcagccgcgagctgaaggagctcaaggaacagatggaatcccagttggaaaaggaggcccggttccgacagctgatggcccacagctcccacgactcggccattgacacggattccatggagtgggaaacggaagttgtagagttcgagagggagacggaggatattgacttgaaggcactggggtttgatatggcagaaggtgtgaatgagccttgtttcccgggggactgtggcatatttgtcactaaagtggacaaaggaagcattgctgatggccgcttaagggtcaatgactggctgctgagaatcaacgatgtggacctcatcaacaaggacaagaagcaggccatcaaggcgctcctcaatggggagggggccatcaacatggtcgtgcggcggaggaagtccctgggtgggaaggtggtcacgccgctgcacatcaacctcagtggacagaaagacagtggcatcagtctggagaatggagtgtatgctgccgctgtgctgcctggaagccctgccgctaaagaagggtcccttgctgtgggagacaggatcgttgcgatcaatggcattgcactggacaacaagtctctgaatgaatgtgaatctctgctgcgcagctgccaggactccctgaccctgtccctcctgaaggtattccctcagagctcctcgtggagtggccagaacatttttgaaaatatcaaagactctgataagatgctgagttttcgagcccatggcccggaggtccaggctcataacaaacggaacttgatacagcacaataactccacgcagacagacatcttctacacggacaggctggaagacaggaaggagccaggccccccaggaggcagcagctcctttctgcataagccattccctgggggacccttgcaggtctgcccccaggcctgtcccagtgcctctgagcgtagcctgagctccttccgctcagatgcctctggggaccgtggctttgggctggtggacgtgcgtggccggcggccactgctgccctttgagaccgaggtgggcccctgtggggttggggaggcctccctggacaaggcagactctgaaggctccaacagcggcgggacctggcccaaggccatgctcagctccacggcagtgcctgagaagctctctgtttataaaaagccaaagcaaagaaagtccatctttgaccctaacactttcaaacgcccccagacaccccccaaaatagactacctgcttccaggtcctgggcctgctcactctccccagccctccaagagggcggggcctctgacacccccaaaacctcccagaaggagcgactccattaagttccagcacaggctggagactagctccgagtcagaagccactctggtgggcagctccccatccactagtcccccgagcgccctgccccctgacgtggaccccggggagcccatgcacgcatcaccccctcgcaaggccagggtccgcattgcttccagctactaccctgaaggagatggggactcctcccacctgccggccaagaaatcctgtgatgaggacctcacctcccagaaggtggatgagctggggcagaagcgtcgccggccaaaatctgctcccagttttcggccgaagcttgctccagtagtgattcctgctcagttcctggaggaacagaagtgtgtcccggccagtggagaactctccccggagctccaggagtgggcaccttactcgcctgggcattccagccggcacagcaaccccccgctataccctagcaggccgtctgtgggcactgttccccggagtttgacccccagcaccactgtgagctccatcctgcggaaccccatctacactgtgcgcagtcacagggtcggcccctgcagctctccacctgcggcccgagatgctggcccccagggtttgcatcccagtgtccagcaccagggacgcctgagcctggacctgagccacaggacctgcagcgactactccgagatgagagccacccatgggtccaactcactgccctccagcgcccgcctgggttcttcgagtaacttgcagttcaaggcggaacgcattaaaatcccatcaacaccaagatatccgcggagtgtcgtgggctccgagagaggttcagtgtcacattctgaatgcagcactcctccacagtcacccctgaacatcgacaccctgtcctcttgtagccagtcccagacctcagcctccacattgcccagaatcgctgtcaaccccgcgtccctcggggagcggagaaaggacaggccttatgtggaggagccacgccacgtgaaggtgcagaagggctcagagccgctgggcatctccatcgtgagtggagagaagggcggcatctacgtctccaaggtgaccgtggggagcatcgctcaccaggctggcctcgagtatggggatcagttactggagttcaacggcataaacctgcggagcgccacggagcagcaggcgcggctcatcatcgggcagcagtgtgataccatcaccatcctggcccagtacaacccccacgtgcaccagctcagcagccactcccggtccagctcacacctggaccctgccggtacccactccactctccagggcagtggcaccaccaccccggagcatccatctgtcatcgacccactgatggagcaggacgaggggcctagcacccccccagccaagcagagcagctccaggattgcgggagatgccaacaagaagaccctggagccacgcgttgtcttcatcaaaaagtcccagctggagcttggggtgcacttgtgtggtgggaacctgcatggggtgtttgtggccgaggtggaggatgacagtcctgccaagggtcctgacggcctcgtgccaggggacctcatcctggagtatggcagcctggacgtgcggaacaagacagtggaggaagtctatgtggagatgctgaagcccagggatggcgtccgcctgaaggtgcagtaccgccctgaggagttcacgaaggccaagggcctgcctggtgacagcttctacatcagggccctgtacgaccggctggcagatgtggagcaagagttgagctttaagaaggacgacatcctctacgtggatgacaccttaccccagggcacgttcgggtcctggatggcttggcagctggacgagaatgcccagaagatccagcgcgggcagattcccagcaaatatgtgatggaccaagaattctccaggaggctcagcatgtctgaagtcaaagatgacaatagcgccacaaagacgctgtcagcggctgcacgccggtccttttttcggaggaaacacaagcacaaacgcagcgggtccaaggacgggaaagacctgctcgccttggatgccttttccagtgactccattccactctttgaaggcaagtggctgagctcattttccaattcggtgagcctggcctatcagcgggtccagaaggtggactgcaccgctctgaggcctgtcctgattctggggcctttgctggacgtggtgaaggagatgctggtgaatgaggctcctggcaagttctgcagatgtccccttgaggtgatgaaggcctcccagcaggccattgagcggggtgtcaaagattgcctgtttgtcgactataagcggagaagcggccatttcgatgtgaccactgtggcgtcaataaaggagatcacagaaaagaaccgacactgcctcctggacattgctccgcacgctattgagcggctccaccacatgcacatctaccccattgtcatcttcatccactacaagagcgccaagcacatcaaggagcagagagaccccatctacctgagggacaaggtgactcagaggcattccaaagagcagtttgaggcggcgcagaagcttgagcaggagtacagcaggtacttcacaggggtcatccagggaggagccctgtcaagcatttgcactcagatcttggcaatggtcaatcaagaacaaaataaagtcctgtggattccagcctgcccgctctaggagaatgctgtgctgtggatgactgcagctggccgcctgaggggacaccagactcagctcttttctagcgactgaaagtagaagtctgtccgtctatgaacatgcgggggaaggatccggaaccaggacccagaagcacctcctttgtagacagagggccacggctgcgtgcgatccaggcccaggcccacacactctgcccgtgtcacacgtgtgctttaacacaaaacagataacactaaagacgggttcagcacccacctttctttagccagctgatcagagatgctgcaaagagaacctttcggatcactcgtttacaagccttttctaagtatttggtggtttatgtttacttgaacggctccatgttgccggtgcccagcccctgtcccctctgtcaaccccctgtcgctttggtgttggtttcgttcccgtcttcagcaaaacgaccttggaacctcaatgggggctgctttgctttgggaggttcttgttggtgggaccagagctttgacaaacctcctgctccttggtggcacctctcctggaaggacgtcacaactccaggtgctcagactgcctgtggcagcagaaccagtgcctttggcattttcctcccacaatggggaaggtgactttggcattcttacaaactcgtctctcggcctttctctcctgccttccacagcctctcgtttctcctccatctgtgcttattacttgaggactgtgtctgctccgtgagagctgcgtgggcagggctgcagtggggtccaggtggtgttcagctgtgctgatgcctgccattgggtcctccttaggctctgtaagtcgtgacagccttcatcagtgcaatgtttgcagggtaattcttaaactttttagagggtggcaggtacatcagttctttttgatatgaaaacattcatgtttcagacattgaattgagagcttttaggggaagcataatggttattgtcactatcaacagtctaaaaagaaaaactgaggtctttttaatcttgattacagcactcacggcatgcaccctactcagtgtgggtgtcttcgtttgggggctttttttttttttgcacttctgaggctagatatgtctggctgaagatttgatgtggttcctccttaagctatgcgtcctgttaataataggtactgtactgggctctgtgtaagtgtcgttggggtaggacctatattttaatactgttcctaacatttcattttactagcgagaaatctttgatttcattttattctttgtaattctagacactagattgtagtttagccataactgatgttttttaaaaagggatatattttcttgcacagttgttcaaaaaagagacaagtttcagtcctcaatgctgtcctttgttttacaggtacaagttttctagctcagacaaactatgaaaaactgtagactattctcaaggtattaactcgcagaccctctgggggtaggggctgttttctaagttacaggcagagtgggactgagatggtacagtgtgcacagacaggtactgagctgacagactgggattttctgtactaaaatgttactttgtatcaaaagttaaacaggctttagtacaacaaataaaggtcaatttctgt

SEQ ID NO: 140 - DNA, 2235 bp, Artificial
  cDNA Sequence
cctaactcaggcccccctcgtctggcaggctccaggcgccctctgcggaggtgttgtgtgtccacctcccctactcctggcagctgctcctgtggtgcctgttatggctgcccaggtggttgggggcacccaggcctgtgagggaggctggtcccagggccttcctcttccaccaccaccaccaccggctgcccagctgccccccattgtgtcccaagggaatgctgggccatggccacaaggggctcatggagagagcagcctggcttcctcccaggccaaggccccgccagatgactcctgtaaccccaggagtgtctatgagaacttccgactctggcagcactacaagcccctggcccggaggcaccttccccagagtcctgacaccgaagcgctttcgtgcttcctcatcccagttctccgatcgctggcccggcggaagcccaccatgaccctggaggagggactgtggcgggccatgcgggaatggcagcacacgagcaactttgaccggatgatcttctacgagatggcggaaaagttcctggagtttgaggctgaggaggagatgcagattcagaaatcgcaatggatgaaggggccccagtgcctgcctcctccagccacaccgaggcttgaacctcgaggacccccggcccctgaggtggtcaagcagccagtgtaccttcccagcaaggccggccccaaggcccagactgcctgcctgccaccacccagaccccagaggccagtgaccaaggcccgccggccaccaccccagccccaccggcgagcagagaccaaggcccgcctgccaccacccaggccccagagaccagcagagaccaaggtccctgaggagatccccccagaagtggtgcaggagtatgtggacatcatggaggagctgctggggccttccctcggggccacgggggagcccgagaaacaacgggaagagggcaaagtgaagcagccacaggaagaggactggacgcccccagacccgggcctcctgagctacattgacaagctgtgttcccagaaagacttcgtcaccaaggtggaggccgtcattcatccccaattcctggaagaattgctttccccagatccacagatggatttcttggccctaagccaggacctggagcaggaggaaggactcacccttgcccagctagtggagaagcgcctcccacccttgaaggagaaacagcattcgagggcagcccctagtcgtggcacagcccggttggactcaagttcttctaagtttgcagctggccaaggagcagagagagacgtccctgacccccaagaaggggttggcatggaaacctgcccaccccagacgactgcccgggactctcagggacgaggcagagcacacactggcatggccaggtccgaagactctgttgtgcttttgggatgtcaggattcccctgggctgagggctgcccggccaacctctcctccccaggaccacagacccacctgccctggcgtgggtaccaaggatgccttggatctccctggagggtctcctgtcagggagtcacatgggctggctcaggggtcaagtgaggaggaggaactccccagcctggccttcctcttgggttcccagcacaagcttctgccctggtggctaccccagagccctgtccctgcctcgggccttctcagcccagaaaagtggggaccccagggaactcatcagtccccatctgctgagagaagaggcctcaacctagcaccttctcctgccaacaaggccaagaagcaacctctctttggaagcctgtcccctgctgaaaagacaccccaccgagggcctgggctcagggtctctggggagcaatccctgacttgggggctgggtggcccctcacagtctcaaaagagaaagggtgaccccttggtctccaggaaggagaagaagcagcattgtagccagtaggggcttctgagcaggctctctggggccaatccccaaggatggggctctggcatccgatgccccaaagcggtcaaaagcttcttctcccccagtgctgatcttgctgggccttagctttggagggtaggggagggaggggagggagagggtggctgaatggggagggcaggaagggagggtctggggggaaggggctggggagtgggggtgggaagcagtgtgttgggggcctcgtgtgtaagtgtgaataaatgtagttgtcttgg

SEQ ID NO: 141 - DNA, 1716 bp, Artificial
  cDNA Sequence
cagctgcccactgcccctccccctctgcagaatgtctggggtcctatgttccaggaacctgtttactttcaaattttctttcagttggactcaggagcatctggtgagccaggtcactctctgggtcttacccttggcttttcttattgcggaaactgccagacggcggtggtcagtgcccagcctgaggggatggcttcgaatggagcatacccagtgctgggaccgggcgtgactgcgaaccctggcacctccctgtctgtgttcacggctctgcccttcaccacacccgctcccggcccagcacacgggccgctccttgtgactgcaggggctcctccaggcggccctctggtgctgtctaccttccccagcacacctctggtgacagaacaggatggctgcggcccgagtggggctggggcttccaacgtctttgtccagatgaggacagaggtggggcctgtgaaggccgctcaggcgcagaccttggtcctaactcaggcccccctcgtctggcaggctccaggcgccctctgcggaggtgttgtgtgtccacctcccctactcctggcagctgctcctgtggtgcctgttatggctgcccaggtggttgggggcacccaggcctgtgagggaggctggtcccagggccttcctcttccaccaccaccaccaccggctgcccagctgccccccattgtgtcccaagggaatgctgggccatggccacaaggggctcatggagagagcagcctggcttcctcccaggccaaggccccgccagatgactcctgtaaccccaggagtgtctatgagaacttccgactctggcagcactacaagcccctggcccggaggcaccttccccagagtcctgacaccgaagcgctttcgtgcttcctcatcccagttctccgatcgctggcccggcggaagcccaccatgaccctggaggagggactgtggcgggccatgcgggaatggcagcacacgagcaactttgaccggatgatcttctacgagatggcggaaaagttcctggagtttgaggctgaggaggagatgcagattcagaaatcgcaatggatgaaggggccccagtgcctgcctcctccagccacaccgaggcttgaacctcgaggacccccggcccctgaggtggtcaagcagccagtgtaccttcccagcaaggccggccccaaggcccagactgcctgcctgccaccacccagaccccagaggccagtgaccaaggcccgccggccaccaccccagccccaccggcgagcagagaccaaggcccgcctgccaccacccaggccccagagaccagcagagaccaaggtccctgaggagatccccccagaagtggtgcaggagtatgtggacatcatggaggagctgctggggccttccctcggggccacgggggagcccgagaaacaacgggaagagggcaaagtgaagcagccacaggaagaggactggacgcccccagacccgggcctcctgagctacattgacaagctgtgttcccagaaagacttcgtcaccaaggtggaggccgtcattcatccccaattcctggaagaattgctttccccagatccacagatggatttcttggccctaagccaggacctggagcaggaggaaggactcacccttgcccagggagccccttcagatgctccagggactgacagatgctga

SEQ ID NO: 142 - DNA, 1025 bp, Artificial
  cDNA Sequence
gggctcctccaggcggccctctggtgctgtctaccttccccagcacacctctggtgacagaacaggatggctgcagcccgagtggggccggggcttccaacgtctttgtccagatgaggacagaggtggggcctgtgaaggccgctcaggcgcagaccttggtcctaactcaggcccccctcgtctggcaggctccaggcgccctctgcggaggtgttgtgtgtccacctcccctactcctggcagctgctcctgtggtgcctgttatggctgcccaggtggttgggggcacccaggcctgtgagggaggctggtcccagggccttcctcttccaccaccaccaccaccggctgcccagctgccccccattgtgtcccaagggaatgctgggccatggccacaaggggctcatggagagagcagcctggcttcctcccaggccaaggccccgccagatgactcctgtaaccccaggagtgtctatgagaacttccgactctggcagcactacaagcccctggcccggaggcaccttccccagagtcctgacaccgaagcgctttcgtgcttcctcatgccccagagaccagcagagaccaaggtccctgaggagatccccccagaagtggtgcaggagtatgtggacatcatggaggagctgctggggccttccctcggggccacgggggagcccgagaaacaacgggaagagggcaaagtgaagcagccacaggaagaggactggacgcccccagacccgggcctcctgagctacattgacaagctgtgttcccagaaagacttcgtcaccaaggtggaggccgtcattcatccccaattcctggaagaattgctttccccagatccacagatggatttcttggccctaagccaggacctggagcaggaggaaggactcacccttgcccagctagtggagaagcgcctcccacccttgaaggagaaacagcattcgagggcagcccctagtcgtggcacagcccggttggactcaagttcttct

SEQ ID NO: 143 - DNA, 3537 bp, Artificial
  cDNA Sequence
atggcaaatggtggcggcggcggcggcggcagcagcggcggcggcggcggcggcggaggcagcagtcttagaatgagtagcaatatccacgcgaaccatctcagcctagacgcgtcctcctcctcctcctcctcctcttcctcttcttcttcttcctcctcctcttcctcctcgtcctcggtccacgagcccaagatggatgcgctcatcatcccggtgaccatggaggtgccgtgcgacagccggggccaacgcatgtggtgggctttcctggcctcctccatggtgactttcttcgggggcctcttcatcatcttgctctggcggacgctcaagtacctgtggaccgtgtgctgccactgcgggggcaagacgaaggaggcccagaagattaacaatggctcaagccaggcggatggcactctcaaaccagtggatgaaaaagaggaggcagtggccgccgaggtcggctggatgacctccgtgaaggactgggcgggggtgatgatatccgcccagacactgactggcagagtcctggttgtcttagtctttgctctcagcatcggtgcacttgtaatatacttcatagattcatcaaacccaatagaatcctgccagaatttctacaaagatttcacattacagatcgacatggctttcaacgtgttcttccttctctacttcggcttgcggtttattgcagccaacgataaattgtggttctggctggaagtgaactctgtagtggatttcttcacggtgccccccgtgtttgtgtctgtgtacttaaacagaagttggcttggtttgagatttttaagagctctgagactgatacagttttcagaaattttgcagtttctgaatattcttaaaacaagtaattccatcaagctggtgaatctgctctccatatttatcagcacgtggctgactgcagccgggttcatccatttggtggagaattcaggggacccatgggaaaatttccaaaacaaccaggctctcacctactgggaatgtgtctatttactcatggtcacaatgtccaccgttggttatggggatgtttatgcaaaaaccacacttgggcgcctcttcatggtcttcttcatcctcgggggactggccatgtttgccagctacgtccctgaaatcatagagttaataggaaaccgcaagaaatacgggggctcctatagtgcggttagtggaagaaagcacattgtggtctgcggacacatcactctggagagtgtttccaacttcctgaaggactttctgcacaaggaccgggatgacgtcaatgtggagatcgtttttcttcacaacatctcccccaacctggagcttgaagctctgttcaaacgacattttactcaggtggaattttatcagggttccgtcctcaatccacatgatcttgcaagagtcaagatagagtcagcagatgcatgcctgatccttgccaacaagtactgcgctgacccggatgcggaggatgcctcgaatatcatgagagtaatctccataaagaactaccatccgaagataagaatcatcactcaaatgctgcagtatcacaacaaggcccatctgctaaacatcccgagctggaattggaaagaaggtgatgacgcaatctgcctcgcagagttgaagttgggcttcatagcccagagctgcctggctcaaggcctctccaccatgcttgccaacctcttctccatgaggtcattcataaagattgaggaagacacatggcagaaatactacttggaaggagtctcaaatgaaatgtacacagaatatctctccagtgccttcgtgggtctgtccttccctactgtttgtgagctgtgttttgtgaagctcaagctcctaatgatagccattgagtacaagtctgccaaccgagagagccgtatattaattaatcctggaaaccatcttaagatccaagaaggtactttaggatttttcatcgcaagtgatgccaaagaagttaaaagggcatttttttactgcaaggcctgtcatgatgacatcacagatcccaaaagaataaaaaaatgtggctgcaaacggcttgaagatgagcagccgtcaacactatcaccaaaaaaaaagcaacggaatggaggcatgcggaactcacccaacacctcgcctaagctgatgaggcatgaccccttgttaattcctggcaatgatcagattgacaacatggactccaatgtgaagaagtacgactctactgggatgtttcactggtgtgcacccaaggagatagagaaagtcatcctgactcgaagtgaagctgccatgaccgtcctgagtggccatgtcgtggtctgcatctttggcgacgtcagctcagccctgatcggcctccggaacctggtgatgccgctccgtgccagcaactttcattaccatgagctcaagcacattgtgtttgtgggctctattgagtacctcaagcgggaatgggagacgcttcataacttccccaaagtgtccatattgcctggtacgccattaagtcgggctgatttaagggctgtcaacatcaacctctgtgacatgtgcgttatcctgtcagccaatcagaataatattgatgatacttcgctgcaggacaaggaatgcatcttggcgtcactcaacatcaaatctatgcagtttgatgacagcatcggagtcttgcaggctaattcccaagggttcacacctccaggaatggatagatcctctccagataacagcccagtgcacgggatgttacgtcaaccatccatcacaactggggtcaacatccccatcatcactgaactagtgaacgatactaatgttcagtttttggaccaagacgatgatgatgaccctgatacagaactgtacctcacgcagccctttgcctgtgggacagcatttgccgtcagtgtcctggactcactcatgagcgcgacgtacttcaatgacaatatcctcaccctgatacggaccctggtgaccggaggagccacgccggagctggaggctctgattgctgaggaaaacgcccttagaggtggctacagcaccccgcagacactggccaatagggaccgctgccgcgtggcccagttagctctgctcgatgggccatttgcggacttaggggatggtggttgttatggtgatctgttctgcaaagctctgaaaacatataatatgctttgttttggaatttaccggctgagagatgctcacctcagcacccccagtcagtgcacaaagaggtatgtcatcaccaacccgccctatgagtttgagctcgtgccgacggacctgatcttctgcttaatgcagtttgaccacaatgccggccagtcccgggccagcctgtcccattcctcccactcgtcgcagtcctccagcaagaagagctcctctgttcactccatcccatccacagcaaaccgacagaaccggcccaagtccagggagtcccgggacaaacagaagtacgtgcaggaagagcggctttga

SEQ ID NO: 144 - DNA, 2394 bp, Artificial
  cDNA Sequence
gcggagggggtggaggtttgtctccgctgtttcatctctatggctgtcagaggtgggcggctttgaccgagaggctgctggagctcgtgtttggacgcgatgtttcgtctgaactcactttctgctttggcagaactggctgtgggttctcgatggtaccatggaggatcacagcccatccagatccggcgaagactaatgatggtggctttcctgggagcatctgcagtaactgcaagtactggtcttttgtggaagagggcccatgcagaatctccaccatgtgtagacaacctaaaaagtgacatcggtgataaagggaagaataaagatgaaggggatgtttgtaaccatgagaaaaagactgcagatcttgcccctcacccagaagagaaaaagaagaaacgttctggattcagagacagaaaagtgatggaatatgagaataggattcgagcctactccacgccagacaaaatcttccgatattttgccaccttgaaagtcatcagtgagcctggtgaagcagaagtgtttatgacaccagaagattttgtgcgatccataacacccaatgaaaaacaaccagaacacttgggtctggatcaatatataataaaacgctttgatggaaagaaaatttcccaggaacgagaaaaatttgctgatgaaggcagtatattttacacccttggagaatgtgggctcatatccttttcagactacattttcctcacaactgttctttccactcctcagagaaattttgaaattgccttcaagatgtttgatttgaatggagatggagaagtagatatggaagaatttgaacaggcaagttgtcctggagacatcattcgctcccaaaccagtatgggtatgcgccacagagatcgtccaactactggcaacaccctcaagtctggcttgtgttcagccctcacaacctacttttttggagctgatctgaagggaaagctgacaatcaaaaacttcctcgaatttcagcgtaaactgcagcatgatgttctgaagcttgagtttgaacgccatgaccctgtggatgggagaattactgagaggcagtttggtggcatgctacttgcctacagtggggtgcagtccaagaagctgaccgccatgcagaggcagctcaagaagcacttcaaagaaggaaagggtctgacatttcaggaggtggagaacttctttactttcctaaagaacattaatgatgtggacactgcattgagtttttaccatatggctggagcatctcttgataaagtgaccatgcagcaggtggccaggacagtggctaaagtggagctctcagaccacgtgtgtgatgtggtgtttgcactctttgactgtgatggcaatggcgaactgagcaataaggaatttgtttccatcatgaagcaacggctgatgagaggcctggaaaagcccaaagacatgggtttcactcgcctcatgcaggccatgtggaaatgtgcacaggaaactgcctgggacttcgctttacccaaacagtaaccccacactgcaagaggggacccctccacccccagtaccctggaccccctccgcagagtctcggcagagccctttgtgctgctgcttctggaagtagtcccccttcctcccgggatgacctcaggactctgtcggtttcccctctttacccttccccgtccccgtgttctgctgggctctgattctgcccaatgagtatccccataggttctcaaaaacatgaacaagtctgtaaagctcagacatttgtcagcctcaacagcaccacccattcaagcatcctgtggataaagaattcagggaaccatccacacacctgccaaccctgggaagcatccagttctcaaatcgtttttgctatggatttatactaacaagaacattccttgacttccctcctgctggtgttttaaagccacaagtagggaagatatctggcaggcagaaagaagtctgtgatgataaacaatgatgaggatgacctaggcaccctacgctagtgtgagaagcctgcgccccaggaaggatctgtgttagtccctgggatggctccaaggcctgctctaggaaggcagcatgctcagtgggaacacagcaagattcagaatttaaagtagttgcttcatggctctgtgcactcccttttcttcctcgcagcctccctaagatgactccagtgtgaccctgtgcttagtgagcaatagtgattgagctcatgttccctgcaagtgccatttcctctccaggatgggcctctaaagctgaggcctggctcagagcctgtttgccctctgtcttaaacaattgtaaatatcacttaaattataaccatttgcaataaacatccccaaagtt

SEQ ID NO: 145 - DNA, 2116 bp, Artificial
  cDNA Sequence
ggagaccgggttgggctgtgacgctgctgctggggtcagaatgtcatacccaggctatcccccaacaggctacccacctttccctggatatcctcctgcaggtcaggagtcatcttttcccccttctggtcagtatccttatcctagtggctttcctccaatgggaggaggtgcctacccacaagtgccaagtagtggctacccaggagctggaggctaccctgcgcctggaggttatccagcccctggaggctatcctggtgccccacagccagggggagctccatcctatcccggagttcctccaggccaaggatttggagtcccaccaggtggagcaggcttttctgggtatccacagccaccttcacagtcttatggaggtggtccagcacaggttccactacctggtggctttcctggaggacagatgccttctcagtatcctggaggacaacctacttaccctagtcagatcaatacagattctttttcttcctatcctgttttctctcctgtttctttggattatagcagtgaacctgccacagtgactcaggtcactcaaggaactatccgaccagctgccaacttcgatgctataagagatgcagaaattcttcgtaaggcaatgaagggttttgggacagatgagcaggcaattgtggatgtggtggccaaccgttccaatgatcagaggcaaaaaattaaagcagcatttaagacctcctatggcaaggatttaatcaaagatctcaaatcagagttaagtggaaatatggaagaactgatcctggccctcttcatgcctcctacgtattacgatgcctggagcttacggaaagcaatgcagggagcaggaactcaggaacgtgtattgattgagattttgtgcacaagaacaaatcaggaaatccgagaaattgtcagatgttatcagtcagaatttggacgagaccttgaaaaggacattaggtcagatacatcaggacattttgaacgtttacttgtgtccatgtgccagggaaatcgtgatgagaaccagagtataaaccaccaaatggctcaggaagatgctcagcgtctctatcaagctggtgaggggagactagggaccgatgaatcttgctttaacatgatccttgccacaagaagctttcctcagctgagagctaccatggaggcttattctaggatggctaatcgagacttgttaagcagtgtgagccgtgagttttccggatatgtagaaagtggtttgaagaccatcttgcagtgtgccctgaaccgccctgccttctttgctgagaggctctactatgctatgaaaggtgctggcacagatgactccaccctggtccggattgtggtcactcgaagtgagattgaccttgtacaaataaaacagatgttcgctcagatgtatcagaagactctgggcacaatgattgcaggtgacacgagtggagattaccgaagacttcttctggctattgtgggccagtaggagggatttttttttttttaatgaaaaaaaatttctattcatagcttatccttcagagcaatgacctgcatgcagcaatatcaaacatcagctaaccgaaagagctttctgtcaaggaccgtatcagggtaatgtgcttggtttgcacatgttgttattgccttaattctaattttattttgttctctacatacaatcaatgtaaagccatatcacaatgatacagtaatattgcaatgtttgtaaaccttcattcttactagtttcattctaatcaagatgtcaaattgaataaaaatcacagcaatctctgattctgtgtaataatattgaataattttttagaaggttactgaaagctctgccttccggaatccctctaagtctgcttgatagagtggatagtgtgttaaaactgtgtactttaaaaaaaaattcaacctttacatctagaataatttgcatctcattttgcctaaattggttctgtattcataaacactttccacatagaaaatagattagtattacctgtggcaccttttaagaaagggtcaaatgtttatatgcttaagatacatagcctacttttttttcgcagttgttttc

SEQ ID NO: 146 - DNA, 2050 bp, Artificial
  cDNA Sequence
ggagaccgggttgggctgtgacgctgctgctggggtcagaatgtcatacccaggctatcccccaacaggctacccacctttccctggatatcctcctgcaggtcaggagtcatcttttcccccttctggtcagtatccttatcctagtggctttcctccaatgggaggaggtgcctacccacaagtgccaagtagtggctacccaggagctggaggctaccctgcgcctggaggttatccagcccctggaggctatcctggtgccccacagccagggggagctccatcctatcccggagttcctccaggccaaggatttggagtcccaccaggtggagcaggcttttctgggtatccacagccaccttcacagtcttatggaggtggtccagcacaggttccactacctggtggctttcctggaggacagatgccttctcagtatcctggaggacaacctacttaccctagtcagcctgccacagtgactcaggtcactcaaggaactatccgaccagctgccaacttcgatgctataagagatgcagaaattcttcgtaaggcaatgaagggttttgggacagatgagcaggcaattgtggatgtggtggccaaccgttccaatgatcagaggcaaaaaattaaagcagcatttaagacctcctatggcaaggatttaatcaaagatctcaaatcagagttaagtggaaatatggaagaactgatcctggccctcttcatgcctcctacgtattacgatgcctggagcttacggaaagcaatgcagggagcaggaactcaggaacgtgtattgattgagattttgtgcacaagaacaaatcaggaaatccgagaaattgtcagatgttatcagtcagaatttggacgagaccttgaaaaggacattaggtcagatacatcaggacattttgaacgtttacttgtgtccatgtgccagggaaatcgtgatgagaaccagagtataaaccaccaaatggctcaggaagatgctcagcgtctctatcaagctggtgaggggagactagggaccgatgaatcttgctttaacatgatccttgccacaagaagctttcctcagctgagagctaccatggaggcttattctaggatggctaatcgagacttgttaagcagtgtgagccgtgagttttccggatatgtagaaagtggtttgaagaccatcttgcagtgtgccctgaaccgccctgccttctttgctgagaggctctactatgctatgaaaggtgctggcacagatgactccaccctggtccggattgtggtcactcgaagtgagattgaccttgtacaaataaaacagatgttcgctcagatgtatcagaagactctgggcacaatgattgcaggtgacacgagtggagattaccgaagacttcttctggctattgtgggccagtaggagggatttttttttttttaatgaaaaaaaatttctattcatagcttatccttcagagcaatgacctgcatgcagcaatatcaaacatcagctaaccgaaagagctttctgtcaaggaccgtatcagggtaatgtgcttggtttgcacatgttgttattgccttaattctaattttattttgttctctacatacaatcaatgtaaagccatatcacaatgatacagtaatattgcaatgtttgtaaaccttcattcttactagtttcattctaatcaagatgtcaaattgaataaaaatcacagcaatctctgattctgtgtaataatattgaataattttttagaaggttactgaaagctctgccttccggaatccctctaagtctgcttgatagagtggatagtgtgttaaaactgtgtactttaaaaaaaaattcaacctttacatctagaataatttgcatctcattttgcctaaattggttctgtattcataaacactttccacatagaaaatagattagtattacctgtggcaccttttaagaaagggtcaaatgtttatatgcttaagatacatagcctacttttttttcgcagttgttttc

SEQ ID NO: 147 - DNA, 3114 bp, Artificial
  cDNA Sequence
attgaaccctctgcattccacaggcaaggtttacctaaagcaccagggtggactgagaagaattctcatcatagttgggagccattggatgccccagagggtaagctgcaaggctctaggtgtgacaacagcagttgcagcaagctccctccacaagaaggaagaggcattgctcaagaacagctgttccaagaaaagaaggatcctgctaacccctccccggtgatgcctggaatagccacctctgagaggggtgatgaacacagcctaggctgtagtccttcaaattcatcagctcagcccagccttcccctgtatagaacctgccaccccataatgcctgttgcttcttcatttgtgcttcactgtcctgatcctgtgcagaaaactaaccaatgcctccaaggccaaagcctcaaaacttcattgactttaaaagtggacagaggcagtgaggagacctataggccagagtttcccagcacaaaggggcttgtccgttctctggctgagcagttccagaggatgcagggtgtctccatgagggatagtacaggtttcaaggatagaagtttgtcaggtagtctaaggaagaactcttccccttctgattctaagcctcctttctcacagggtcaagagaaaggccactggccatgggcaaagcaacaatcctctctggagggtggggatagaccactttcctgggaagagtccactgaacattcttctcttgccttaaactctgggctgcctaatggtgaaacttctagcggaggacagcccaggttggcagagccagacatataccaagagaagctgtcccaagtgagagatgttaggtctaaggatctgggcagcagtactgacttggggacttccttgcctttggattcctgggtgaatatcacaaggttctgtgattctcagcttaagcatggggcacctaggccaggaatgaagtcctcccctcatgattcccatacgtgtgtaacctatccagagagaaatcacatccttttgcatccacattggaaccaagacacagagcaggagacctcagaattggagtctctgtatcaggccagtcttcaggcttctcaagctggctgttctggatgggggcagcaggataccgcctggcacccacttagccaaacaggctctgcagatggcatggggaggaggttgcactcagcccatgatcctggtctctcaaagacttcaacagcagaaatggagcatggtctccatgaagccagaacagtgcgtacttctcaggattcatcaaacgtgaggaagcctttggaaaccgggcaccgttgttccagctcctcttccctccctgtcatccatgacccttctgtgtttctcctcggtccccaactctaccttccccaaccacagttcctgtccccagatgtcctgatgcccaccatggcaggggagcccaatagactcccaggaacttcaaggagtgtccagcagtttctggctatgtgtgacaggggtgaaacttcccaaggggccaagtacacaggaaggactttgaactaccagagcctcccccatcgctccagaacagacaactcctgggcaccctggtcagagaccaaccagcatattgggaccagattcctgactactccagggtgcaatcctcaactaacctacactgccacactaccagaaagaagcaagggccttcaggttcctcacactcagtcctggagtgatcttttccattcaccctcccaccctcccattgttcatcctgtgtacccaccatctagcagtcttcatgtacccctgaggtcagcttggaattcagatcctgttccagggtcccgaacccctggtcctcgaagagtagatatgcccccagatgatgactggaggcaaagcagttatgcctcccactctggacacaggagaacagtgggagaggggtttctgtttgttctatcagatgctcccagaagagagcagatcagggctagagtcctgcagcacagtcaatggtaaaggttattcctttcctttcctggagctacacctttctttgtaaaactgtactgtgggccgggcgcggtggctcacacctgtaatcccagcactttgggaggctgaggcgggtggatcacgaggtcaggagattgagaccatcctggccaacatggtgaaaccccgtctctaccaaaatacaaaaaattagccaggcgtgacggtgcgtgcctgtagtcccaactactcggaaggctgaggcaggagaattgcttgaacccgggaggcagaggttgcagtgagccgagatcgcaccactgcactccagcttggcaatagagtgagactccatctcaaaaaacaaaacaaaacaacaacaaaataaactactgtggcagcgttggtaccctgcatcactgccatggttgtgctattctcatctcaacatagaattggtgggttctcctaagggtgtcaggaacctctaaaaagatgtgattctttgggaggggatatttgaaattccaacttccattccccctagcaaaaggaagcagctgctgtttaagggttttatctgagccactttaaagatgaatccatggtattactctggatactagccattccttaggattttaaggtcacattttattcctggatgctttatgtccccacctccacctgagccctcatcctctgttccctactatactcccaacttctactctttgttttatccacctatccctattacctgaccctttgtcttccctgtctcccatccttggggggacatgtagccctgtggtcatggttctgatgacatcatcagggcagcccccctgcccaggtattatggcctgtcagcattccctgtgccctccaaaccttaggcctagaatgcggagctgccaacataacattcacccttttgaacagatggagtcaggcacactaacacagccttctgtcctcaataacacagccattattgccacttgctcagtcgtcaatgtaaaccctcagagtcagctgaactattttaggccaaacatactgtttttgtaaagtatttttcattaataaatctataagacagttctattt

SEQ ID NO: 148 - DNA, 3696 bp, Artificial
  cDNA Sequence
agctcagcgtctcgctccctgctcccggccccagagggttatcgcgagtcttggaataaacttgctcgtgcgatggccaaaaagaccaaagaaaacagagggacttttcccagttggtgatatggagcaagtgccatcagcaggcagactcgtgcagatcaccgtgacagagggatatgatttgaaaggttttaaaggagatactccagttacctttattcgagcagaattcaatcaagtggttctgggagactctgcaaaaattactgtttctccagaaggaagtgcaaaatacaacttcactagcagttttgagtttaatcctgaaggaggaatcacttcagatgacctcgctcacaaacctgtgttcttaactgtgactgaagttttaccaaaggaaaagaaacagaaagaagagaagaccttaattcttggtcaggctgtggtggaccttcttcccttactggaaggacagagttcatttcaaacaacagttccattgcaccctgtgcaaggctcacccttagaaactcctagatcaagtgctaagcagtgcagtcttgaagttaaagtattagtggcagagcctttactgaccacagcccagatctcagggggcaatctactgaaggtcacgttggaggctgcttactctgtgcctgaatccttcattccaacaggtcctgggcagaactacatggtcggtctgcaagttccatcacttggagagaaggactatcccattttatttaagaatggaactctgaagcttggaggggaaagggaacctgttccccggcccaaaaagtggccaattgccaacattctggctccaggagctaataacattcctgatgcattcattgttggtggtccctatgaagaagaagaaggagaactcaaccatcctgaggacagcgaatttaggaatcaagcagagtgcataaagaaaaggattatttgggacttggaaagtcgctgctaccttgatccttctgcagtggtcagttttcagaagcgaattgccgattgccggctttggcctgtagagatcacaagagttcctctggtcactatacccaaagggaaagctggcaaaactgaaaagactgatgaagaagctcagctttcgtttcatggtgtggcttatgttaatatggtcccattgttgtatccaggtgtgaagagaattcggggagcttttcatgtttacccttacctagacagtgtagtccatgaaaagaccaaatgtttattgagcttgttccgggatattggccatcacttgattcataataataaaataggaggaattaattctctgctgtccaaacaagctgtttctaagaatctgaaagaagataaaccagtgaaagaaaaggatatagatggaaggcctaggcctggggatgtgcaggcacctagtataaaatctcagagctcagatactcctttggaaggtgaaccccctctaagtcacaatcctgaaggacagcaatatgtagaagcagggacatacattgtgttggaaattcagctggacaaagccttggttccaaagcgaatgccagaggagctagccagaagggtcaaggaaatgattcctccaaggcctcctcttacccgtcggacaggaggagctcagaaggcaatgagtgactaccacatacagatcaagaatatttctagagccattctagatgaatactacagaatgtttggaaaacaggtggccaaactggagagtgatatggatagtgaaaccttggaggagcagaagtgccagctcagctatgaacttaattgctctggaaaatactttgctttcaaagaacaactcaagcatgctgtggtaaagattgtgagagataaatacttgaagacaacatcatttgaaagccaggaggaacttcagacatttatcagtgagctctatgtgttcttagtagatcagatgcatgtagccctaaaccagaccatgccagatgatgtccaaggcactgttgcaaccatttatacaagcagtgaacagcttcaactctttgcatttgaagcagaagtcaatgagaactttgagatggcagcagcatattataaagagagattggtccgtgagccccagaatctggatcactggttggactatggtgccttctgcctcctaactgaagacaacatcaaagcacaagagtgttttcagaaagccctttccctcaaccagagtcatatccacagcttgttgctgtgtggtgtcctggctgtcctgttggagaactatgagcaagcagaaattttctttgaggatgctacttgcttggaaccaactaatgttgtagcctggactttacttggtttgtactatgaaattcaaaacaatgatattcgaatggaaatggcatttcatgaggcctccaaacagcttcaggcacggatgcttcaggcacaagtaacaaagcaaaagagcactggtgtagaagacactgaggaaagagggaagagagaatctagtttaggcccttggggaatcacaaatggttctgcaacagcaatcaaggtggaagccccagcaggaccaggagctgcattatctattctagacaaatttcttgaagaatcctccaaactgcagtctgattcacaagaacccattttgactacacaaacttgggatccaagtataagccaaaaaccatctaacacatttatcaaggagataccaacaaagaaagaagcatcaaaatgtcaagattcatcagctcttctgcatcccggccttcattatggtgtttctcaaactaccaccatcttcatggagaccatacatttcttgatgaaagtcaaggctgtgcagtatgtgcacagagtgcttgcacatgagctgttatgccctcaaggaggccccagctgtgaatattacttggtgctggcccaaacacacattcttaagaagaactttgccaaggcagaggaataccttcaacaagcagcccagatggactacctgaaccccaatgtctggggcctgaagggccatctctattttctgagtggaaatcattctgaggccaaggcatgctatgaacgaaccattagctttgtagtggatgcttctgagatgcacttcatcttcctgagactggggctcatctatctggaagagaaagagtatgaaaaggcaaagaaaacctatatgcaagcctgtaagagatcaccttcatgccttacctggctaggactgggaatcgcctgctatcggctggaggagctcacagaggctgaggatgctctttctgaagccaatgcattgaacaactacaatgctgaagtatgggcatatctggctctggtctgcctgaaagttggacggcaattagaagctgagcaggcctacaagtacatgatcaagctgaaattgaaagatgaggctctgcttgcagagatccacacactacaggaaacagttggctttggaaatccatctttctgatacccctccagctgaacaattttctgcatgggactctgagttcctttccttcccagagagttttaccgtatgaagcctggagctggagaacgaaagaatcttcactataaacagagacccattcatttatttccattggctgtgttactggatgttttactggttgacgagaaactgggtcacaataaaaaaatggagatatgaaactc

SEQ ID NO: 149 - DNA, 1706 bp, Artificial
  cDNA Sequence
caggaggaacttcagacatttatcagtgagctctatgtgttcttagtagatcagatgcatgtagcccttgacaagaccatgccagatgatgtccaaggcactgttgcaaccatttatacaagcagtgaacagcttcaactctttgcatttgaagcagaagtcaatgagaactttgagatggcagcagcatattataaagagagattggtccgtgagccccagaatctggatcactggttggactatggtgccttctgcctcctaactgaagacaacatcaaagcacaagagtgttttcagaaagccctttccctcaaccagagtcatatccacagcttgttgctgtgtggtgtcctggctgtcctgttggagaactatgagcaagcagaaattttctttgaggatgctacttgcttggaaccaactaatgttgtagcctggactttacttggtttgtactatgaaattcaaaacaatgatattcgaatggaaatggcatttcatgaggcctccaaacagcttcaggcacggatgcttcaggcacaagtaacaaagcaaaagagcactggtgtagaagacactgaggaaagagggaagagagaatctagtttaggcccttggggaatcacaaatggttctgcaacagcaatcaaggtggaagccccagcaggaccaggagctgcattatctattctagacaaatttcttgaagaatcctccaaactgcagtctgattcacaagaacccattttgactacacaaacttgggatccaagtataagccaaaaaccatctaacacatttatcaaggagataccaacaaagaaagaagcatcaaaatgtcaagattcatcagctcttctgcatcccggccttcattatggtgtttctcaaactaccaccatcttcatggagaccatacatttcttgatgaaagtcaaggctgtgcagtatgtgcacagagtgcttgcacatgagctgttatgccctcaaggaggccccagctgtgaatattacttggtgctggcccaaacacacattcttaagaagaactttgccaaggcagaggaataccttcaacaagcagcccagatggactacctgaaccccaatgtctggggcctgaagggccatctctattttctgagtggaaatcattctgaggccaaggcatgctatgaacgaaccattagctttgtagtggatgcttctgagatgcacttcatcttcctgagactggggctcatctatctggaagagaaagagctggaggagctcacagaggctgaggatgctctttctgaagccaatgcattgaacaactacaatgctgaagtatgggcatatctggctctggtctgcctgaaagttggacggcaattagaagctgagcaggcctacaagtacatgatcaagctgaaattgaaagatgaggctctgcttgcagagatccacacactacaggaaacagttggctttggaaatccatctttctgatacccctccagctgaacaattttctgcatgggactctgagttcctttccttcccagagagttttaccgtatgaagcctggagctggagaacgaaagaatcttcactataaacagagacccattcatttatttccattggctgtgttactggatgttttactggttgacgagaaactgggtcacaataaaaaaatggagatatgaaactc

SEQ ID NO: 150 - DNA, 3056 bp, Artificial
  cDNA Sequence
ttggctctggtagccgccgcccccgcccccaaccccgcccggcccagagcctagccgagccccgggcccagcatggccgccccggagccggcccgggctgcaccgcccccacccccgcccccgccgccccctcccggggctgaccgcgtcgtcaaagctgtccctttccccccaacacatcgcttgacatctgaagaagtatttgatttggatgggatacccagggttgatgttctgaagaaccacttggtgaaagaaggtcgagtagatgaagaaattgcgcttagaattatcaatgagggtgctgccatccttcggagagagaaaaccatgatagaagtagaagctccaatcacagtgtgtggtgacatccatggccaattttttgatctgatgaaactttttgaagtaggaggatcacctgctaatacacgatacctttttcttggcgattatgtggacagaggttattttagtatagagtgtgtcttatatttatgggttctgaagattctatacccaagcacattatttcttctgagaggcaaccatgaatgcagacaccttactgaatattttacctttaagcaggaatgtaaaattaagtattcggaaagagtctatgaagcttgtatggaagcttttgatagtttgcctcttgctgcacttttaaaccaacagtttctttgtgttcatggtggactttcaccagaaatacacacactggatgatattaggagattagatagattcaaagagccacctgcatttggaccaatgtgtgacttgttatggtccgatccttctgaagattttggaaatgaaaaatcacaggaacattttagtcacaatacagttcgaggatgttcttatttttataactatccagcagtgtgtgaatttttgcaaaacaataatttgttatcgattattagagctcatgaagctcaagatgcaggctatagaatgtacagaaaaagtcaaactacagggttcccttcattaataacaattttttcggcacctaattacttagatgtctacaataataaagctgctgtattaaagtatgaaaataatgtgatgaatattcgacagtttaactgttctccacatccttactggttgcctaattttatggatgtcttcacgtggtctttaccgtttgttggagaaaaagtgacagaaatgttggtaaatgttctgagtatttgctctgatgatgaactaatgactgaaggtgaagaccagtttgatgtaggttcagctgcagcccggaaagaaatcataagaaacaaaattcgagcaattggcaagatggcaagagtcttctctgttctcagggaggagagtgaaagtgtgctgacactcaagggcctgactcccacagggatgttgcctagtggagtgttagctggaggacggcagaccctgcaaagtgcaatacgaggattctctccaccacatagaatctgcagttttgaagaggcaaagggtttggataggatcaatgagagaatgccacctcggaaagatgctgtacagcaagatggtttcaattctctgaacaccgcacatgccactgagaaccacgggacgggcaaccatactgcccagtgacccactacttcccagggactctcacatctcgggccccaaatggacagatcacccgaggagctggaggggtcggccaagctgactgtaaatttcacagtctctctgaagaaaccattgtgcttctgagaccctagcccccttcctggatggaggcttgagggccctgggacatgtgctatctgataagattgggtcatcgctgccaaggtggagagcagtgagcaaggggcttggggcaatttccagtggagggcatccacacctccattttatgcttgtggttcacacatttaagtttacaaatcagatttcttttccccttcagtagaattagattttgtttttcaatcatgatttcaaatgcaatcctaagagctaatgtggacttttctttttccatgaaatgtctttaaaggatgaattagcatggtcttaaaatacatttctgaggttactagctgtattttgaattgtgagcaaaatgccgagaaacccagttggcatttatacaaaatgttgacctcaggtctatagttcttaaatgtggctaattctgtaacatagtcttggtattttttaattatgaatgcatatcctatttccaggcaggctctcttacttgaacacaaatccaaaaactaatttagagtcttttttgcccagatcttttaagacttacaccccagagatttaagaagaaaacctctaaatttcaaaattatgaagaattacagaattactcatttaaggtactttaaaagaagtttgtacattgtcaaagtaaattttaattcaaatcatgtctgtaaaacttgacgtattttgtgtatgcatgttttcattttgcaaatatttaatatatagacctatgatgtacaggtacgacatgtataggttacctagatgttatgagaaattttagtttattgtgagtactcaagttgcttagagagccaccagggtgatttgctgctggctttctatcatttttatgttttaatgcaaaggaaattttaaaatgttctggaagtgtttttgattaagcaatgcagcctagaagcaatggttctgttcaatcattcagatgttagtggaagcataaaagtcaagactgcatgttgaaacctttcttttgatagttactgaactgcttggttaaactaaatggaaccatgtgctaatttttcacaattattgacctgtattgattgccactgtagtttggtatttccctttactttggtggcctgcttccctcatgccctggaatacaactcagagctccaggcagcggaaccatctattgttttgtttgccagaaagtgcaccctgtatggtctcctgtctaagttggaaatattatgcatgtgcaggactattcgagtattttataaacagtagcacacaataaattccatgcatgggccgctgctcct

SEQ ID NO: 151 - DNA, 3123 bp, Artificial
  cDNA Sequence
gggaaagagggtccgccatgttccccggcggcgccgccgcttggctctggtagccgccgcccccgcccccaaccccgcccggcccagagcctagccgagccccgggcccagcatggccgccccggagccggcccgggctgcaccgcccccacccccgcccccgccgccccctcccggggctgaccgcgtcgtcaaagctgtccctttccccccaacacatcgcttgacatctgaagaagtatttgatttggatgggatacccagggttgatgttctgaagaaccacttggtgaaagaaggtcgagtagatgaagaaattgcgcttagaattatcaatgagggtgctgccatccttcggagagagaaaaccatgatagaagtagaagctccaatcacagtgtgtggtgacatccatggccaattttttgatctgatgaaactttttgaagtaggaggatcacctgctaatacacgatacctttttcttggcgattatgtggacagaggttattttagtatagagtgtgtcttatatttatgggttctgaagattctatacccaagcacattatttcttctgagaggcaaccatgaatgcagacaccttactgaatattttacctttaagcaggaatgtaaaattaagtattcggaaagagtctatgaagcttgtatggaagcttttgatagtttgcctcttgctgcacttttaaaccaacagtttctttgtgttcatggtggactttcaccagaaatacacacactggatgatattaggagattagatagattcaaagagccacctgcatttggaccaatgtgtgacttgttatggtccgatccttctgaagattttggaaatgaaaaatcacaggaacattttagtcacaatacagttcgaggatgttcttatttttataactatccagcagtgtgtgaatttttgcaaaacaataatttgttatcgattattagagctcatgaagctcaagatgcaggctatagaatgtacagaaaaagtcaaactacagggttcccttcattaataacaattttttcggcacctaattacttagatgtctacaataataaagctgctgtattaaagtatgaaaataatgtgatgaatattcgacagtttaactgttctccacatccttactggttgcctaattttatggatgtcttcacgtggtctttaccgtttgttggagaaaaagtgacagaaatgttggtaaatgttctgagtatttgctctgatgatgaactaatgactgaaggtgaagaccagtttgatggttcagctgcagcccggaaagaaatcataagaaacaaaattcgagcaattggcaagatggcaagagtcttctctgttctcagggaggagagtgaaagtgtgctgacactcaagggcctgactcccacagggatgttgcctagtggagtgttagctggaggacggcagaccctgcaaagtgccacagttgaggctattgaggctgaaaaagcaatacgaggattctctccaccacatagaatctgcagttttgaagaggcaaagggtttggataggatcaatgagagaatgccacctcggaaagatgctgtacagcaagatggtttcaattctctgaacaccgcacatgccactgagaaccacgggacgggcaaccatactgcccagtgacccactacttcccagggactctcacatctcgggccccaaatggacagatcacccgaggagctggaggggtcggccaagctgactgtaaatttcacagtctctctgaagaaaccattgtgcttctgagaccctagcccccttcctggatggaggcttgagggccctgggacatgtgctatctgataagattgggtcatcgctgccaaggtggagagcagtgagcaaggggcttggggcaatttccagtggagggcatccacacctccattttatgcttgtggttcacacatttaagtttacaaatcagatttcttttccccttcagtagaattagattttgtttttcaatcatgatttcaaatgcaatcctaagagctaatgtggacttttctttttccatgaaatgtctttaaaggatgaattagcatggtcttaaaatacatttctgaggttactagctgtattttgaattgtgagcaaaatgccgagaaacccagttggcatttatacaaaatgttgacctcaggtctatagttcttaaatgtggctaattctgtaacatagtcttggtattttttaattatgaatgcatatcctatttccaggcaggctctcttacttgaacacaaatccaaaaactaatttagagtcttttttgcccagatcttttaagacttacaccccagagatttaagaagaaaacctctaaatttcaaaattatgaagaattacagaattactcatttaaggtactttaaaagaagtttgtacattgtcaaagtaaattttaattcaaatcatgtctgtaaaacttgacgtattttgtgtatgcatgttttcattttgcaaatatttaatatatagacctatgatgtacaggtacgacatgtataggttacctagatgttatgagaaattttagtttattgtgagtactcaagttgcttagagagccaccagggtgatttgctgctggctttctatcatttttatgttttaatgcaaaggaaattttaaaatgttctggaagtgtttttgattaagcaatgcagcctagaagcaatggttctgttcaatcattcagatgttagtggaagcataaaagtcaagactgcatgttgaaacctttcttttgatagttactgaactgcttggttaaactaaatggaaccatgtgctaatttttcacaattattgacctgtattgattgccactgtagtttggtatttccctttactttggtggcctgcttccctcatgccctggaatacaactcagagctccaggcagcggaaccatctattgttttgtttgccagaaagtgcaccctgtatggtctcctgtctaagttggaaatattatgcatgtgcaggactattcgagtattttataaacagtagcacacaataaattccatgcatgggccgctgctcct

SEQ ID NO: 152 - DNA, 2192 bp, Artificial
  cDNA Sequence
ctgcggtgcagtccttggtctttctggcaagtgaggcgctctccccctaaatgtctcagagggagacaaatcagcggactaccttgcttcctttgatgacttggaaaggatctgcagtcccccttaaagcccaagaatgtcttctcttccacgacagccgtttgtggacacatactgcttacctccctgactgcaggacaaggtccttcaaagctggaactctgactgcgctcagtgatcccgcagtgctcctctgtagagtgggaacccaggtccatttcaaatatctacgttggaatgagtggatctcgctgggggtgagaggcactttgtctacccacactgccagtcccagccacatgcctcctcccttccctcaaaaagcagtgttcttagtctgcttcttcaaggggagaagtcgtttttatttatggaaacgaactcactatatggtagaaagaacaagagtatcagaatttgcactttggacttggactcccctctaagcagctgcacaaggtggaacaaaccaataatccttgctgatctgttttgtccttaggaaaaatggtggagggagaatattagatcaggggttcttagccttggcttcatgaataagctcaaggatgtcaatgaagcttttgacatgatctcaacttttttgtgaacatttatatatttttctggaatggggtccatagagttacaagttctttaagacctccagatggaccccaatatggcagaaatgaactatttaaagatacctgcctgctcccgtagtctgaccctctatggctaagcaaggttttagaggagtggaaggctggccattgcacagtatcagggttccagacaggctccctggctcttccctcccagtcctgctcctgagatatagttctttctggccgccacttcccttagggcaaccccagagcttaaatcatctgcaaggcagtcacctttcaggcacctttcatccggcacctgtgttcttagctggattaactagaaagctagttggaggaaggaaggtgaaagtggaggaaggggaaaagaggaaaagttggagacgaatctggcttatggttagaagcatattttttggccaggcaaagtggctcacgcctgtaatcccagcactttgggaggctgaggtaggcggattgcctgagctcaggagttggagaccagcctggccaacgtggtaaaaccccgtctctaacaaaaatacaaaaatttagccaggcatgatggtgcaagcctgtaatcccagctgttcaggaggctgaggcatgagaattgcttgaacccaggaggtggaggttgcagtgagctgaaattgcaccactgcactccaggctgggtgaccgagcaagactctgtctcaaaaaaaagaaaaaaaaacttattttttgagacagagtctcactctgtcgcccaggctggattgcagtggggcaaacacagttcactgcagcctcaatttcttgggctcaagcaactatcctgcctcagcctcccgaggagtagctgggatcataggtgcttgccaccacacctggctaattttttaaatattttgtagacacagggtcttgccacattgcccaggctggtcttgaactcctgggctcaagttatcctcccgcctcggtctcccaaagttctggaattacagatgttagttaccacccggaccaattttaggattcctttagccagtgaccttggtgtgaccttgtacttctgcagcattttataccttctgcggcacacccttgtagtgggtcgaattgtgttcccccaaaagatatgttctagtcctaattcccagtacctgtgaatgtgacttatttagaaatagggtctttgcagatgtaatctagttcaaatgaggtcatactggattagggcgggtcctcatccaataactgttgttcttattagaatagggaaatttggatgcagagacacagagaaaatgccatgtgaagatggatcagagacagaagtgatgcggctgcaagccaaggaatgtgaagaatggccagccaccaccggaagctaggggagacgccagcacagattctccctgagagtatccagaagaaaccaaccctccaacacctggatttcagacttctgaccttgagaagtgtgagccaataaaacaactgcagtgg

SEQ ID NO: 153 - DNA, 465 bp, Artificial
  cDNA Sequence
atggcagatgatttggacttcgagacaggagatgcaggggcctcagccaccttcccaatgcagtgctcagcattacgtaagaatggctttgtggtgctcaaaggctggccatgtaagatcgtggagatgtctgcttcgaagactggcaagcacggccacgccaaggtccatctggttggtattgacatctttactgggaagaaatatgaagatatctgcccgtcaactcataatatggatgtccccaacatcagaaggaatgacttccagctgattggcatccaggatgggtacctatcactgctccaggacagcggggaggtaccagaggaccttcgtctccctgagggagaccttggcaaggagactgagcagaagtacgactgtggagaagagatcctgatcacggtgctgtctgccatgacagaggaggcagctgttgcaatcaaggccatggcaaaataa

SEQ ID NO: 154 - DNA, 1068 bp, Artificial
  cDNA Sequence
gactcggaccgcggaggtgagcgggagctgaggctgaggagaggggagcttggggggcgcctgctgccaagggcagcggaggaggaaatggcaggtcctaatcaactctgcattcgccgctggactaccaagcatgtagctgtgtggctgaaggatgaaggcttttttgaatatgtggacattttatgcaataagcaccgacttgatggaatcacattgctaacattgactgaatatgatctccggtctcctcctctggaaatcaaagtcttaggggacattaaaaggttaatgctctcagtccgaaaattgcagaaaatacatattgatgttttagaagagatgggctacaacagtgacagtcccatgggttccatgacccctttcatcagtgctcttcagagtacagactggctctgtaatggggagctttcccatgactgtgacggacccataactgacttgaattctgatcagtaccagtacatgaatggtaaaaacaaacattctgttcgaagattggacccagaatactggaagactatactgagttgtatatatgtttttatagtatttggatttacatctttcattatggttatagtccatgagcgagtgcctgacatgcagacctatccaccactcccagatatattcttagacagcgttcctagaatcccatgggcctttgccatgacggaagtatgtggcatgattctgtgctatatttggctcctggttcttcttcttcacaagcacaggtcaatacttctgcgaaggctctgtagtctgatgggaactgtattcttgcttcgctgctttaccatgtttgtgacctccctctccgtgccaggacaacacctgcagtgtactggaaagatatatggcagtgtatgggagaaattacatcgagcctttgccatttggagtggctttggtatgaccctgactggcgttcacacatgtggagattacatgtttagtggccacacagtcgtcctaactatgctgaatttctttgtcaccgaatgtaagtatctttttagtgcttctatgcgtattaggtaa

SEQ ID NO: 155 - DNA, 228 bp, Artificial
  cDNA Sequence
tttcagaagaaatggtaccagctcctctttatgcctctggtaggattcagctgtgaatccatcgggtcctggacttttttggttggtaggctaataattgctacctcaatttcagaacttgttattggtctattcagggattcaacttcttcctggtttagtcttgggagggtgtatgtgtccaggaacttacccatttcttctagattctttagtttatttgcatag

SEQ ID NO: 156 - DNA, 519 bp, Artificial
  cDNA Sequence
atggagtcaatatatcttcaaaagcaccttggggcctgtttaactcaaggtcttgcagaagtggcaagagttcgcccagtggatccgatagaatatttagcattgtggatttacaagtataaggaaaatgtgaccatggaacaactgagacaaaaggaaatggccaagctggagcgtgaaagagaattagctctgatggagcaggaaatgatggagaggctcaaagcagaggagctcttacttcagcagcaacagctggcattgcagctagagttggaaatgcaagaaaaggagaggcagagaatacaagaactacagagagctcaagaacaattaggcaaggagatgagaatgaatatggaaaatctagttaggaatgaagatattctacattcagaggaagcaacactagactcaggcaaaacactagctgaaatcagcgatcgttatggagcacctaacttgagcagagtggaagaacttgatgaaccaatgttttctgatgtcagtatcagtgtg

SEQ ID NO: 157 - DNA, 1501 bp, Artificial
  cDNA Sequence
ggttgcggcgggcggaacggtgtctccttcacttcgccctccagctgctggagctgcagcccgaccgcgagcgtgccaagcggcttcagcagctagcggagcggtggcggcggcccccctcaggacaccaccagattcccctcttcccgcggcctcgccatggcgacccacggacagacttgcgcgcgtccaatgtgtattcctccatcatatgctgaccttggcaaagctgccagagatattttcaacaaaggatttggttttgggttggtgaaactggatgtgaaaacaaagtcttgcagtggcgtggaattttcaacgtccggttcatctaatacagacactggtaaagttactgggaccttggagaccaaatacaagtggtgtgagtatggtctgactttcacagaaaagtggaacactgataacactctgggaacagaaatcgcaattgaagaccagatttgtcaaggtttgaaactgacatttgatactaccttctcaccaaacacaggaaagaaaagtggtaaaatcaagtcttcttacaagagggagtgtataaaccttggttgtgatgttgactttgattttgctggacctgcaatccatggttcagctgtctttggttatgagggctggcttgctggctaccagatgacctttgacagtgccaaatcaaagctgacaaggaataactttgcagtgggctacaggactggggacttccagctacacactaatgtcaatgatgggacagaatttggaggatcaatttatcagaaagtttgtgaagatcttgacacttcagtaaaccttgcttggacatcaggtaccaactgcactcgttttggcattgcagctaaatatcagttggatcccactgcttccatttctgcaaaagtcaacaactctagcttaattggagtaggctatactcagactctgaggcctggtgtgaagcttacactctctgctctggtagatgggaagagcattaatgctggaggccacaaggttgggctcgccctggagttggaggcttaatccagctgaaagaaacctttgggaatggatatcagaagatttggccttaatatatttccattgtgaccagcagcaggcttttttcccccaagaagatgatcaaaacaaaggatgatctcaacaagagctgtattttaagtatttagacagttctttgttagctggtttctagttggttatctagttaccaatgctgcagtcctgcagtcacctatacattatttaaatgtatttaactgttaaatgcgctacccaccaataatgaaatagacctttatgaaaactgtgcaattgtgtgcatgtttgtttttatgttcctttagaaaacattgactgttaccattgaatgagatggatcagtggatattaagatgaggttacaaattttgttaagttcagccattattacttttggtatcccagaacatgacaaattatgaataaaacaagtatacat

SEQ ID NO: 158 - DNA, 1463 bp, Artificial
  cDNA Sequence
gctgctggagctgcagcccgaccgcgagcgtgccaagcggcttcagcagctagcggagcggtggcggcggcccccctcaggacaccaccagattcccctcttcccgcggcctcgccatggcgacccacggacagacttgcgcgcgtcgatcggatcaatcacttttctagaggaagtagcagtccctcttgtgagagcgcaaggtcattacttgtgctcctaagggcgtggacgtgctttgtggaatgaatgagctggtgtaatgagctcagattgcctgcccttaagcagcacagcattggccgaggacttgagagtcacattacaatgtgtattcctccatcatatgctgaccttggcaaagctgccagagatattttcaacaaaggatttggttttgggttggtgaaactggatgtgaaaacaaagtcttgcagtggcgtggaattttcaacgtccggttcatctaatacagacactggtaaagttactgggaccttggagaccaaatacaagtggtgtgagtatggtctgactttcacagaaaagtggaacactgataacactctgggaacagaaatcgcaattgaagaccagatttgtcaaggtttgaaactgacatttgatactaccttctcaccaaacacaggaaagaaaagtggtaaaatcaagtcttcttacaagagggagtgtataaaccttggttgtgatgttgactttgattttgctggacctgcaatccatggttcagctgtctttggttatgagggctggcttgctggctaccagatgacctttgacagtgccaaatcaaagctgacaaggaataactttgcagtgggctacaggactggggacttccagctacacactaatgtcaatgatgggacagaatttggaggatcaatttatcagaaagtttgtgaagatcttgacacttcagtaaaccttgcttggacatcaggtaccaactgcactcgttttggcattgcagctaaatatcagttggatcccactgcttccatttctgcaaaagtcaacaactctagcttaattggagtaggctatactcagactctgaggcctggtgtgaagcttacactctctgctctggtagatgggaagagcattaatgctggaggccacaaggttgggccctggagttggaggcttaatccagctgaaagaaacctttgggaatggatatcagaagatttggccttaatatatttccattgtgaccagcagcaggcttttttcccccaagaagatgatcaaaacaaaggatgatctcaacaagagctgtattttaagtatttagacagttctttgttagctggtttctagttggttatctagttaccaatgctgcagtcctgcagtcacctatacattatttaaatgtatttaactgttaaatgcgctacccaccaataatgaaatagacctttatgaaaactgtg

SEQ ID NO: 159 - DNA, 3144 bp, Artificial
  cDNA Sequence
atgaatggaccggtggatggcttgtgtgaccactctctaagtgaaggagtcttcatgttcacatcggagtctgtgggagagggacacccggataagatctgtgaccagatcagtgatgcagtgctggatgcccatctcaagcaagaccccaatgccaaggtggcctgtgagacagtgtgcaagaccggcatggtgctgctgtgtggtgagatcacctcaatggccatggtggactaccagcgggtggtgagggacaccatcaagcacatcggctacgatgactcagccaagggctttgacttcaagacttgcaacgtgctggtggctttggagcagcaatccccagatattgcccagtgcgtccatctggacagaaatgaggaggatgtgggggcaggagatcagggtttgatgttcggctatgctaccgacgagacagaggagtgcatgcccctcaccatcatccttgctcacaagctcaacgcccggatggcagacctcaggcgctccggcctcctcccctggctgcggcctgactctaagactcaggtgacagttcagtacatgcaggacaatggcgcagtcatccctgtgcgcatccacaccatcgtcatctctgtgcagcacaacgaagacatcacgctggaggagatgcgcagggccctgaaggagcaagtcatcagggccgtggtgccggccaagtacctggacgaagacaccgtctaccacctgcagcccagtgggcggtttgtcatcggaggtccccagggggatgcgggtgtcactggccgtaagattattgtggacacctatggcggctggggggctcatggtggtggggccttctctgggaaggactacaccaaggtagaccgctcagctgcatatgctgcccgctgggtggccaagtctctggtgaaagcagggctctgccggagagtgcttgtccaggtttcctatgccattggtgtggccgagccgctgtccatttccatcttcacctacggaacctctcagaagacagagcgagagctgctggatgtggtgcataagaacttcgacctccggccgggcgtcattgtcagggatttggacttgaagaagcccatctaccagaagacagcatgctacggccatttcggaagaagcgagttcccatgggaggttcccaggaagcttgtattttagagccagggggagctgggcctggtctcaccctggaggcacctggtggccatgctcctcttccccagacgcctggctgctgatcgccttccccacccaccaaccctcagggcaaagccaggtccctctcatttagcctgtcctgtcatcatcatggccagctggaggcaggggcttcctggtgctggaggttggatcttgatgtaaggatgggcatggtgttctcctgctgctccctcagactggggcaatgttaatttagtggaaaaggcacccccgtcaagagtgaattccctcactcgtctcccccaacagctggaccctgaccagctccccctccctccccttgcctgtgccaggtgaggtcagcacatctcaacaggcctcagggctccttgtgggcctgggctcctggacccccctttcacaggcagccagtgccctgagccagggtctccagaaagccccacccaggccaggcatgtggcaggggttagagcaggactgatgtctcctaagcacctgtaatgtgcgagggacccagctaataactgatctcgttttttcttcactgcaacatgatgaggtagtaccttttatatcccatttatagatgggggaaagcaaagcacagagagtctggataacttccacagggtcccacagccacgtgtttagacctagatgtataactaggagctttgactcaggagcctgtgacataccccctcccccaccgttgtctcatgccagtaacaggctcaaacaatgacaaagcagattcagaaatgaggccatggactctgtcctgaaggcctgaggttactggaaattaggggattaacccactagctcttgttgagccgtgggcaattgtctgaaaagtgaagacagaaccacagggctattttgtttgcttcatgtgtcccagaagatgactgagggtgagttggcttacctggcccatcagggtaggctggagttagggactgaccagcagctttagaatcccagccccctgaccactcagagacatgcagagattgggtttttggacttctggggtaagtggtctaagtccagtccagtcctatctgggcttcctggagcagaagcagcaacttgtcctagcacagatggccagccccttagacagaggccctcaagtctttctctttccctggtcccttgtatcccctgcaggctgagtgcatttggagggagtgagtggccctttcggatccagggaggctggtcctatggcctcatgttaaataggcggggcttgccttctggtgttggacaagcttctgagacgtcatgaggagattctgcctttgccaggtgactgtctggggagcgggtctgctcccaaggggcctgagcagtccttggcctgctaaggtcttggaacttgcctgcctttccatccatggccagcagcacctgccctacctgccccacttgtccttagcctggacctctgacagcagcatctctaccttctccccagctcccaggaccacaggctcaggcaggggcctccatgggccccaggggaacactggggacttggcctctctctagggtacatggtgctgggagaggcagcccaggaagtctcatctggggagcaggcagccagcatctgggccttggcctggagcacaaagaccctggctttcattttctctcaggtgaaaggaaattaaggcaacaaaagaagcccggctcctggtcacctaggaagcctcagattccttcccatggagggagggagtggtttgcaggtggccaagttcctctaacttggctcacactcgacatgaaaattcagaattttatactttccctaccctctagagaaataagatcttttttgtcagtttgtttgtatgaaactaaagcctttatttgttaatagttcctgctaaaacaatgaataaaaactcaaggagc

SEQ ID NO: 160 - DNA, 1842 bp, Artificial
  cDNA Sequence
aaagcggaaggggcgcgcggatagagctcccagtgtgccaagcgtgggcggtatacagtaaacaaagacaacccctattcttatcaccttgcctactgagtgcaagtccaggaactgtgtaagcagaccctcagaggagctctgggaaacactgaaaaatagcctctccccccattggctgccaggatggaaactaactacctgaagaggtgctttggaaattgcctggcccaggcactggcagaggtggcgaaggttcggcccagtgacccaatagaatacctggctcactggctttatcattacaggaaaacagcaaaagcaaaagaagagaatagggaaaagaagatccacctgcaggaggaatatgacagtagcctcaaggaaatggaaatgacagaaatgctgaaacaggaagagtatcagattcaacagaactgtgaaaagtgtcacaaggaactgacttctgaaactgtttccacgaagaagaccatattcatgcaggaggacacaaacccccttgagaaggaggccttgaagcaggaattcctgccaggtacttccagtctgattccaggaatgcctcaacaggttcctccttcagagtctgctggccagattgaccagaacttcaaaatgccacaagaaataaattacaaggaggcttttcagcatgaagttgctcatgaaatgcctcctggctccaaatctcctttttaggttacagaaggtagatgcttctgatttacttctctcaaagctagaagccaagaaaatggccagctagaaccaagatttaaggggctgtaaaaggcaagttcagggactctccagcctactccttttctgaaaaacccttaatcatgtgaacatttgaactagttataggataaaataaactcagaataaggatttaaaataagtaaccaagtggctgtgactttttcctcttgttttatcaacgttttggagactacacaatgaaaacacatctgttggggtgatcagacccaacacccggccatgggggctacaaagtccagccgagtcaaaggaaagagaaaagacaagtcaagagagaaagtgggaccagggggccaatgctagtatggaggctgtgaagtccccaagctctggaagcccacactatttgttggtgatcaaacaaagaaacaggtgatgaggatgtgggagttgaaagaaagtggtgtatcaagcgaatgaactacagctgtgagggtttagcattttctttgaaacatatggctacttgagataatgggagtgctagaagcaaggagccagcaagtctggacacattacaaaggccacaaggggttttatcctggaccccggacatgttccaagccctgcctcaacttttctcccaacactaagctttcctcccaacacacatccatctcgtgtgttcatgtcttaacttttgcttcacttcacagtcaggcctctccgagtattttttacacatatcctggagtctacctatgtcactgatagcagatatttttcttcaacatatattatcaatgttttaatacttttcttcaattttagtaactggtaaaatacatgtaagatgtaccatcttaaccatttttaagtgtacagatcagttgtattaagtagattcatattcttgtgcaaccatcatcaccatccggctgcaaaactctttcatcttgcaaaactgaaactctacacccattaaaaaataactcgccatttctctctctccccagcccctggcaaccaccattctttctgtctctgtgatttagattactctgtaagtatgttgtataaatagactcatacaatgtt

SEQ ID NO: 161 - DNA, 1686 bp, Artificial
  cDNA Sequence
aagcgcggggcccgcccctgggaccctccgggccgggcggtttggccccttagcgcccgggcgtcggggcggtaaaaggccggcagaagggaggcacttgagaaatgtctttcctccaggacccaagtttcttcaccatggggatgtggtccattggtgcaggagccctgggggctgctgccttggcattgctgcttgccaacacagacgtgtttctgtccaagccccagaaagcggccctggagtacctggaggatatagacctgaaaacactggagaaggaaccaaggactttcaaagcaaaggagctatgggaaaaaaatggagctgtgattatggccgtgcggaggccaggctgtttcctctgtcgagaggaagctgcggatctgtcctccctgaaaagcatgttggaccagctgggcgtccccctctatgcagtggtaaaggagcacatcaggactgaagtgaaggatttccagccttatttcaaaggagaaatcttcctggatgaaaagaaaaagttctatggtccacaaaggcggaagatgatgtttatgggatttatccgtctgggagtgtggtacaacttcttccgagcctggaacggaggcttctctggaaacctggaaggagaaggcttcatccttgggggagttttcgtggtgggatcaggaaagcagggcattcttcttgagcaccgagaaaaagaatttggagacaaagtaaacctactttctgttctggaagctgctaagatgatcaaaccacagactttggcctcagagaaaaaatgattgtgtgaaactgcccagctcagggataaccagggacattcacctgtgttcatgggatgtattgtttccactcgtgtccctaaggagtgagaaacccatttatactctactctcagtatggattattaatgtattttaatattctgtttaggcccactaaggcaaaatagccccaaaacaagactgacaaaaatctgaaaaactaatgaggattattaagctaaaacctgggaaataggaggcttaaaattgactgccaggctgggtgcagtggctcacacctgtaatcccagcactttgggaggccaaggtgagcaagtcacttgaggtcgggagttcgagaccagcctgagcaacatggcgaaaccccgtctctactaaaaatacaaaaatcacccgggtgtggtggcaggcacctgtagtcccagctacccgggaggctgaggcaggagaatcacttgaacctgggaggtggaggttgcggtgagctgagatcacaccactgtattccagcctgggtgactgagactctaactaaaaaaaaaaaaaaaaaaaaattgattgctgtgcctcattacaaatgcatatgatgtttgagtgctgttgtttgaaattatttttcttttcgggtcttcaaaaattcaagaaaagttgatgattgacttgaagattacaaaatttaaggttttttggcatgtgtgttttctattaataattggttatatgatgtcaaagtaatactttcataatagaattgacatgctctgggatagtttgacaaaggtaaattataaagtgaaatctcttgtttcattatcttccattctaacctcagagatctgtttctctagaaaaaatgtccatctctggctttaataaaattatgcatcag

SEQ ID NO: 162 - DNA, 7035 bp, Artificial
  cDNA Sequence
ggtggtttgcagatcactgaggctggacaacgttcatggctctcgggtagaacctagtgaaacggccagaatgaattctatggacaggcacatccagcagaccaatgaccgactgcagtgcatcaagcagcacttacagaatcctgccaacttccacaatgccgccacggagctgctggactggtgcggagacccacgggccttccagcggcccttcgagcagagcctgatgggctgtttgacggtggtcagtcgggtggcagcccagcaaggctttgacctggacctcggctacagactgctggctgtgtgtgctgcaaaccgagacaagttcaccccgaagtctgccgccttgttgtcctcctggtgcgaagagctcggccgcctgctgctgctccgacatcagaagagccgccagagcgatccccctgggaaactccccatgcagccccctctcagctccatgagctccatgaaacccactctgtcgcacagtgatgggtcgttcccctatgactctgtcccttggcagcagaacaccaaccagcctcccggctccctttccgtggtcaccacggtttggggagtaaccaacacatcccagagccaggtccttgggaaccctatggccaatgccaacaaccccatgaatccaggcggcaaccccatggcgtcgggcatgaccaccagcaacccaggcctcaactccccacagtttgcggggcagcagcagcagttctcagccaaggctggccccgctcagccctacatccagcagagcatgtatggccggcccaactaccccggcagcgggggctttggggccagttaccctgggggtcctaacgcccccgcaggcatgggcatccctccgcacaccaggccgcctgctgacttcactcagcccgcggcagccgctgcagcagcggcagtggcagcagcagcagccacagctacagccacagccacggccactgtggcagccctgcaggagacacagaacaaggatataaaccagtatggaccgatgggtcccacccaggcgtataacagccaattcatgaaccagcccgggccgcgggggcctgcctccatggggggcagcatgaaccccgcgagcatggcggctggcatgacgccctcggggatgagcggccctcccatgggcatgaaccagccccggccgcccggcatcagcccctttggcacacacgggcagcggatgccccagcagacctacccgggcccccggccccagtcccttcctattcagaacataaagaggccataccctggagagcccaactatggaaaccagcaatatggaccaaacagccagttccccacccagccaggccagtacccagcccccaaccccccgaggccactcacctcccccaactacccaggacagaggatgcccagccagccgagctccgggcagtacccgccccccacggtcaacatggggcagtattacaagccagaacagtttaatggacaaaataacacgttctcgggaagcagctacagtaactacagccaagggaatgtcaacaggcctcccaggccggttcctgtggcaaattacccccactcacctgttccagggaaccccacaccccccatgacccctgggagcagcatccctccatacctgtcccccagccaagacgtcaaaccacccttcccgcctgacatcaagccaaatatgagcgctctgccaccacccccagccaaccacaatgacgagctgcggctcacattccctgtgcgggatggcgtggtgctggagcccttccgcctggagcacaacctggcggtcagcaaccatgtgttccacctgcggcccacggtccaccagacgctgatgtggaggtctgacctggagctgcagttcaagtgctaccaccacgaggaccggcagatgaacaccaactggcccgcctcggtgcaggtcagcgtgaacgccacgcccctcaccattgagcgcggcgacaacaagacctcccacaagcccctgcacctgaagcacgtgtgccagccgggccgcaacaccatccagatcaccgtcacggcctgctgctgctcccacctcttcgtgctgcagctggtacaccggccctccgtccgctctgtgctgcaaggactcctcaagaagcgcctcctgcccgcagagcactgtatcacgaaaatcaagcggaatttcagcagcgtggctgcctcctcgggcaacacgaccctcaacggggaggatggggtggagcagacggccatcaaggtgtctctgaagtgccccatcacattccggcgcatccagctgcctgctcgaggacacgattgcaagcatgtgcagtgctttgatctggagtcatacctgcagctgaattgcgagagagggacctggaggtgtcctgtgtgcaataaaaccgctctgctggagggcctggaggtggatcagtacatgtggggaatcctgaatgccatccaacactccgagtttgaagaggtcaccatcgatcccacgtgcagctggcggccggtgcccatcaagtcggacttacacatcaaggacgaccctgatggcatcccctccaagcggttcaagaccatgagtcccagccagatgatcatgcccaatgtcatggagatgatcgcagccctgggccccggcccgtccccctatcccctcccgcctcccccagggggcaccaactccaacgactacagcagccaaggcaacaactaccaaggccatggcaactttgacttcccccacgggaaccctggagggacatccatgaatgacttcatgcacgggcccccccagctctcccaccccccggacatgcccaacaacatggccgccctcgagaaacccctcagccaccccatgcaggaaactatgccacacgctggcagctctgaccagccccacccctccatacaacaaggtttgcacgtaccacaccccagcagccagtcagggcctccattacatcacagtggggctcctcctcctcctccttcccagcctccccggcagccgccacaggccgctcccagcagccatccacacagcgacctgacctttaacccctcctcagccttagagggtcaggccggagcgcagggagcgtccgacatgccggagccttcgctggatctccttcccgaactcacaaatcctgacgagctcctgtcttatctggacccccccgacctgccgagcaatagtaacgatgacctcctgtctctatttgagaacaactgagggccacccggtcggggccatccctccacactctgcatcctaccccacctacccaacacacttttccacctgggagcctgtgccctcagaccgccccgcaccagagccacgggctgtggggcggggagccctcccccgctgcagccctctcagaacagaggggtagggagggtgcaccagtgcaccaggaaggctgtgtgggtctggagcccacgtcccacctccacacccttggcttgggcccatgcccagcgcaggcctgaagaccaccctcccgagaggaaccagcccggtaagagggcacacgctgatgcggcttcccggtccctccgcgtgtgccgattccagatgaccttccagtgtccccaaggttcttccatcttctagactgtaaccctgcctccctgcttcctggtccagagcctccctccagtgactgtggagcctgagaaggcccccgggccccagcatgggccccgagccttggaggagcactggcagttggtggcagtgagaccagcccacccaccaccacccaccacagaaaagcacaaacctctgggaaagacaacgtctctcgggggccaggggtcatcggtttgacccctgacctataagccaagataccccataaacacactcagaaagcagagaaaaaggacaagagtctgtgtttgagagggggtctgccattcctgcttggggactggtggggaagagggccaggacatcttctgagccaggacgtccctgaggctccacctccaagctcagacagggcccaggcttggggaacagagagagcaggtgtacacccaaccaaagtgattgtgcccttggttggggggcgcgggcatataacctgtcagaagcaaacaggagcggcaacttctaactttgctccaagccactctctttttaaacagcaacaatttaaagctatgaagtcacctggagaaaaggaacgttgctcttggacagcaagcaaaccatttctctccgtctgttctgtttttctcctagtccctctcctgccacctctccaagacttccgtgggacacccacttccctctgtcctagttctctttgtccaatcagatggcaagggcagtgcgtggaaaggccggggaggtgcagaaaccagagcccagggcaatggtgtctgtccagcccctccctctgtccctgtgctccaagctgcccccggctgcagcccaggccatggacatgtgcaccagtatgtacctgcaggcatgggggggaggggggcgtgtttctgggcctgccccagacactgcccttggctgccagcctaccctgcctgcactcctccaccatcacaatctcacccaaactcctgctcactcaagcaaaagcagcctctggccttccctccaccgctttgctccatctggcttaccactctccagggcctcctggggagcctgtcctgtgttcactttgtttcaggctggtctgtgccccgtgagccacatggcctagggtgatgccaggttgtcccgtcactggggtcccatctgtaaattctttgcgcccttcccggctgctgcctggggccctttcctgctctcccgtccgctgtgggtggtccccagctctcctctgtgggttttaccggaaaggtggccccagctgttgacttccagtcactgtcccagacggcacaaggttttctgtaggaaagctgccattgccccggccccttttcttcctttgtcccgttgtcgaggttttttcaaatagcgtgttgttcagtatgcaaatcaattattttaagaatcgcttttgtaaatatctttgtgaatattttagtatcgtctttgataatattcaacattttcatgacctggttatagcctttgctggtgtttttaaaatacctggactcaatgacaaagaccgagtcttctttttttttaaacaaaaacaaaaaaagcaaccagggctatttgtacagttgaaggggtgaacagaatgggcggctgtgctgggagttggaagaccgggcagcccgctatttagagccatccctcagtcagctggcagggacaagccaacgccaggtagcatgtggccacccttgcccagtgtctgtggcctggcaagtggccacgccctgtgtcagaccatctgggaattaagctccagacagacttacagatgccttccttaggagttcttgcttcttgcgttgatactttgccccagaaaggcctgggattcattctggttcttatcagggtgtgtccacactctgctcacaggtggatccacggctttccagtgcggagagtcgagatgctccctgcagcccaggccccgggcacctcctgcaaccatctctgggctcagcacctgaggcgggtttcctgggtcccctctccagcaagcctccaccagcaagctcggcccagagcttcccttccggctggctctgaaccgtgcgtggtgcctacagcctgcagtctggagacaagctcttccggagtgctctgggagccaggccagggtgtgagggaggtgcagaggcatccggggcgggagcaagccccaggttgtgacaggtgcaggtagacaacgcccataaacagagatggtcctgaactctggagagatccttccctgatcctttcggacgactacttggagccataagtaacctcagcaaaaacgaggcctctgcaagccacttttccatgccaagcatccacccggcccacaggcatgtttctgccgccactccgcaagatggacagggagccagcaggcaggcgggaagggccaagtacaggcaatcacccccatcttcttggtttgaagctttatccatgtatcatgttccgtgtagccattttattttttaagaaactgctaatactttctccctaatggaagccctgatcccccagagagctacaggtctgctcccgacgggcctcgggcctgacccgtccacacagggccgtgtcaacagcagcgactcaagggacgtgtgtacatatgtaaatgagaaatagagacgtgtcaacagatgcattcatttctcttggaatgtgtattgtttttattttgcgaaacaaaacaaaacaaaaaaaaaagcttggaactccatcacgtggaaaaactagatcctgttggttatagcatttgtgagttctccacgtctgtctctctcgctcatgtaatatactctgaccctgagtggaaaggggtttttgttctgtttttattttacctacatgtactatttagcttcagtgtactagtcctgccacctgtgtatttttagggtgctatggaaataatgaaaagaaacggggatttcagaagaaaattgtaaccaaattcatactttgtataatttttgatatcatgatcacaggtgattcacacgtacacacataaacacacccaccagtgcagcctgaagtaactcccacagaaaccatcatcgtctttgtacatcgtatgtacaatgcaatcatttcatactttaaactggtcaaaaaactaattgtgatttctagtcttgcaaagctgtatgtagttagatgatgtgacaacctctaatatttatctaataaatatgtattcagatgaaacctgtatattaggtgttcatgtggttattttgtatttaaagatcaaattatttgactattgctagacatttctatactctgttgtaacactgaggtatctcatttgcccatgttaatttttttctaaataaattgac

SEQ ID NO: 163 - DNA, 4756 bp, Artificial
  cDNA Sequence
gcggccgccgccggccgggccccaagcccccgagggcgccagggcgggatcgcgaccggtgcaacttctagccttgttgtcctcctggtgcgaagagctcggccgcctgctgctgctccgacatcagaagagccgccagagcgatccccctgggaaactccccatgcagccccctctcagctccatgagctccatgaaacccactctgtcgcacagtgatgggtcgttcccctatgactctgtcccttggcagcagaacaccaaccagcctcccggctccctttccgtggtcaccacggtttggggagtaaccaacacatcccagagccaggtccttgggaaccctatggccaatgccaacaaccccatgaatccaggcggcaaccccatggcgtcgggcatgaccaccagcaacccaggcctcaactccccacagtttgcggggcagcagcagcagttctcagccaaggctggccccgctcagccctacatccagcagagcatgtatggccggcccaactaccccggcagcgggggctttggggccagttaccctgggggtcctaacgcccccgcaggcatgggcatccctccgcacaccaggccgcctgctgacttcactcagcccgcggcagccgctgcagcagcggcagtggcagcagcagcagccacagctacagccacagccacggccactgtggcagccctgcaggagacacagaacaaggatataaaccagtatggaccgatgggtcccacccaggcgtataacagccaattcatgaaccagcccgggccgcgggggcctgcctccatggggggcagcatgaaccccgcgagcatggcggctggcatgacgccctcggggatgagcggccctcccatgggcatgaaccagccccggccgcccggcatcagcccctttggcacacacgggcagcggatgccccagcagacctacccgggcccccggccccagtcccttcctattcagaacataaagaggccataccctggagagcccaactatggaaaccagcaatatggaccaaacagccagttccccacccagccaggccagtacccagcccccaaccccccgaggccactcacctcccccaactacccaggacagaggatgcccagccagccgagctccgggcagtacccgccccccacggtcaacatggggcagtattacaagccagaacagtttaatggacaaaataacacgttctcgggaagcagctacagtaactacagccaagggaatgtcaacaggcctcccaggccggttcctgtggcaaattacccccactcacctgttccagggaaccccacaccccccatgacccctgggagcagcatccctccatacctgtcccccagccaagacgtcaaaccacccttcccgcctgacatcaagccaaatatgagcgctctgccaccacccccagccaaccacaatgacgagctgcggctcacattccctgtgcgggatggcgtggtgctggagcccttccgcctggagcacaacctggcggtcagcaaccatgtgttccacctgcggcccacggtccaccagacgctgatgtggaggtctgacctggagctgcagttcaagtgctaccaccacgaggaccggcagatgaacaccaactggcccgcctcggtgcaggtcagcgtgaacgccacgcccctcaccattgagcgcggcgacaacaagacctcccacaagcccctgcacctgaagcacgtgtgccagccgggccgcaacaccatccagatcaccgtcacggcctgctgctgctcccacctcttcgtgctgcagctggtacaccggccctccgtccgctctgtgctgcaaggactcctcaagaagcgcctcctgcccgcagagcactgtatcacgaaaatcaagcggaatttcagcagcgtggctgcctcctcgggcaacacgaccctcaacggggaggatggggtggagcagacggccatcaaggtgtctctgaagtgccccatcacattccggcgcatccagctgcctgctcgaggacacgattgcaagcatgtgcagtgctttgatctggagtcatacctgcagctgaattgcgagagagggacctggaggtgtcctgtgtgcaataaaaccgctctgctggagggcctggaggtggatcagtacatgtggggaatcctgaatgccatccaacactccgagtttgaagaggtcaccatcgatcccacgtgcagctggcggccggtgcccatcaagtcggacttacacatcaaggacgaccctgatggcatcccctccaagcggttcaagaccatgagtcccagccagatgatcatgcccaatgtcatggagatgatcgcagccctgggccccggcccgtccccctatcccctcccgcctcccccagggggcaccaactccaacgactacagcagccaaggcaacaactaccaaggccatggcaactttgacttcccccacgggaaccctggagggacatccatgaatgacttcatgcacgggcccccccagctctcccaccccccggacatgcccaacaacatggccgccctcgagaaacccctcagccaccccatgcaggaaactatgccacacgctggcagctctgaccagccccacccctccatacaacaaggtttgcacgtaccacaccccagcagccagtcagggcctccattacatcacagtggggctcctcctcctcctccttcccagcctccccggcagccgccacaggccgctcccagcagccatccacacagcgacctgacctttaacccctcctcagccttagagggtcaggccggagcgcagggagcgtccgacatgccggagccttcgctggatctccttcccgaactcacaaatcctgacgagctcctgtcttatctggacccccccgacctgccgagcaatagtaacgatgacctcctgtctctatttgagaacaactgagggccacccggtcggggccatccctccacactctgcatcctaccccacctacccaacacacttttccacctgggagcctgtgccctcagaccgccccgcaccagagccacgggctgtggggcggggagccctcccccgctgcagccctctcagaacagaggggtagggagggtgcaccagtgcaccaggaaggctgtgtgggtctggagcccacgtcccacctccacacccttggcttgggcccatgcccagcgcaggcctgaagaccaccctcccgagaggaaccagcccggtaagagggcacacgctgatgcggcttcccggtccctccgcgtgtgccgattccagatgaccttccagtgtccccaaggttcttccatcttctagactgtaaccctgcctccctgcttcctggtccagagcctccctccagtgactgtggagcctgagaaggcccccgggccccagcatgggccccgagccttggaggagcactggcagttggtggcagtgagaccagcccacccaccaccacccaccacagaaaagcacaaacctctgggaaagacaacgtctctcgggggccaggggtcatcggtttgacccctgacctataagccaagataccccataaacacactcagaaagcagagaaaaaggacaagagtctgtgtttgagagggggtctgccattcctgcttggggactggtggggaagagggccaggacatcttctgagccaggacgtccctgaggctccacctccaagctcagacagggcccaggcttggggaacagagagagcaggtgtacacccaaccaaagtgattgtgcccttggttggggggcgcgggcatataacctgtcagaagcaaacaggagcggcaacttctaactttgctccaagccactctctttttaaacagcaacaatttaaagctatgaagtcacctggagaaaaggaacgttgctcttggacagcaagcaaaccatttctctccgtctgttctgtttttctcctagtccctctcctgccacctctccaagacttccgtgggacacccacttccctctgtcctagttctctttgtccaatcagatggcaagggcagtgcgtggaaaggccggggaggtgcagaaaccagagcccagggcaatggtgtctgtccagcccctccctctgtccctgtgctccaagctgcccccggctgcagcccaggccatggacatgtgcaccagtatgtacctgcaggcatgggggggaggggggcgtgtttctgggcctgccccagacactgcccttggctgccagcctaccctgcctgcactcctccaccatcacaatctcacccaaactcctgctcactcaagcaaaagcagcctctggccttccctccaccgctttgctccatctggcttaccactctccagggcctcctggggagcctgtcctgtgttcactttgtttcaggctggtctgtgccccgtgagccacatggcctagggtgatgccaggttgtcccgtcactggggtcccatctgtaaattctttgcgcccttcccggctgctgcctggggccctttcctgctctcccgtccgctgtgggtggtccccagctctcctctgtgggttttaccggaaaggtggccccagctgttgacttccagtcactgtcccagacggcacaaggttttctgtaggaaagctgccattgccccggccccttttcttcctttgtcccgttgtcgaggttttttcaa

SEQ ID NO: 164 - DNA, 560 bp, Artificial
  cDNA Sequence
cttttcctccttggctgtctgaagatagatcgccatcatggaacgacaccgtaactatccgcactagaaagttcatgaccaaccgactacttcagaggaaacaaatggtcattgatgtccttcaccccgggaaggcgacagtgcctaagacagaaattcgggaaaaactagccaaaatgtacaagaccacaccggatgtcatctttgtatttggattcagaactcattttggtggtggcaagacaactggctttggcatgatttatgattccctggattatgcaaagaaaaatgaacccaaacatagacttgcaagacatggcctgtatgagaagaaaaagacctcaagaaagcaacgaaaggaacgcaagaacagaatgaagaaagtcagggggactgcaaaggccaatgttggtgctggcaaaaagcagaaatgaagtgtctagcaggtgagctggagattggatcaccagccgaaggagtaaaggtgctgcaatgatgttagctgtggccactgtggatttttcgcaagaacattaataaactaaaaacttcatgtg

SEQ ID NO: 165 - DNA, 5318 bp, Artificial
  cDNA Sequence
ggcgagtccagaagcagccccaggaggtgctgggggcatcgtttctctaatctggcctcccgagtgccaaggaggcgtcccggcagcggtcatcatggtgaaggagcagttccgggagacggatgtggccaagaaaataagccacatctgttttggaatgaagtcacctgaggagatgcgccagcaggcgcacatccaagttgtgagtaagaacctgtacagccaggacaaccaacatgcccccttgctatatggggtgctcgaccataggatgggtacgagtgagaaggatcgtccatgtgaaacctgtgggaaaaacttggctgactgtctaggccactatgggtatatcgacctggagttgccgtgttttcatgtagggtacttcagagcagtcataggcatcttacagatgatctgcaaaacctgctgccacatcatgctgtcccaagaggagaagaagcagtttctggactatctaaagaggcccggcctgacctaccttcagaagcgaggactgaaaaagaaaatctctgacaagtgccggaagaaaaacatctgccatcactgtggcgcttttaatggtaccgtaaagaagtgtggactgctgaaaataattcatgagaaatacaagaccaacaaaaaagtggtggatcccattgtatcaaatttccttcagtcttttgaaacagccattgaacataataaagaagtggagcctctgctgggaagggcacaggaaaacttgaatcccttagtagttctgaatttatttaaacgaatcccagctgaagatgttcctctacttctgatgaacccagaagccggaaagccgtctgatttgattctcacacgacttttggtgcctcctttgtgtatcagaccctccgttgtgagtgatttgaagtctggcaccaatgaagatgatctgacaatgaaactgacagaaatcattttcctaaacgatgttattaaaaagcatcggatctcaggagccaagacccagatgatcatggaggactgggatttcctgcagctgcagtgtgccctctacattaacagtgagctctcgggcattcccctcaacatggcacccaagaagtggaccagaggcttcgtccaacgcctgaagggaaaacagggtcgatttagaggaaatctctcaggaaagagagtggatttttctggcagaacagtcatctcgcccgaccccaacctccggattgatgaggtagctgtgccagttcatgtggccaaaattctaacttttcctgagaaggtaaacaaagcaaacatcaatttcttgaggaaactggttcaaaacggccctgaggttcacccaggagcaaacttcattcagcagagacatacgcagatgaaaaggtttttgaaatacggaaatcgagaaaagatggctcaagagctcaagtatggtgacatcgtagagagacacctcatcgatggagatgtggtgctgttcaatcggcagccctcgctgcacaaattgagcattatggctcatctggccagggtcaagccccaccggaccttcagatttaatgagtgtgtctgtacaccctataatgctgactttgatggtgatgaaatgaaccttcatcttcctcaaacagaagaagctaaagcagaggcccttgttctgatggggactaaagcaaatcttgtaaccccgaggaatggggaaccgctgattgctgctattcaggattttctaacaggtgcctatctcctcactctcaaggacactttctttgatcgagccaaggcttgccaaatcattgcttcaatactggttggcaaggatgagaaaattaaagttcgcctcccaccgcctacaatcctaaagcctgtcaccctgtggacgggaaagcagatcttcagtgtcatcctcaggcctagcgatgacaatccagtgagggccaacctgcgaaccaagggcaagcagtactgtggcaaaggggaagatctctgtgccaatgattcctatgttacaatccagaacagtgagttgatgagtggcagcatggacaaaggaaccctagggtcaggatccaagaacaatattttttacattttgctgcgagactggggacagaatgaagctgcagatgccatgtcacggctcgccaggctggctcctgtctacctgtctaaccgtggtttctcaattgggatcggtgatgtcacacctggccaaggactgctgaaggccaagtatgagttgctgaatgccggctacaagaaatgtgatgagtacatcgaagccctgaacacgggcaagctgcagcagcagcctggctgcactgctgaggagaccctggaggcactgatcctgaaggagctgtctgtgatccgtgaccacgctggcagtgcctgcctccgggagctggacaagagcaacagccccctcaccatggctctgtgcggctccaaaggttccttcattaacatatcacagatgattgcctgtgtgggacagcaggccatcagtggctctcgagtgccagacggctttgaaaacaggtccttgcctcattttgaaaaacactcaaagctcccagctgccaaaggctttgtggctaatagcttttattccggtttgacaccaactgagtttttcttccacacaatggccggccgggaaggtctagtcgacacggctgtaaagacagctgaaacgggatacatgcagcgaaggcttgtcaaatctcttgaagatctttgctcccagtatgatctgacagtccgaagctctactggcgatattatccagttcatttatggaggagatggcttagatcctgcagctatggagggaaaagatgaacctttggagtttaaaagggttctggacaacatcaaagcagtcttcccgtgtcccagtgagcctgctctcagcaaaaacgagctgatcctgaccacagagtccatcatgaagaagagtgagttcctctgctgccaggacagcttcctgcaggaaataaaaaaattcattaagggggtctctgagaagatcaagaaaaccagagataaatatggcatcaatgataacggcacaacagagccccgtgtgctgtaccagctggaccgcatcacccccacccaagtagaaaagtttctggagacctgtagggacaagtacatgagggcacagatggagccaggttctgcagtgggtgctctgtgtgcccagagcattggtgagccaggcacccagatgaccctgaagactttccactttgcaggtgtggcctccatgaacatcaccctgggcgtgccccggattaaagagatcatcaacgcttccaaggccatcagcactccaattatcacagcacagctagacaaggatgacgacgcggattatgctcgcctcgtgaaagggagaattgagaaaaccctcttgggagagatttccgagtatattgaagaagtgtttcttcctgatgactgctttattctcgtcaagctctccctggaacggattaggcttctgagactggaagtgaacgctgagacagtgagatattccatctgcacatccaagctccgtgtgaagcccggtgatgtggctgttcatggtgaggctgtggtgtgtgtcacccccagagagaacagcaagagctccatgtactacgtgctgcagttcctgaaagaggatctccccaaggtggtggtgcagggcattccagaggtgtccagagctgtcatccacattgacgagcagagtggaaaggagaagtacaagcttctggtggaaggtgataacctgcgggcagtcatggccacacacggtgtgaagggcacccgaaccacctccaataacacctatgaggtggagaaaactctgggcatcgaggccgcccggacaacgatcatcaatgaaatccagtacaccatggtgaaccacggcatgagcatcgacaggaggcacgtgatgctgctctccgacctcatgacctacaagggtgaagtcctgggcatcactaggtttggcctggccaagatgaaggagagtgtgctgatgctggcctcctttgagaagacggctgaccatctctttgacgctgcctacttcgggcagaaggactctgtgtgtggggtgtctgagtgcatcatcatgggaatcccaatgaacattggaaccgggctcttcaagctgcttcacaaggctgacagggacccgaaccctcccaagaggcccctgatcttcgacacaaatgaattccacatcccccttgtcacatagtccaaagaaagaggggaccatgcctgaccttgactccttgtcctgtctccagctgatgtataaagagttttgtgctccctgggacgggggtcctgaggtccccacctatgccagcaatcagagaagccctcttggcatccccaggagcagcttctcctctgatagggtgcagctcacaccagtgaccctgactgtgccacgctgctcgggagagctgagggttttattgtttgcttgcttgaaacctaatctatagacggccccacagctcgtgcacacactgcttccctggacttaaagcccagccaggtgtcatggtccatcccagctcactgcatacatccatcggctccccatggtgtcttcacacctgacgatgagccaggcctgagccccacacaggccagggcacattcttggattttccattccttggtcatgctggaatctctcaatgtgacatacttatgtaaatattgttactattatttatttgttccatttgagggatttggaatttttgttattttagttttatttttgaaaccaagcatctatagaaaccaagaaagtcagcatgtaagcgtcactggaaaaactggtttaagcaaatagagccgtctgggatttgtaactgaggtgcaactgtcatgaggcccaggcagctctgtaacatcttctatagatgcccctggctaccctgttgttttcatctacctcagacccctatcatggggctctaccctgtgacaagagccaaacccattctccatggcctatggaagcctcactggagtttggggcctgctgcaatggggatgagatggttttttgtagaattatacttacgttccttggatgatctctagttgattttttaagttctgagttgatgctgttaaggtacccggggtagccattggttcttggatctgtgttagaatgagtgctttcccttcctactgatgtgattgtggattaggaattcgtgaccgagtgatttttggccagtggttgggtttaaaattctattaaaatttgtagtttgggc

SEQ ID NO: 166 - DNA, 1989 bp, Artificial
  cDNA Sequence
tttcacttggaggaaagagagaaggaaggaagctgaggacttagcagggtatcactggacaggccatggctccacggtcccggcgacgaaggcacaagaaacctccctcatcagtggctcccatcatcatggccccaaccacaattgtgacccctgtgcctctgaccccctcaaaacctggccctagcattgacacacttggcttcttctccttggatgataatgttcctggcctatcgcagctgatccttcaaaagctgaacatgaaaagctatgaagaatataagttggtggtagatgggggtacccccgtatcaggctttggatttcgatgtcctcaagaaatgttccagaggatggaagacacatttcgattctgtgctcactgtagagcactccctagtgggctttcagactccaaggttctccggcactgtaagaggtgcagaaatgtctattactgtggtccagagtgccagaagtcagactggcccgcacacaggagggtttgtcaagagcttcgtcttgtggctgtggaccgtctcatggaatggcttctggtcacagagcacctcaacttcacccctggaacctggcacaattcagcttagtgcccacaggggcctctaccatgacttctgggaggagcaagtagagaccgggcagacacaccatccagatttggtggcggcattccatccaggttttcattcctccccagacttgatggaggcttggctgcccaccctgctgctacttcgtgactataagattcctacattgattactgtttacagccatcaggagttggtatcctctttgcagattctggtggaactggatacacacatcactgcctttgggtctaatcctttcatgtccctcaaacctgaacaggtctattccagtcccaacaagcagccagtatactgcagtgcatactatatcatgtttcttggaagctcctgtcagctggataataggcaattagaagagaaagtggacggcgggatttaaatagatcataactggacatctggaaaacggggagtttgtgatgaaattaccctgctaatgccaggttcttgcaaactttgaaaaacattatattctaaacctcatttactgtttgggtaaaaattctaagctgaatgagagtttctgtataacataactggtttctttctttttttgagatggagtcttgctctgttgcccaggctggagtgcagcggcatgatctcgactcactgcagcctccgcctcctgggttcaagtggttctcctgcctcagcctccctagtagctgggattacaggtgcacaccaccacacctggctaatttttgtatttttagcagacagggtttcaccatgttggccaggctcgtatcaaacccttgaccccaggtgatctgcctgcctcagcctcccaaagttctgggattacaggcatgagccaccatgcccagccaatgtaactggtttctaagagtttagccacagtagcttctagagataggaaattagatttagtgggtgggaagaggccctgatgctggtctttccagagcttatagttgctaacacttttctttgtaaagaagtttaccttttgactggaaccagatggcactgagaaaaagaatgagaaccaccttattcttctgaaaaagactttcttctcatccagtaatttgggctaaaaaatggaaagatgttgatgacttgaagtgatgcaagaatggacaagtcagggaagtcattgggaacatggatgaggttgtaagcattggtacagtgtcctgtttcctgacttttttgagagaaatgtctacttttcctgttttctcttggggacttttgaccctagagtagccctggtgttatattttagatatcccaagctatatcagactttacctgaatatactggagttacttattatcccccattctataccccaataaactcagtttggggcttctt

SEQ ID NO: 167 - DNA, 1161 bp, Artificial
  cDNA Sequence
gaagagggggcgggaccagagagtggatggcagaggtgggctgtagagccaaagtggggtgggagcgcgaagatggcagctgctgaggaggagccgaagcccaaaaagctgaaggtggaggcgccgcaagcgctgagagaaaatattctctttggaatgggaaatcctctgcttgacatctctgctgtagtggacaaagatttccttgataagtattctctgaaaccaaatgaccaaatcttggctgaagacaaacacaaggaactgtttgatgaacttgtgaaaaaattcaaagtcgaatatcatgctggtggctctacccagaattcaattaaagtggctcagtggatgattcaacagccacacaaagcagcaacattttttggatgcattgggatagataaatttggggagatcctgaagagaaaagctgctgaagcccatgtggatgctcattactacgagcagaatgagcagccaacaggaacttgtgctgcatgcatcactggtgacaacaggtccctcatagctaatcttgctgctgccaattgttataaaaaggaaaaacatcttgatctggagaaaaactggatgttggtagaaaaagcaagagtttgttatatagcaggcttttttcttacagtttccccagagtcagtattaaaggtggctcaccatgcttctgaaaacaacaggattttcactttgaatctatctgcaccgtttattagccagttctacaaggaatcattgatgaaagttatgccttatgttgatatactttttggaaatgagacagaagctgccacttttgctagagagcaaggctttgagactaaagacattaaagagatagccaaaaagacacaagccctgccaaagatgaactcaaagaggcagcgaatcgtgatcttcacccaagggagagatgacactataatggctacagaaagtgaagtcactgcttttgctgtcttggatcaagaccagaaagaaattattgataccaatggagctggagatgcatttgttggaggttttctgtctcaactggtctctgacaagcctctgactgaatgtatccgtgctggccactatgcagcaagcatcataattagacggactggctgcacctttcctgagaagccagacttccactga

SEQ ID NO: 168 - DNA, 531 bp, Artificial
  cDNA Sequence
ggtagtggcgggtcggcaaggcacagcacacgacctggtggaccagccactgggaacaatgagtctatggtggccaaatccagccttgtcctccactttgtcaagggacaatttcaagagtaccaggagagcataatcagagcagccttccttacacagactgtctgcttagacgacacaatagtcaagtttgagatctggggcagcgctggacaggagcggtatcatagcccagcccccatgtactatgaaatcaccaaaaaagatacatttgcaccagccaagaaatgggtgaaggagctagagaggcaggccagccccaacattgtcactgtacttgtgggtaacaaggcagacctggccagcaagaaagccccagaattccacgaagcacaggactatgcagacgacgacttgactatggagacatcagtaaagactgcaatgaacgtgaatgaagtttacacggcgagagctaagaagattcctaataagccccagagtgcacctggtgctccaggccaaaactga

SEQ ID NO: 169 - DNA, 408 bp, Artificial
  cDNA Sequence
aggtcactggaaggactgagcgcattcaggagcctggaggaactcatcttggacaacaatcagctgggggacgaccttgtgttgccagggttacccagactgcataccttaaccctcaacaagaaccgaataattcttaacctttgtcacatcactgatttggagaacctgctggatcacttggcagaagtgacaccagctctggagtacctcagtctgctgggcaacgtggcctgtcccaacgagctggtcagcttggaaaaggatgaggaagactacaagagatacagatgctttgttctgtacaagctgcccaacttgaaatttctggatgcccagaaagtaaccagacaagaacgagaggaggcgttggtcagaggagtcttcatgaaggtggtgaagcccaag

SEQ ID NO: 170 - DNA, 2947 bp, Artificial
  cDNA Sequence
ggcgccgtttccagttgagagatggcggccgccgcaggtagatcgctcctgctgctcctctcctctcggggcggcggcggcgggggcgccggcggctgcggggcgctgactgccggctgcttccctgggctgggcgtcagccgccaccggcagcagcagcaccaccggacggtacaccagaggatcgcttcctggcagaatttgggagctgtttattgcagcactgttgtgccctctgatgatgttacagtggtttatcaaaatgggttacctgtgatatctgtgaggctaccatcccggcgtgaacgctgtcagttcacactcaagcctatctctgactctgttggtgtatttttacgacaactgcaagaagaggatcggggaattgacagagttgctatctattcaccagatggtgttcgcgttgctgcttcaacaggaatagacctcctcctccttgatgactttaagctggtcattaatgacttaacataccacgtacgaccaccaaaaagagacctcttaagtcatgaaaatgcagcaacgctgaatgatgtaaagacattggtccagcaactatacaccacactgtgcattgagcagcaccagttaaacaaggaaagggagcttattgaaagactagaggatctcaaagagcagctggctcccctggaaaaggtacgaattgagattagcagaaaagctgagaagaggaccactttggtgctatggggtggccttgcctacatggccacacagtttggcattttggcccggcttacctggtgggaatattcctgggacatcatggagccagtaacatacttcatcacttatggaagtgccatggcaatgtatgcatattttgtaatgacacgccaggaatatgtttatccagaagccagagacagacaatacttactatttttccataaaggagccaaaaagtcacgttttgacctagagaaatacaatcaactcaaggatgcaattgctcaggcagaaatggaccttaagagactgagagacccattacaagtacatctgcctctccgacaaattggtgaaaaagattgatctgcaaaaagcctctgaatcctggcagaaggaacacctgtttgcctttttaattaaagcattgcaggtggaagctgggagccatgtggggggtagagcgtttttacctttaattataaaacaaaaacagaaaggatctgagggaagaagggaatgttaaaacctgaggatcaggcattgtggaatataagctcaaagggcttagtgaatattgtcttaaccaagtatctcagtttctggatgaaaatgatgcagttatatagttgagagattcataaagagaaaacaatgctgggggtgttcgtttcttgcatcttctttgcagagtcagcaaaagagtaacacaccagcaccccactcgactctatttgtttttaatttaactgtccctatttttgacataggagtaaataaatatactagaaaagcaaattctcatgatatgctaaaatatcattagcatttattttaaattggacccagtctctgcagagttaccaggaatctttccttccagcatccctttactgaccacctacctgtacctcttggttacactcattttttccatttgataattggaaccaacttataactgtttaataattgacactttagattatctcttaataccttcttaaatgtctatatatcccagtgctctggatcagtgtctaaaaatcactggcaacactgcatgaggttgttggttttgttttgttttattaattagtctttcacaggaggaataattgccctcctttatatacttatctattgataatcccctctccctccagaacacaaatcagagggaaagggggtgttcagctgtactaccaaatcaggaagatgtaaggtttacaaattggctaagaatcatggctctgtagccatttcaaccagaataattttattgctaatctgctttgtgtgacagcattccaggccagccagatgggactgccttgtctggaggctttgttcatctcgaaggacacacacttccacactgtttgtgagccctcccacctccacaacttcagttgtaaatcaagtgtgtggatctcaaagggtgcaatttatctttatataggaatacatttctagggcttccttcaagcccactctcttcaccctattttttcttatcttaaattgagagaaagagaattaatcttatactttgtcaaaacattttctaccatatttccagatgacatctgcgcttgaagagtcaaaggaatctgtgtctaatatcctgtttttaactgctgtaggggcaggatggaaaggatgatgggggctgccacaccactgattggccttttctttcacgtgattcatccttcctcattgtggcaaggagtttctttctctttttcttcctcctttgggatcattgtgtatgaaaagaaaaactttaaatgacaaacccagactccaggtgccttgcaaaggttgaaggccagccaggattgctgctgctgctgctactcctgccaacacccctttcattggcatgacggaatgaaaggatgcatgtctccacttcctgaccctccgcccacttccttctccctccaccacccccagtcgtcagctccttccctcatttatttttgttaagttgtgtgaattatttttaacccatttatcctgtttgtgcatagggtttttaagaagaaacagcacagtgcaacgagcaaatctttttggggtgtgtgggaagcaagggagggaggacatggagaaaagttctttaaacaaatagcaaactattgaacatgtgtaaaatcctgtatcatttatgaaatatgtataaaaagcaatgtaccttctggaacaataaatacttattcaatttttg

SEQ ID NO: 171 - DNA, 2872 bp, Artificial
  cDNA Sequence
agttgagagatggcggccgccgcaggtagatcgctcctgctgctcctctcctctcggggcggcggcggcgggggcgccggcggctgcggggcgctgactgccggctgcttccctgggctgggcgtcagccgccaccggcagcagcagcaccaccggacggtacaccagaggatcgcttcctggcagaatttgggagctgtttattgcagcactgttgtgccctctgatgatgttacagtggtttatcaaaatgggttacctgtgatatctgtgaggctaccatcccggcgtgaacgctgtcagttcacactcaagcctatctctgactctgttggtgtatttttacgacaactgcaagaagaggatcggggaattgacagagttgctatctattcaccagatggtgttcgcgttgctgcttcaacaggaatagacctcctcctccttgatgactttaagctggtcattaatgacttaacataccacgtacgaccaccaaaaagagtagagatggggttttgccatgttggccagaatggttttgaactcctgacctcaagttatctacctgcctcagcctcccaaagtgccgagattatagccgtacgaattgagattagcagaaaagctgagaagaggaccactttggtgctatggggtggccttgcctacatggccacacagtttggcattttggcccggcttacctggtgggaatattcctgggacatcatggagccagtaacatacttcatcacttatggaagtgccatggcaatgtatgcatattttgtaatgacacgccaggaatatgtttatccagaagccagagacagacaatacttactatttttccataaaggagccaaaaagtcacgttttgacctagagaaatacaatcaactcaaggatgcaattgctcaggcagaaatggaccttaagagactgagagacccattacaagtacatctgcctctccgacaaattggtgaaaaagattgatctgcaaaaagcctctgaatcctggcagaaggaacacctgtttgcctttttaattaaagcattgcaggtggaagctgggagccatgtggggggtagagcgtttttacctttaattataaaacaaaaacagaaaggatctgagggaagaagggaatgttaaaacctgaggatcaggcattgtggaatataagctcaaagggcttagtgaatattgtcttaaccaagtatctcagtttctggatgaaaatgatgcagttatatagttgagagattcataaagagaaaacaatgctgggggtgttcgtttcttgcatcttctttgcagagtcagcaaaagagtaacacaccagcaccccactcgactctatttgtttttaatttaactgtccctatttttgacataggagtaaataaatatactagaaaagcaaattctcatgatatgctaaaatatcattagcatttattttaaattggacccagtctctgcagagttaccaggaatctttccttccagcatccctttactgaccacctacctgtacctcttggttacactcattttttccatttgataattggaaccaacttataactgtttaataattgacactttagattatctcttaataccttcttaaatgtctatatatcccagtgctctggatcagtgtctaaaaatcactggcaacactgcatgaggttgttggttttgttttgttttattaattagtctttcacaggaggaataattgccctcctttatatacttatctattgataatcccctctccctccagaacacaaatcagagggaaagggggtgttcagctgtactaccaaatcaggaagatgtaaggtttacaaattggctaagaatcatggctctgtagccatttcaaccagaataattttattgctaatctgctttgtgtgacagcattccaggccagccagatgggactgccttgtctggaggctttgttcatctcgaaggacacacacttccacactgtttgtgagccctcccacctccacaacttcagttgtaaatcaagtgtgtggatctcaaagggtgcaatttatctttatataggaatacatttctagggcttccttcaagcccactctcttcaccctattttttcttatcttaaattgagagaaagagaattaatcttatactttgtcaaaacattttctaccatatttccagatgacatctgcgcttgaagagtcaaaggaatctgtgtctaatatcctgtttttaactgctgtaggggcaggatggaaaggatgatgggggctgccacaccactgattggccttttctttcacgtgattcatccttcctcattgtggcaaggagtttctttctctttttcttcctcctttgggatcattgtgtatgaaaagaaaaactttaaatgacaaacccagactccaggtgccttgcaaaggttgaaggccagccaggattgctgctgctgctgctactcctgccaacacccctttcattggcatgacggaatgaaaggatgcatgtctccacttcctgaccctccgcccacttccttctccctccaccacccccagtcgtcagctccttccctcatttatttttgttaagttgtgtgaattatttttaacccatttatcctgtttgtgcatagggtttttaagaagaaacagcacagtgcaacgagcaaatctttttggggtgtgtgggaagcaagggagggaggacatggagaaaagttctttaaacaaatagcaaactattgaacatgtgtaaaatcctgtatcatttatgaaatatgtataaaaagcaatgtaccttctggaacaataaatacttattcaatttttg

SEQ ID NO: 172 - DNA, 789 bp, Artificial
  cDNA Sequence
atgacccagccggtgccccggctctccgtgcccgccgcgctggccctgggctcagccgcactgggcgccgccttcgccactggcctcttcctggggaggcggtgccccccatggcgaggccggcgagagcagtgcctgcttccccccgaggacagccgcctgtggcagtatcttctgagccgctccatgcgggagcacccggcgctgcgaagcctgaggctgctgaccctggagcagccgcagggggattctatgatgacctgcgagcaggcccagctcttggccaacctggcgcggctcatccaggccaagaaggcgctggacctgggcaccttcacgggctactccgccctggccctggccctggcgctgcccgcggacgggcgcgtggtgacctgcgaggtggacgcgcagcccccggagctgggacggcccctgtggaggcaggccgaggcggagcacaagatcgacctccggctgaagcccgccttggagaccctggacgagctgctggcggcgggcgaggccggcaccttcgacgtggccgtggtggatgcggacaaggagaactgctccgcctactacgagcgctgcctgcagctgctgcgacccggaggcatcctcgccgtcctcagagtcctgtggcgcgggaaggtgctgcaacctccgaaaggggacgtggcggccgagtgtgtgcgaaacctaaacgaacgcatccggcgggacgtcagggtctacatcagcctcctgcccctgggcgatggactcaccttggccttcaagatctag

SEQ ID NO: 173 - DNA, 4305 bp, Artificial
  cDNA Sequence
gaatcactccgacccccccacctccgcccagatcccgagaaaaagaaagccctagggtggcagccagggtagtggtcccagtgcgatccagagagagggtccttacctcgatggggctgaccggcgtggaaggcaggggctgcaggtactcggggtgcaaaatgtggccagttcgtgccgtcagcatcttcagcaccttgattggcaggcggttggcctggcgcagggggtcagaggggggcacggcgtgcacaaaaggcttggtgctgccggccggggacgagcctgggccggggccggagctatttccagagagcgcgctggtccaggcagggtctgcaccgccgcctccgcctccgccgccgccgccgccgctgtgcttactgcttcttagggcagaaagcgagggcgctgtgctcatgacccacccgcgcgcatgggagcagcgggggggagggctccgggaggcgcggggcgggctcggggctgcgcgctcgccccgggagcaggagcagcgggaggaggaggagctggcgcggcggccacgggcgcccagcgcgccttctcggcgcctggagccagacgcgagtaatcctgggtggcccgcagcggagccgtggccgggctagaggagccggctggactgcgggagtgccgggcggctcgcggtgtccgcctcgggctgctcccctgcgctgcgttctcgcggccccgcgccggcgctgcgctctgcgatgcgagccgctgcgtgtccagccggggctctggcgaggaaactcacttcaaaagcagctgcaccaagggggagattaaagcctttgccgccttccaatcaaatgggagcccgaggtgattggagggtcaaggggatgtgacgcgtcccgcgccgccgccgccgccgctgccaggactctcagtgccggttttaatgggcagctccctcttcgccgcccccctgtgtgtcccctccctcgatttcgctgggaggacgagatggacatttattctacgtttgccatccgccgcctccctcttttttcctcctcgtcgttcttcctttccccagctcgaaaataaactgaaaccttcttttgaaggggggtgcgcgtgaggaacagactgcggggggtgtccagaaggagcaccggtgggagtgtggacaccggccggactgtcaactccaggggcgaagggaacctgcacacccagtgttttttccttcgcagtaatcgagatcccgcgcggcgcagcgcagccaccagggtaagaaggcaaggtggggagccggagctggaagaagcccgcccgcccgctctaatttcctcagattccgcggcggagaaaccagaagctagatgggcagtcgcagcggcggcggctcaacaccgcgaggagcgctgggctctccgcccttcccggccacgtgacgcccggggacgcgtagattggggcagcagcgggggtcacatgtttcctctgtttcaccctcagtctgtcccccaaccccccattcttactctcccaccctgttttcctccctcccccccttctttgggcatctccacccctccatcaattgtcaatgttcctcgaccgcaatcaatcagttatttgtcagctcttgtcaatcctcccgtgatttatgtcagcttttgttgctgattacaaggcgggtgcgacttgaagggaaaaagagagagggagagagagacggagaggaaggaggagattgagagggaactggaggaggggaaaagaggagcggcctcctgggatgggggtggggtgggggctctaagaaaaagaatgaaagaggcgcacggtgtcaggaaaatgaatagcgagagtaaagtgcgcaggtgcgcccagggcgccgagaggggcgcgcaggcctggagtgtgcgcctgccctctcggtgtcggagagacgcccttccacctctgggagcctcggtctgttggggtcgcggagttcgggcgcggctccgggtacccgagaccagcggcggcaacttctaacacgggagatttcccgccaccccaccccgccgccgcgagtcctcgcggggcgtgttgcgtgcggaggtcaggctgccaccctctgtagttccctaaccccaaactcggagacttctaagagccacaccaccaaggaacttctagtcctggaggtcaatggtggggcaaacctcgcctcaattctttgaccccctcgggtcgtaagcagggctaagaggctgcgaagaagaggcctggccatgggtgtatgggggaagaaacatctcaggctcactcatgccccctccccgaccttctcccacctgccgccatccccgcaggctggggagccagggtaactcggggctgctctctcgaatttattggaacgccgagtcggaatgagctgcgctaggagagccgagggaaggagcgagagagggagggggcggctgcctgtgggaacgcgggttcttccagggaagcggagcgggactgccgcgttcccctcgatttgcaccgtcactcgggttgtttgggaagaaaaggggaggcgctgtgcgtgccaccgggtacctggacctggatgcccagtgtgtatgcatgcctgtggcgctgcgtgagttatcggggctctgatagcgtccggagcgggttcgagggtctcctccaggaactcgcagaaattagagggggtggggaggaggacacacccccttcctcggaacgacttagaagactttgaatctcccctcctccgcttttccgccccggctcttcttttgttgtcaagtccttttgataaatggtggggctgggagctctgggagtcgggagccagtctgtgcccgcgtggggggcgggggccgagcctggagacccggtttcgaccggcgcgcacctggggctgagccgggtgcgcgcgggggtcgggtctggaactgcccttggtatgctcgccctctcctcttggcccatctcactcccctcccccacctgactcccctccccggcttctttctctgtctcccactccgcacgggtaccgagaactttccggggtgagttttagaatttgctcctaggcattctttttctgcgtttggattttatcccttgattctttgggttggtaaactttatgaaatggtaacttgactgaagctcatttggagagaagaggggagtgaggcggtgtgtgcttggggctggtgtttgtcagtgtgagcgtgtaagagcacacctgcattcaagggggtttgtagtgtccgtgcgacatctgagggaggtgagtcggcgagcgggtggcgaggccccacgctgagggaggcggttgtctggtctccggggagcaagtcccaggtgcgcgtttcggagggcgggacagtcctacgctgtctctgcggggcagcgcgtctgtgaagcactcttatccttcgggtgtgtccatgtgtgcctggttactgagtgcgcggccgtctaggtgtcgacccaaccaatggtagtgctcctaacgccgcgagcccacctttgggccgctatcgccgcggcctccccgcgaggcccgggcactgaaattctggggcctgcgacagggccgggggggacgcagccaagggcgtccctccccagcctccagactcagctcttccccctctcctctaattccagcagcttattacgccggcggctcaggggaggcagcctcagcacctgaagcctgggggggccgtggagtggctcctgcgtcccccggtgtggccacacacgctcgtggggctgcgctgtgctgcgtgggtgcgggtcgtggtcagcgtgcgttcgcttttctcaaaactccactccgagggtccgagcgcatgggggcgcctgggggcctgcgcgcccggggcttttgggaggcgccagcgtccgagcctgcgcacctcgcgcaggaggccaaacccccgaaggccggcgcgggcccgggagtgggggccattaattactctgcgccaggcctaaagcctccaacccccagcagcagttggcgtggatgtcctgcggattttatttgcaaacaatggaaatgatttgttttctctaaaaaaggagtgggcaaggcagatattggaggagggggtgggaggaggagaaggaaggggaaagagctgaggaaaaaagtttgaaaatgccttgaactattcactgtcgagatggctaatcagtattgaggccggagggcaggcgggccgcctttcaccgccgcttccctttcatctcgggctcggcggaggcgctcaattaaaagcctatcagtttgtaagt

SEQ ID NO: 174 - DNA, 156 bp, Artificial
  cDNA Sequence
gcagaaaagaaatggtttacagatgaaccggataatgcctatcccagaaacattcaaatcaagcccatgagtacccacatggctaaccagatcaaccaatataaatccacaagcagcttgattccaccaatcagagaagttgaagatgaatgttga

SEQ ID NO: 175 - DNA, 165 bp, Artificial
  cDNA Sequence
ctgtcctcttacagcaataattacctgtggataatagattatattattggaagggcacacacgcttgctgccagccacgttcttcttggtgggctgcccacttctgctgcagaactgatgagcatcatgccagcggagaagagcttgagcctaggaacacaatga

SEQ ID NO: 176 - DNA, 2091 bp, Artificial
  cDNA Sequence
gacaccgcgagccgcccggcactcccgcagtccagccggctcctctagcccggccacggctccgctgcgggccacccaggattactcgcgtctggctccaggcgccgagaaggcgcgctgggcgcccgtggccgccgcgccagctcctcctcctcccgctgctcctgctcccggggcgagcgcgcagccccgagcccgccccgcgcctcccggagccctcccccccgctgctcccatgcgcgcgggtgggtcatgagcacagcgccctcgctttctgccctaagaagcagtaagcacagcggcggcggcggcggcggaggcggaggcggcggtgcagaccctgcctggaccagcgcgctctctggaaatagctccggccccggcccaggctcgtccccggccggcagcaccaagccttttgtgcacgccgtgcccccctctgaccccctgcgccaggccaaccgcctgccaatcaaggtgctgaagatgctgacggcacgaactggccacattttgcaccccgagtacctgcagcccctgccttccacgccggtcagccccatcgagctcgatgccaagaagagcccgctggcgctgttggcgcaaacatgttcgcagatcgggaagcccgacccctcgccctcctccaaactctcctcggttgcctccaacgggggcggcgcgggcggtgccggcggcggtgctgcgggcgacaaggacaccaaatcgggccccctgaagctgagcgacatcggcgtggaggacaagtcgagtttcaagccgtactccaaacccggctcggataagaaggagccgggaggcggcggtggaggcggtggcggtggcgggggcggcggcgggggtgtttcgtcggagaagtcgggattccgggtaccgagcgccacctgccagccattcacgcccaggacaggcagcccgagctccagcgcctcggcctgctcgccgggagggggacccacggggctggcacacggccggattagctgcggcggcgggattaatgtggatgtgaaccagcatccggatgggggcccgggaggcaaggctctgggctcggactgcggcggttcatcgggctccagctccggctccggccccagcgcgcccacctcctcctcagtgttgggctctgggctggtggctcccgtgtcaccctacaagccgggccagacagtgttccctctgcctcccgcgggtatgacctacccaggcagcctggccggggcctacgccggctacccgccccagttcctgccacacggcgtggcacttgaccccaccaagccgggcagcctggtgggggcgcagctggcggcggccgcggccgggtctctgggctgcagtaagccggccggctccagccctttggccggagcgtctccgccgtccgtgatgacagccagtttgtgccgggacccttactgcctcagctaccactgcgctagccacctggcaggggcggcggccgccagcgcttcttgcgcacatgatccggctgctgcggctgcggcgctgaagtccggatacccgctggtgtaccccacgcacccgctgcacggtgtgcactcctcgctaacggccgccgcggctgctggcgccacaccgccctccctggccggccaccccctctacccctacggctttatgctccctaacgacccactcccccacatctgcaactgggtgtcggccaacgggccgtgcgacaagcgcttcgccacgtccgaagagctgctgagccacttgcggacccatacggcatttcccgggacagacaaactgctgtcgggctaccccagctcgtcgtctctggccagcgctgccgcggccgccatggcttgccacatgcacatccccacctcgggcgcaccgggcagccctgggacgctggcgctgcgcagcccccaccacgcgctgggactcagcagccgctaccacccctactccaagagcccgcttcccacgcctggcgcccccgtgccggtgcccgccgccaccggaccgtactactccccctacgccctctacggacagagactgaccaccgcctcggcgctggggtatcagtga

SEQ ID NO: 177 - DNA, 1833 bp, Artificial
  cDNA Sequence
agaagcagcaatggtccctccagggaacggaagccgttgaacgtgaacatttggagtttcctcttttgtgctgattcctgaggactaggaaggtgccccgaaaagaattcagagacctgacaatgtccctgtattgtggaatagcttgcaggagaaaatttttttggtgctataggctgctgtcaacctatgttactaagacacggtatttatttgaactgaaggaagatgatgatgcatgtaaaaaagcccagcaaacaggagcgttttacctctttcatagtctggctcctctgcttcagacttcagcacatcaatacctggccccccggcacagcctgttagagttggaaaggctcctgggtaaatttggacaggatgcacaaagaatagaagattctgtgctgattggatgctctgagcagcaggaagcatggtttgctctggatctaggtctggatagctccttttccataagtgcctccttacacaaacctgaaatggagacagagctcaaggggtctttcattgagctgagaaaggcactctttcaactcaatgcaagggatgcctccttgctgtccacggctcaagctcttctccgctggcatgatgctcatcagttctgcagcagaagtgggcagcccaccaagaagaacgtggctggcagcaagcgtgtgtgcccttccaataatataatctattatccacagatccaggtgaacttgagagaattagagacagctgcctggttcagtcatgatgaggtagccacagccctgaagagaaagggcccctatactcagcaacagaatgggactttcccattctggctgccccctaagttagccatctcccaccaactgattaaggagtgggtggaaaaacagacctgttcttccctgcctgcttagcccggatcaagtcacttagatcgctccttggtattcctgagggacaaactagagatcagttgacaaaggagaagtgacaaaagataagctgcagaaggacctcagaagggcagagcaaagggtgagcctacagtaagacacttctatcagcagtgttaatggaagaaattcctaccaatgggcaatcaaaaaagccagtgtgagaagaaaactgatgagctgtcaactgtcaaaaatcagggggaagggggaagcattagtttggatgtaggcccttgttcagtcattttctctaaggccttggaagcaaacatcttctggcatatggcttgttaatgttgtgtttacactaactgccaaaatgtgcctgttgtaagtttggttaaaacttttatcttagtattgaaaatatatagcaagttttaagtcattactgagttacttgttacccttacagaattaagaaaaatagcacagtatgacattttaaaattcatgtacaggtgcattctagttacatgaacatgctagttaaataaaagtcacaattaagtcattatgactcagagtactttataataaatcagatgccctgaggctctgttgaggaagtagaatcccaatgggactccagacagtaaatctttttcgctgttttcagctctgtcacatgctcagtttgtgacccagggaaaagactattgctttgccatgcctgttttcctaaataaaacagttgctggcatttgcacatccacaacgtgttgattaacaaagggattggtggagataaacagatgccaaacctgacctatttcttaaactttatggaataaactaaatttaggatttctcatcattcatatatgatgccataagggagaagagtttatttggggaaaataaaagaaatttccac

SEQ ID NO: 178 - DNA, 1739 bp, Artificial
  cDNA Sequence
gggtaaatttggacaggatgcacaaagaatagaagattctgtgctgattggatgctctgagcagcaggaagcatggtttgctctggatctaggtctggatagctccttttccataagtgcctccttacacaaacctgaaatggagacagagctcaaggggtctttcattgagctgagaaaggcactctttcaactcaatgcaagggatgcctccttgctgtccacggctcaagctcttctccgctggcatgatgctcatcagttctgcagcagaagtgggcagcccaccaagaagaacgtggctggcagcaagcgtgtgtgcccttccaataatataatctattatccacagatggctcctgtggcgatcacgctggtgtcagatgggacccgatgcctgcttgcccgccaaagctcctttcccaagggaatgtattctgccttggcaggtttttgtgatataggtgaaagtgtggaagagaccatccgccgagaagttgcagaagaggtgggattggaggtggaaagcctgcagtactatgcatcccagcattggcccttccctagtggctcactcatgattgcttgccatgcaactgtgaaaccagggcagacagaaatccaggtgaacttgagagaattagagacagctgcctggttcagtcatgatgaggtagccacagccctgaagagaaagggcccctatactcagcaacagaatgggactttcccattctggctgccccctaagttagccatctcccaccaactgattaaggagtgggtggaaaaacagacctgttcttccctgcctgcttagcccggatcaagtcacttagatcgctccttggtattcctgagggacaaactagagatcagttgacaaaggagaagtgacaaaagataagctgcagaaggacctcagaagggcagagcaaagggtgagcctacagtaagacacttctatcagcagtgttaatggaagaaattcctaccaatgggcaatcaaaaaagccagtgtgagaagaaaactgatgagctgtcaactgtcaaaaatcagggggaagggggaagcattagtttggatgtaggcccttgttcagtcattttctctaaggccttggaagcaaacatcttctggcatatggcttgttaatgttgtgtttacactaactgccaaaatgtgcctgttgtaagtttggttaaaacttttatcttagtattgaaaatatatagcaagttttaagtcattactgagttacttgttacccttacagaattaagaaaaatagcacagtatgacattttaaaattcatgtacaggtgcattctagttacatgaacatgctagttaaataaaagtcacaattaagtcattatgactcagagtactttataataaatcagatgccctgaggctctgttgaggaagtagaatcccaatgggactccagacagtaaatctttttcgctgttttcagctctgtcacatgctcagtttgtgacccagggaaaagactattgctttgccatgcctgttttcctaaataaaacagttgctggcatttgcacatccacaacgtgttgattaacaaagggattggtggagataaacagatgccaaacctgacctatttcttaaactttatggaataaactaaatttaggatttctcatcattcatatatgatgccataagggagaagagtttatttggggaaaataaaagaaatttccac

SEQ ID NO: 179 - DNA, 5183 bp, Artificial
  cDNA Sequence
ggaataacaaaacatgctcttaaccatcatccccctccagagaagctggaggaaatttcccccaccagtgacagtcatgagaaagacacaagttcccaaagcaagtctgacatcacaagagaatcatcttttacatcagccgacactgggaattcactgtctgcttttccaagttatacaggcgcagggatatctactgaaggaagctcggacttctcctggggatatggtgaactcgatcaaaatgccactgaaaaagtccagacaatgttcacagccattgatgaactcttgtatgagcagaagttgagtgtgcataccaagagtctacaagaagagtgccaacagtggacagctagctttcctcacctcaggattctaggtaggcagataatcactccaagtgaaggttatagattgtatcctagatccccttctgctgtttccgcttcatatgaaacaaccttgtctcaagaaagagattctactatatttggtataaggggaaagaagttacatttttcatcttcttatgctcataaagcatcttccattgccaaatcctccagcttttgttctatggaaagagatgaggaagactctataatcgtctcagaaggaataattgaggaatacctagcattcgatcacatagatatagaagagggatttcatgggaagaaatcagaagcagctacagagaaacagaaattagggtatcctcccattgctccattttactgcatgaaagaagatgtccttgcttatgtgtttgacagtgtatggtgcaaggttgtgagctgtatggagcagttgacacgtagtcactgggaaggatttgcctctgatgatgagagtaatgttgcagttaccagacccgattcagaaagttcctgtgtgctgagtgaactacatcctttggtgttaccgcgagtgccacagtctaaggtgctgtacattacctcaaatccgatgagtctctgtcaagcaagcagacatcagccaaatgtgaatgatctcttggttcatggaatgcctctacagccaagaaatctctccctaatggacaagctcctagatcttgatgacaagctacttatgaggcctgggtccagtaccatcctttcaactcgaaattggccaaatcgagctgtggagtttagtacatcatctctgtcatacacagtgcagtccaccaggagacgcaatccaccaccacgaactcttcatccgatcagcacgagccattcatgtgctgaaacaccaagatctgtggaagaaatcctcagaggagcccgagtcccagtggcacccgactcgctctcctctccctcaccgacgcccctgagtcgaaataatctgctaccacctattggcacagctgaagtggaacatgtgagcactgtggggccacaaagacagatgaaaccccatggcgactctagtcgagctcaaagtgcggtggtggatgaacctaactatcagcagccacaagaaaggctccttttgcccgactttttccccaggcccaacacaactcaatcatttttgctggatacacagtatcgtcgctcatgtgcagttgagtatcctcatcaggcccgacctggcaggggatctgcaggtcctcagttacatgggtctacaaaatctcaaagcggaggcagaccagtctctcgaaccaggcagggaccataaggcaaatgagaagaatctatcaggctgcaggaaacacgagatttcatgaagcagtattcagtcatcaagtgatgcagagcttgtatagaagatcgactagaaatcatcttcatgaagagtgattttggcacaagtgaccgaagaacaaaacaccatagcagccaaaaatgacatgagtgttgtttctatctccagttactgtctctttcagcagaaattaacctatcccattggaaaggcaagtttgtacccaaagatgcaacagtgaataatacccaaatcactgctcatgttatctcttaacaatgatcagttcaatcatataggatttgatgagctcacacatacacaaaaagcagcaaatcatcagtgacaatatcactggcttcagaatacttcagcctgtgttcatttctggagagttgtactcagttttaagtcattttgctgttgaaaatctgacctcatcaaatagatgtcattcctaaaactctctttagatgtcctaccctatcagcagattaaaatggaaggggtgtgtaactaaaaacataaatgttaagcattagtataaagtaacttctgtaataaattatatcgcatattttttcagataggacagctcaaccttacgatgcctacctgatgccaggtgatgcttattttcttcctaaagtaggttactggtcatatcttttttccaaatattaaatgcaccttgccagatattctcctgcagctctaaggaaaggaaatcaatttaaaaataatttgtagaatctactattgagccaccaaagtataattccctaaaagtttaagaaaccctggcaattaattcagcataaacatatcctataaacagcaggagaggttcagctttctgattttactgtggaccttttcctaagggcattcatgaatgcagcaacagttttaactatggcttacatttattttaaatttcactaaatacaaatcttgattgtcatgccagttttagatcttattaattttcagaatggataaattcaaataatcataaattacggtaactttttattataccaaggtgttctaatgccatcatatgaagacagatgcttcaaacaacctgcattaaattatatttttaataaaattaaaatctatttttaacctatttgtagtcacaaaccgaaaacgtgtcgtctttaccttagagctaaaggcttactttatgcatacggtatatttaatagtctacaaatcaaagatttaaacagtcccttaaaaattccatatattctcataccaactcatctacatagaaatgaaaatctctattgttctcacaaaccattaccatgagttcactataacaactggatcaatatggcttgcctttcaaagttaaagaatcagaaaggggcctgtaagaagtcatttagcccaattccctcaccctgtgtgttttccctcaaagccagtgcaatttttttttaaccaaaaaactggacatgtttaatacatacagtttgacaaatttggatttcactctttgttttgatgtagtaactcttttataaaagggaacagattcagacaagctcagtggcccaactgaagacattcagcaattaatggcaggacttcagtaatcagtggcaggactacaacatacatctcttcatgctagggaaaccaggctctctattataaagctgaccagggctattgttttccccttttctctcatcctaaacaccattcatatttttcctaggtcacattttagtgggatcatttacaaagcccccagaacttaatcatcatgttttaccttttttattgaattatatacacctcttacaaaaatgcttgaagtaatttaacacctgtacatcagtacaaaacctggctgagtaaaatgaagagaggatctattcaagatcattaagaccaaatgtaaactgggaagtatgtggaagatagctgtccagcaagtgtctggaaggtgttctagctgggtagagagcctattctaacagacacgcacatcgcagaaagcagcatgaacagaaccacatcctagataagagttctgtgtacagaagatccatggaggcaagtgctgtcaggaaggacactgcctccctccaccctcccaaatgtcaccaccaagttccttcaggtgagacctcacacaatgtcaagtgctttctaggaaatactaagatcaggttgagagattctgcttggtctagtcaatctgaaaaattcaggctggaaagacaccttttctcaagagctgaattgacttttgccttcaaatcctgcctgcaccttgcctacgatggcatcaatttacacctaaggacctttgaagagaaaaattccattatttcttttctttcttgagagcagattttttccctcctcctttggaagatttgcagtactttgcttccatctgagccagaaaattgtccatttccttttgccgatccttttgtctgctctgtttgagaagttaaaacacaagctttcacaacattatccatagacagaaagtacctagtggttgccaggggctggaaaagtggaataactactaatgggtatggagtttttttggaatggtgaaaatgtcctacaattggtgttaataattgtaaaactttgtaaatacacttaaaaccaccaaattgtacactttaaaaggacaaatagaaggtatgcggttatgtcttaaaagaagaaaacaaaatacaacattccaaagaaaatattagcagtaggaatcagatcattaaagatgtggcaacaaactgccaagtttacctgaatggctgccttcaggctatccacgccttcatcaagccccaactcctttctgctcatttctgcttctttggcctcttcctgagcctgaaacaggaactcacatgagactcagggccaccaggaaatgcttaaaatacatactctttcccaaaagcaaatctataattctgtttcaattttatgaatatatgaatagacaaaatgaatcgaattacataactatgtcattcattaaatggcaacaatgctgacagcaagcagtagatcctctgattccaattaccatttgttttttacccaattctatttgctagaggtagtaagtactctggcactcataaatcacatgatgataaaaaggaacatgaggccgggtatggtggctcacaactgtaatccccataccttgggaggccaaggtgggaggatcacttgaactcaggagttcaagacctgcctgggtaacatagtgagacctcagttctataaaaaagaaaagaaatgagcctggtgtggtggcatgtgcttgtagtcccagctactagggaggctgaggtgggaagatggcttcagtctgagagttcaggctgcaataagctgtgatcatgcctctgcactccagcctgggtgatggagatgccatctcttagaaaaaagag

SEQ ID NO: 180 - DNA, 3024 bp, Artificial
  cDNA Sequence
atttcagtgtgcgatttcaattttccgtagcaaatgtatatatagaaaaatgttaaaatagatgtatttgaataccttaaaaaatacaagaaactggaagaaagataatattgcaaagcatctacatatatcctaggccttttgtgtacaaggttatttgtgacaattgtaaggtattatgaaggcaggtaggattatctccgttttacagatagggaagctgaggcctagaggtggaaacttgcccagtgatgtaagattcatctcccggttatgccctcctggaaagcccttcccaacatattatgttgtccatagagggaaaaatgagcaaagacagatggcttaactctggtgtgtgactaagatataggaaatttatagaggaggttctatcaatgtgccgacttactttgtgttttatgttctgagaacgattaccagccatctcaaattctgtggttgtcaaagctcccctggggttgttgctggttggcccccacttgctttgagactttgatgccagggcaggttgagaggaactgacttcagctgagtttgatcttggatctgggaaagagaaatgctttgaaaatcacggcaactctgggaagtttaaaagatattaatgtatcctggagagtttgaggctttgcagaaacttattggcagagcagaatgattctgaaaaatgctacatcagtgaggggatatttgataaggtattttctgccaactcgggtattcacttagcattgtttatcctttaagatatgtatacacatacttcctctgtgagtttaccctactaacaaagttttatccccagcctcaaccttgctttgggtctccaggcccaagtttctcaccatctcttggatgattgctccagcccactctgctgccacctgggatccaacatgttcaaacccagctgtgaacttcacagagtattaaaagaaagagcctttgcttcagcagtttatgttattaagacggaggcttgggtcatgttatctctctccaccaatgtgtaaggtgaaagtcctattaggtaagagtttttggaagacccgtgttttgtgctttttgggtttcagtatagggttttttcctacagggctagagggaaagtaccccagcatttccaaccagtggggtgcaaaattatttgggtctacagctttacctattcctttcaagaacatttttgaaaaaacacatctgttaagttgaaccatgtgtaactgctgaatgctgatgtttggccgttttctacttaaaaaaataggccagcagtttgtaaattcaagctaatatatgaactttttgaaaaagttgttcttggacactaaaaggtaagacggacgccagatttccagagcaaggggaggagagacccgagcaacatcacttccctgaagacctagctcctgcgcgcggccggggactgtgactccacatgccggcgttacttacccgggcccgcgcctgactcgccacacctcattttgcggccgccgtaaagcgcggatgcgcggcgtggccacgccccttcagtgcttgtgacgcaggcgccctgggctttttgggcgcgaaaaagaagcagtcctgggttgtacccggcgcagctgggagcggctgcttcctccggggtcgtatctccgcccggcatggggctgctggacctttgcgaggaagtgttcggcaccgccgacctttaccgggtgctgggcgtgcgacgcgaggcctccgacggcgaggtccgacgaggctaccacaaggtgtccctgcaggtacacccggaccgggtgggtgagggcgacaaggaggacgccacccgccgcttccagatcctgggaaaagtctattccgttctcagtgacagagaacagagagcagtgtacgatgagcagggaacagtggacgaggactctcctgtgctcacccaagaccgagactgggaggcgtattggcggctactctttaaaaagatatctttagaggacattcaagcttttgaaaagacatacaaaggttcggaagaagagctggctgatattaagcaggcctatctggacttcaagggtgacatggatcagatcatggagtctgtgctttgcgtgcagtacacagaggaacccaggataaggaatatcattcagcaagctattgacgccggagaggtcccatcctataatgcctttgtcaaagaatcgaaacaaaagatgaatgcaaggaaaaggagggctcaggaagaggccaaagaagcagaaatgagcagaaaggagttggggcttgatgaaggcgtggatagcctgaaggcagccattcagagcagacaaaaggatcggcaaaaggaaatggacaattttctggctcagatggaagcaaagtactgcaaatcttccaaaggaggagggaaaaaatctgctctcaagaaagaaaagaaataatggaatttttctcttcaaaggtccttaggtgtaaattgatgccatcgtaggcaaggtgcaggcaggatttgaaggcaaaagtcaattcagctcttgagaaaaggtgtctttccagcctgaatttttcagattgactagaccaagcagaatctctcaacctgatcttagtatttcctagaaagcacttgacattgtgtgaggtctcacctgaaggaacttggtggtgacatttgggagggtggagggaggcagtgtccttcctgacagcacttgcctccatggatcttctgtacacagaactcttatctaggatgtggttctgttcatgctgctttctgcgatgtgcgtgtctgttagaataggctctctacccagctagaacaccttccagacacttgctggacagctatcttccacatacttcccagtttacatttggtcttaatgatcttgaatagatcctctcttcattttactcagccaggttttgtactgatgtacaggtgttaaattacttcaagcatttttgtaagaggtgtatataattcaataaaaaaggtaaaacatg

SEQ ID NO: 181 - DNA, 2573 bp, Artificial
  cDNA Sequence
gttttcgggcttgtaccgcttggcggtgcggcctggtgtcggcttgcaggttctttctgtgtttgttctctgccctgccaaggccgtagagctggtgcgtgcgggtagcggggctctccgaggagccgcacgccggcggcaccatggtccacctcactgcttttctacagctactctcctctgcaaggcctaccgtgggggccacttaaccatccgccttgccctgggtggctgcaccaatcggccgttctaccgcattgtggctgctcacaacaagtgtcccagggatggccgtttcgtagagcagctgggctcctatgatccattgcccaacagtcatggagaaaaactcgttgccctcaacctagacaggatccgtcattggattggctgcggggcccacctctctaagcctatggaaaagcttctgggtcttgctggctttttccctctgcatcctatgatgatcacaaatgctgagagactgcgaaggaaacgggcacgtgaagtcctgttagcttctcagaaaacagatgcagaagctacagatacagaggctacagaaacataaatgagctgactttagtgagcatagcagtgggaacaaggtcaaggtccttttgaaacactgcagcgatcttaattttgttagatttggagttcaataaatggagtatcctgagttgcccttgctcttctggcctggcctgcacagggcccagggagagatttgttcttgtgtgacttagagctgggtgtgggtactaattagcttttttcgactttgtcttgggatagacagtggctatgggaggattggacttttgagttgggctctgggtctcttggacaactttacaatttactggcttccaagacttcctgcttcaaaacccccagccagactattcatggcccattcagatcttcatgttcatcccacaagtgcaagaacagttaacctttcttaattgatttttgtaattggaggtttatattgtcttgcctaatgcatattctctttttttttttttttttgagacggagtcttgttctgttgccaggctggagtgcggtggtgcaatctcagctcactgcaatctccacctcctgggttcaagaggttctcctgcctcagcctcctgagtagccggggagctacaagcatgcaccaccacacccagctaattttttttttttttttgagaggagtctcgctctgtcgcccaggcttgagtgcagtggcgcgatctcggctcactgcaagctctgtctcctgggttcatgccattctcctgcttcagcctcccgagtagtcccaggagtagctgggactacaggtgcccaccaccacacccagctaatttttttgtatttttagtagagatggggtttcaccatgttatccaggatggttttgatctcctgacctcgtgatccgcccgccttggcctcccaaaagtgctgggattataggcgtgagccaccgcccgggcaaatttttgtatttttagtagagatggggtttcaccgtgttggccaggatggtctcaatctgaccttgtgatctgcccacctcggcctcccaaagtgctaggattactggcgtgagccaccactcctagccttaatgcatattcttaaatatacaaaggtagatttgttatgaaaattgctttggggctctaataacctaccttttaagaatgagaaactgctgggcttaagggagttcagtatgaatcaagattgaaccattcaaatgtggctgtgatttctgcatatatcatagatgggatccttctgagaatactggaatagggaattaggacaccaagccaattcagctgtgaaccttattcttgtacttttctttcttgctggtaattttatggagcaggttaagaaggctgctctgtgttaggataaactgtataccaataatgttgacaacctgtaatgagtgttgcattttacttcttgtatcttttccttcctaccttgatgccagtaatctataagggatctttatagtttgaatgtatttgaataacttcagtatactttagttctacttttttatttgactcacaaccattcttaggtctcaagtattcccatgtgttttaaaagcctgaagtcagtgagatgaaattcaacatcaagaatttgaagtaacttgtaaggaaaaataatataaagataccattggggcagtggctcacacctgtaatctcagcactttgggaggctgaggtggaaggatcacttgaagccagagtttgagaccagcctgtgcaacacagcaagaccccgtctctacaaaaacttaaaaaattagctggctgtggtgttgctcacccatagttccagctactcgggaagctgaggcagtaagatcacttgagcccaggaggccgatgctgcagtgaactgtgattgttccactacagtccagcctgggtgacagagaaaagaaaaagaaaacattacataatttggctagagcataataatttgattttctggtttttgaaaatttgagttgcaataaaaggatatttcagtgtgcg

SEQ ID NO: 182 - DNA, 2200 bp, Artificial
  cDNA Sequence
caaggtttcggggactgagtgggtttcagactttctctcaggatttccgctggcttcaggttccggtcaggcgtcgggacagagcctgatccaggcttcggcggccggtggcagctctcgatcagctctcgcagtcggagaggcggctaaggaaaggtgccacagcagagacgcgaaggagaggccctagaaccttttcaaagaagaatggaagaaaccatgaagcttgctacgatggaagacacagtggagtactgcctgttcctgataccagatgagtcaagggactcagataaacataaagagattcttcagaagtacattgagagaataatcactcggtttgcacctatgctggtcccctacatctggcagaatcagcctttcaatcttaaatataaacctgggaaaggaggtgttcctgctcatatgtttggcgtgacaaagtttggggataacattgaggatgaatggtttattgtttatgtaataaagcagatcacaaaggaatttccagagttagtagcaaggattgaagacaatgatggtgaattcttgttaatagaagctgctgactttctccctaaatggctggatcctgaaaatagcaccaatagggtatttttctgccatggggaattgtgtattatccctgcaccaagaaaatctggagcagaatcttggttacccaccacacccccaacaattccacaagcattgaatataatcacagcacattcagaaaaaatacttgcttcagaatctatacgagctgctgtgaataggcgcatcagagggtacccagaaaaaattcaggcctcacttcatcgagcacactgcttccttccagctggcattgtggcagtgctaaagcagcgccccagattggtggctgcagcagtccaggcattttacctacgagaccctattgacctgcgagcttgtcgtgttttcaagacattcttgcctgaaacacgaataatgacatcggtcacattcactaaatgtctatatgcacaattggtgcaacaaaggtttgtgccagaccggcggagtggatacaggctgcctcctccatctgatccccagtaccgagcccatgaattgggcatgaaattggctcatggatttgagatcttatgctccaaatgtagcccacatttttctgactgcaagaaatcccttgtgactgcctcaccactctgggccagtttccttgaaagtctgaaaaagaatgattactttaagggactgatagaaggttctgctcagtaccgggaaaggctagaaatggcagagaattacttccagctctcagtagactggccagaaagttctcttgctatgagccctggtgaagaaatcttaaccttattacagacaataccatttgatatagaagaccttaagaaagaagcagctaatcttcccccagaggatgatgaccagtggttagatctctcaccagatcagctggaccagctgctgcaggaagctgttggcaaaaaagaatccgagtctgtttccaaggaggagaaggagcagaactatgacttaactgaagtctcagagagcatgaaagctttcatatccaaagtctcaacccacaagggagcagagctgcctcgagaaccttctgaggctccaatcacttttgatgcagattcttttcttaattattttgataagattttagggccaaggcctaatgagtcagattctgatgatctggatgatgaagactttgaatgtttagatagtgatgatgacttggactttgaaacacacgaacctggcgaagaggcttccctgaaaggaacacttgataatctcaagtcatacatggcccagatggaccaggaactagcacacacctgcatcagcaaaagtttcaccactaggaaccaagtggaacctgtatcccagactaccgataacaattcagatgaggaagattctggtacgggagaatctgttatggcaccagtagatgtagacctgaacctggtttcaaatatattggaatcctatagctcccaagctggactggcaggacctgcttccaatcttttacaaagcatgggagtgcagctgcctgacaacaccgatcacagaccaacaagtaagccaacaaaaaattaaccagcacatttagcttctcttttttctttttaaataaatattgaatatgattctgttc

SEQ ID NO: 183 - DNA, 8287 bp, Artificial
  cDNA Sequence
gacaacaacagggggacacaaaatggcggcggcttagctcctacccctggcggcggcggcagcggtggcggaggcgacggcacctcctccaggcggcagccgcagtttctcaggcagcggcagcgcccccggcaggcgcggtggcggtggcgcgcagccagatttgcctgaagacctggataatctccatttttgtcatggactgttaaaacgtttgaagttccaattctggtcttgatttcccagttaaagatgttcttcacccgaatgcagtctttcctgttggtaaaataagacaaccatcaacattgcctgtttgtctgcttttgaatctcttaaggatggatgtttgtaagatgttgcttaatacagtctggaatactctgtccatttgttgaattgtaaatgactttcaaatgtgcaagttctgttaaatacaaagagaacctctatgggtaacttttgtgttgaagaagtcatttgtcaaccatggtaaaacttgcaaacccactttatacagagtggattcttgaagctatacagaaaataaaaaagcaaaagcaaaggccctctgaagagagaatctgccatgcggtcagtacttcccatgggttggataagaagacagtctctgaacagctggaactcagtgttcaggatggctcagttctcaaagtcaccaacaaaggccttgcctcctataaggacccagacaaccctgggcgcttttcatcagttaaaccaggcacttttcctaagtcagccaaggggtctagaggatcatgtaatgatctccgcaatgtggattggaataaacttttaaggagagcaattgaaggacttgaggagccgaatggctcctccctgaagaacatagagaagtatctcagaagtcaaagtgatctcacaagcaccaccaacaacccagcctttcagcagcggctgcgactgggggccaaacgcgctgtgaataatgggaggttactgaaagacggaccgcagtacagggtcaattatgggagcttagatggcaaaggggcacctcagtatcccagtgcattcccatcctcgctcccacctgtcagccttctaccccatgagaaagaccagccccgtgctgatcccattccaatatgtagcttctgtttggggactaaagaatcaaatcgtgaaaagaaaccagaagaactcctctcttgtgcagattgtggcagtagtggacacccatcctgtttgaaattttgtcctgaattaacaacaaatgtaaaggccttaaggtggcagtgcatcgaatgcaagacatgcagtgcctgtagagtccaaggcagaaatgctgataatatgcttttttgtgattcctgtgatagaggatttcatatggaatgctgtgacccaccactttccagaatgccaaaagggatgtggatttgccaagtctgcagaccaaagaaaaagggaagaaaactacttcatgagaaagctgcacaaataaaacgacgatatgcaaaacccattggacgaccgaaaaataaattaaagcaacgattgttgtctgtaaccagtgatgaaggatccatgaatgcattcacaggaagggggtcacctggtaggggtcaaaagactaaagtctgtaccacaccttcatctggtcatgctgcatctgggaaggactcaagcagcagattggctgttacagaccccactcggcctggtgccaccaccaaaatcaccaccacctccacctacatttctgcctctacacttaaagttaacaagaaaaccaaagggctcattgatggccttactaagttttttacaccatcacctgatggtcgcagatcacgaggtgaaattatagacttttcaaagcactatcgtccaaggaaaaaggtctctcagaaacagtcatgcacttctcatgtgttggctacaggtaccacacaaaagctaaaacctccaccttcttcacttccacccccaacccccatctccggtcagagccccagttcacaaaagtccagcacggccacttcttctccctctccccagagttcttccagccagtgcagtgtgccctccctgagcagccttaccactaacagccagctgaaggcactctttgatgggctttctcatatctataccactcagggacagtctcgcaaaaagggacacccgagttatgcaccacccaaacgtatgcgtcgtaaaactgaattatcttccacggcaaaatctaaagcccacttctttggcaaaagagatattagaagtcggtttatttctcactcctcctcctctagctgggggatggctagaggaagtatttttaaagcaattgctcacttcaagcgaacaactttccttaaaaagcacaggatgctaggcagattaaaatataaagtgacccctcagatggggaccccctcaccagggaaggggagcttgacagacggaaggattaaacctgatcaggatgatgatactgaaataaaaataaacatcaaacaagaaagtgcagatgtaaatgtgattggaaacaaggatgtcgttactgaagaggatttggatgtttttaagcaggcccaggaactttcttgggagaaaatagagtgtgagagtggggtggaagactgtggccggtacccttctgtgattgaatttggtaaatatgaaatccaaacctggtactcctcgccttacccacaggaatatgcaagattaccaaagctttacctgtgtgaattctgtcttaaatatatgaaaagtaaaaatattttgctaagacactccaagaagtgtggatggtttcatcctccagcaaatgaaatttaccgaaggaaagacctttcagtatttgaggttgatgggaatatgagcaaaatttattgccaaaacctttgcttgttagccaagctcttcctggaccacaaaacgttgtattatgatgtcgagccattccttttttatgtccttacaaaaaatgatgaaaagggctgtcatctggttggatacttctctaaggaaaagctttgccagcagaagtataatgtctcctgcataatgatcatgccccagcaccaaaggcaaggatttggacggtttctcattgatttcagctatttgctttctagaagagaaggccaagcagggtctcctgaaaagcctctctccgatctgggccgtctctcctacctggcatattggaagagcgtcatcttggagtatctctaccaccaccatgagaggcacatcagcatcaaggcaattagcagagcgacgggcatgtgcccacatgacattgccaccactctgcagcacctccacatgatcgacaagagagatggcagatttgtcatcattagacgggaaaagttgatattgagccacatggaaaagctgaaaacctgttccagagccaatgaacttgatccagacagtctgaggtggaccccaattttaatttctaatgctgcagtgtctgaagaagagcgagaagctgagaaagaggctgagcggctaatggaacaagctagctgctgggagaaggaggaacaagaaatcctgtcaactagagctaacagtaggcaatcacctgcaaaagtacaatcgaaaaataaatatttgcattccccggagagccggccagtcacaggggagcgagggcagctgctggagctgtctaaagagagcagtgaagaagaagaggaggaggaggacgaggaggaggaagaagaggaggaagaagaggaagaggatgaagaggaggaagaagaggaagaagaagaagaagaagaagaaaatattcaaagctctcccccaagattgacgaaaccacagtcagttgccataaagagaaagaggccttttgtactaaagaagaaaaggggtcgtaaacgcaggaggatcaacagcagtgtaacaacagagaccatttcagagacgacagaagtactgaatgagccctttgacaactcagatgaagagaggccaatgccacagctggagcctacctgtgagattgaagtggaggaagatggcaggaagccagtcctgagaaaagcattccagcatcagcctgggaagaaaagacaaacagaggaagaggaaggaaaagacaatcattgcttcaagaatgctgacccttgtagaaacaatatgaatgatgattcaagtaacttgaaagaaggcagtaaagacaatcccgaacctctaaagtgcaaacaagtgtggccaaaaggaacaaagcgcggtctatctaagtggaggcaaaacaaagagaggaagaccggatttaaactgaatttgtacaccccgccagaaacacccatggagcctgacgagcaggtaacagtggaagaacagaaggagacttcagaaggaaaaaccagccccagtcccatcaggattgaggaggaggtcaaggaaactggggaagccctgttgcctcaagaggaaaacagaagggaagaaacatgtgcccctgtaagtccaaacacatcaccaggtgaaaaaccagaagatgatctcatcaaacctgaggaagaggaagaggaggaggaggaggaagaggaagaagaggaagaagaggaaggggaagaagaagaaggaggaggaaatgtagaaaaagatccagatggtgctaaaagccaagaaaaagaggaaccagaaatctccacggaaaaagaagactctgcacgtttggatgatcacgaagaggaggaggaagaggatgaagagccatcccacaacgaggaccatgatgccgatgacgaggatgacagccacatggagtctgccgaagtggagaaggaagagctgcccagagaaagcttcaaagaagtactggaaaaccaggagacttttttagaccttaatgtgcagcctggtcactcgaacccagaggtcttaatggactgtggcgtcgacctgacagcttcttgtaacagtgagcccaaggagcttgctggggaccctgaagctgtacccgaatctgacgaggagccacccccaggagaacaggcacagaagcaggaccaaaagaacagcaaggaagtcgatacagagttcaaagagggaaacccagcaaccatggaaatcgactctgagactgtccaggccgttcagtctttgacccaggagagcagcgaacaggacgacacctttcaggattgtgccgagactcaagaggcctgtagaagcctacagaactacacccgtgcagaccaaagtccacagattgccaccacgctcgacgattgccaacagtcggaccacagtagcccagtttcatccgtccactcccatcctggccagtccgtacgttctgtcaacagcccaagtgtccctgctctggaaaacagctacgcccaaatcagcccagatcaaagtgccatctcagtgccatctctgcagaacatggaaaccagtcccatgatggatgtcccatcagtttcagatcattcacagcaagtcgtagacagtggatttagtgacctgggcagtatcgagagcacaactgagaactacgaaaacccaagcagctacgattctactatgggaggcagcatctgtggaaacggctcttcacagaacagctgctcctatagcaacctcacctccagcagtctgacacagagcagctgtgctgtcacccagcagatgtccaacatcagcgggagctgcagcatgctgcagcaaaccagcatcagctcccctccgacctgcagcgtcaagtctcctcaaggctgtgtggtggagaggcctccgagcagcagccagcagctggctcagtgcagcatggctgctaacttcaccccacccatgcagctggctgaaatccccgagacgagcaacgccaacattggcttatacgagcgaatgggtcagagtgattttggggctgggcattacccgcagccgtcagccaccttcagccttgccaaactgcagcagttaactaatacacttattgatcattcattgccttacagccattccgctgctgtgacttcctatgcaaacagtgcctctttgtccacaccattaagtaacacagggcttgttcaactttctcagtctccacactccgtccctgggggaccccaagcacaagctaccatgaccccaccccccaacctgactcctcctccaatgaatctgccgccgcctcttttgcaacggaacatggctgcatcaaatattggcatctctcacagccaaagactgcaaacccagattgccagcaagggccacatctccatgagaaccaagtcagcgtctctgtcaccagccgctgccacccatcagtcacaaatctatgggcgctcccagactgtagccatgcagggtcctgcacggactttaacgatgcaaagaggcatgaacatgagtgtgaacctgatgccagcgccagcctacaatgtcaactctgtgaacatgaacatgaacactctcaacgccatgaatgggtacagcatgtcccagccaatgatgaacagtggctaccacagcaatcatggctatatgaatcaaacgccccaataccctatgcagatgcagatgggcatgatgggcacccagccatatgcccagcagccaatgcagaccccaccccacggtaacatgatgtacacggcccccggacatcacggctacatgaacacaggcatgtccaaacagtctctcaatggctcctacatgagaaggtagacaacgtgggcagtccacaaaacctacggggcatcactattggattgatctgcacaaatacctttgaagagtacgatttcaaaaccagcaattggtgtgaatgcaaaaacatttgttggcaccatttatttaaaaaaaaaaaaagctgtatgcagcagaaagccttatacaagttgtttttctttttttcctttttcttttttttggtaccttcatttctgttacttttatataaaattctctgcaaaggaaggcctctctttggactacaatttggaggcagccacttgttgtgcctgcttctgttaaacaatgtggatatcaagcccccccaaattatctgttttaatattgaacctagagctttttttttcccttccctgtccactccatgtaaatgcctttagcatttcagttattgtatattttgtttaaggtgacacttcagcatgccgctaatgtctttgttagtgacagtgcattttgtagtactgtacaagtgttgtgctaacagtaagccatttcttaagttttttgccttgattagggtgccctaatttgagggttttaaaaaaaactatatttttgttaattataaaactgtaaagagctataaaagctattcccatttggttagtcaaaagggttttattgctaaatgtttggtgtaaagttgagacccttttccattttggtgacagatttctttggggaaaaaaggcagctttctgttttataaatgcagacttctgtttattgaatgaagcatatctcagtgtttatctgtcaggttttgaaacatttcatatatgtccaaatacttggcaggatttaaaaaaaaatagtgaatttggtgtaaagttgctattttatggaaatgcctctaactttacattttcattccatctgtagatttttctatctttataaaatattggagttattttttaaggaaaaatagaaaagtagcttgtgaatagctcaaactaagcttacaaatcgcatgtaaaaaagcaaaaaagttatttgtgtctgtttatattgcttccttttttgtagcctttgtacctgtacagggtgacagtaagggccaagcaggagaggcgtaatccttgtataaaataggatccagcgacactcttgtatttatctgttctctttttagtcagtcacttcaaaaaaacaaaaaacaaacaaaaaaaagctgtacattttaacataaaataaattatgatgagccatttttagcctcttgtgtcctgtcatattatgattgatagagaatgaccaatggaactgtatcatgtgtcacgcctcagaacacatacacattttgggaaaataaattatttagtgtaaattggagttatgggattttctgatttgttttgactttgggggaggggttggcaataaataagagtaatatctaataaaaccatcacatataccaaatacctatttaataaattaatttataatggattttaatgcttttcatgaaagtttattttatgcgagtgcataccttctgtatgccaatcattgtctttaaaataaagtgaaattgtttttt

SEQ ID NO: 184 - DNA, 2053 bp, Artificial
  cDNA Sequence
ggggtcggtgctggccgagggggcgccggctgccggagtggacatggcggccggccccattagggtggtgttggtccttctaggggtgctcagtgtctgtgcagccagcggccatgggtccgtagcggagagggaggccggcggggaggcggagtgggcggaaccgtgggatggcgcggttttccggccgccctcggcgctgggcgcagtgggggtgacgcgcagctctgggacgccgcggccagggagggaggaggcgggggacttgccggtactgctgtggtggagcccagggctattcccccacttcccgggagactcggagcgcatcgagtgtgcgcgcggcgcgtgcgtggcgtcccggaaccgccgagcgctgagggactcgcggacgcgcgcgctgctcttctacggcacagacttccgcgcgtcggccgccccgctgccgcgcctggcgcaccagagctgggcgctcctccacgaggagtcgcccctcaacaacttcttgctgagccacggcccgggcatccgcctcttcaatcttacctccaccttcagtcgccactcggattacccgctgtcgctgcagtggctgcccgggaccgcctatctgcgccgcccggtgcctccgcccatggaacgcgcggagtggcgccgccgcggctacgcgccgctgctctatctgcagtcacactgcgacgtgccagcggaccgggaccgctacgtgcgcgagctcatgcgccacatcccggtagactcctacgggaaatgcctgcagaatcgggagctgcctaccgcgcggctacaggacacagccacggccaccaccgaggatccagagctcttggctttcttgtcccgctataagttccacttggccctggaaaatgccatctgtaacgactacatgacagaaaaactgtggcgtcccatgcacctgggcgctgtgcccgtgtaccgcggttctccctctgtgagggactggatgccgaacaatcactccgtcatcctgattgatgattttgagtctcctcagaagctggcagagtttattgactttctggacaagaatgatgaggagtatatgaaatacctggcatacaagcaacctgggggcatcaccaaccaatttcttctggatagtctgaagcatcgggagtggggagtgaatgatcctttgctgcctaactacctcaacggcttcgagtgtttcgtctgtgactacgaactggctcggctggatgccgagaaagcccacgcggcctctcccggggacagccccgtctttgagccccacattgcccagccctcacacatggactgcccagtgcccacacctggctttggcaatgtggaagagattcctgagaatgacagttggaaagagatgtggctgcaagattattggcaaggtctggaccagggggaagctctcactgccatgatccacaacaatgaaacagagcagacgaaattttgggattacctacatgaaatcttcatgaagaggcaacatctctaagtgcccttgcaagagcctttaacttggcggagctaaggagatcttattctaccatgggacataaggagcatccactgcacaaacccttaatgaacactgtcttttcatggattcaaggaattccagttttatctattaagattttatcttaatgatgagtagccaaggtctaacatagggcctctcctcaaggagagatggagggatacaattcttggttcagtgggaaacagaaccctaaaacatccatttgattcaaggtgctggtccaacagagtttttaaactactcacttctttatttcatcctttcgactgtacttgattaccagtgaagtaagatgggtcaggttacgacttacaacttttgttctattccccagactcctcattattcagtacatttcccaataatctctttttctcatctcttgctttataaattgttacgttggtggagaagcaaaacatttggtgagttgtattctggttttccggagttggatttttttatattatatactttcatgtc

SEQ ID NO: 185 - DNA, 393 bp, Artificial
  cDNA Sequence
ctgcagatagagcagcggcgcgtagccgcggcggcgccactccgcgcgttccatgggcggaggcaccgggcggcgcagataggcggtcccgggcagccactgcagcgacagcgggtaatccgagtggcgactgaaggtggaggtaagattgaagaggcggatgcccgggccgtggctcagcaagaagttgttgaggggcgactcctcgtggaggagcgcccagctctggtgcgccaggcgcggcagcggggcggccgacgcgcggaagtctgtgccgtagaagagcagcgcgcgcgtccgcgagtccctcagcgctcggcggttccgggacgccacgcacgcgccgcgcgcacactcgatgcgctccgagtctcccgggaagtgggggaatag

SEQ ID NO: 186 - DNA, 1992 bp, Artificial
  cDNA Sequence
atggggaacatactgacctgttgtgtgcaccctagcgtcagcctcgagtttgaccagcaacaggggtcggtgtgtccctctgaatctgagatctatgaggcaggagctggggacaggatggcaggagcgcccatggctgctgctgtgcagcctgctgaggtgaccgttgaagttggtgaggacctccacatgcaccacattcgtgaccaggagatgcctgaagctttggagtttaacccttctgccaatccagaggcaagcacaatattccagaggaactctcaaacagatgttgtagaaataagaagaagcaactgtacaaaccatgtatctactgagcgtttcagtcaacaatacagctcgtgttcgacaatattccttgatgacagcacagccagccagcattatcttacaatgacaataatatctgtgaccttggagatacctcatcatatcacacaaagagatgcagatagatctttgagcatacctgatgaacagttacactcatttgcggtttccaccgtgcacattacgaagaacagaaatggaggtgggagtttaaataactattcctcctccattccatcgactcccagcaccagccaggaggaccctcagttcagtgttcctcccactgccaacacacccacccccgtttgcaagcggtccatgcgctggtccaacctgtttacatctgagaaagggagtcacccagacaaagagaggaaagccccggagaatcatgctgacaccatcgggagcggcagagccatccccattaaacagggcatgctcttaaagcgaagtgggaaatggctgaagacatggaaaaagaaatacgtcaccctgtgttccaatggcgtgctcacctattattcaagcttaggtgattatatgaagaatattcataaaaaagagattgaccttcggacatctaccatcaaagtcccaggaaagtggccatccctagccacatcggcctgtgcacccatctccagctctaaaagcaatggcctatccaaggacatggacaccgggctgggtgactccatatgcttcagccccagtatctccagcaccaccagccccaagctcaacccgcccccctctcctcatgccaataaaaagaaacacctaaagaagaaaagcaccaacaactttatgattgtgtctgccactggccaaacatggcactttgaagccacgacgtatgaggagcgggatgcctgggtccaagccatccagagccagatcctggccagcctgcagtcatgcgagagcagtaaaagcaagtcccagctgaccagccagagcgaggccatggccctgcagtcgatccaaaacatgcgtgggaacgcccactgtgtggactatgagacccagaatcctaagtgggccagtttgaacttgggagtcctcatgtgtattgaatgctcaggaatccaccgcagtcttggcacccgcctttcccgtgtgcgatctctggagctggatgactggccagttgagctcaggaaggttatgtcatctattggcaatgacctagccaacagcatctgggaagggagcagccaggggcagacaaaaccctcagtaaagtccacgagggaagagaaggaacggtggatccgttccaaatatgaggagaagctctttctggccccactaccctgcactgagctgtccctgggccagcacctgctgcgggccaccgctgatgaggacctgcagacagccatcctgctgctggcacatggctcccgtgaggaggtgaacgagacctgtggggagggagacggctgcacggcgctccatctggcctgccgcaaggggaatgtggtcctggcacagctcctgatctggtacggggtggacgtcatggcccgagatgcccacgggaacacagcgctgacctacgcccggcaggcctccagccaggagtgcatcaacgtgcttctgcagtacggctgccccgacgagtgcgtgtag

SEQ ID NO: 187 - DNA, 951 bp, Artificial
  cDNA Sequence
ctggtcatctacagccgctccttcctggagtacaacagctggcatgtgctcagctccgtcaacatctgctgctccaagctggtgaagtgccggctgcagaagggcaaggtgaccattgcagagttcatctggctggccacacgcagccaaatggaggccactgagccacaggatatggtggtctatgaccagagcacacgggacgccagtgtgctggccgcagaccgcttcctctccatcctgctgagcaagctggacagctgcttcgacagcgtggccatcctcacggggggcttcgccaccttctcctcctgcttccccagcctctgccagggcaagcctgctgccctgctacccatgagcctctcccagccctgcctgcccgtgcctagcgtgagcctgaccctcatcctgcctcacctctacctgggctcgcagaaagacgttctgaacaaggatctgacgacacagaatggaataagctacgtcctcaatgccagcaactcctgccccaagcctgacttcatctgcgagagccgcttcatgcgggtccccatcaacgacaactactgtgaaaagctgctgccctggctggacaagtctatggagttcatctgtaaaggcaagctgtccagctgccaagtcatcgtccactgtctggtcggtatctcccactctgccaccatcgccatcgcctacatcatgaagaccatgggcatatcctccgacgacacctacaggttcatgaaggataggcgccagtccatctcgcccaacttcaacttcctgggccagctgctggaatcaagcgctgcagctgccagatggagttcgaggagggcatcctggaggggcgcactcgcggcgaggagctggccgccatgggcaagcaggcgagcttctcgggcagcgtggaggtcatcgagatgtcctgacccctccgctgccctt

SEQ ID NO: 188 - DNA, 786 bp, Artificial
  cDNA Sequence
ctggtcatctacagccgctccttcctggagtacaacagctggcatgtgctcagctccgtcaacatctgctgctccaagctggtgaagtgccggctgcagaagggcaaggtgaccattgcagagttcatctggctggccacacgcagccaaatggaggccactgagccacaggatatggtggtctatgaccagagcacacgggacgccagtgtgctggccgcagaccgcttcctctccatcctgctgagcaagctggacagctgcttcgacagcaaagacgttctgaacaaggatctgacgacacagaatggaataagctacgtcctcaatgccagcaactcctgccccaagcctgacttcatctgcgagagccgcttcatgcgggtccccatcaacgacaactactgtgaaaagctgctgccctggctggacaagtctatggagttcatctgtaaaggcaagctgtccagctgccaagtcatcgtccactgtctggtcggtatctcccactctgccaccatcgccatcgcctacatcatgaagaccatgggcatatcctccgacgacacctacaggttcatgaaggataggcgccagtccatctcgcccaacttcaacttcctgggccagctgctggaatcaagcgctgcagctgccagatggagttcgaggagggcatcctggaggggcgcactcgcggcgaggagctggccgccatgggcaagcaggcgagcttctcgggcagcgtggaggtcatcgagatgtcctgacccctccgctgccctt

SEQ ID NO: 189 - DNA, 378 bp, Artificial
  cDNA Sequence
atggagctgatgtttgcagagtgggaggacggagagcgcttctcattcgaggattcggaccgttttgaggaggattcactctgttccttcatctccgaggccgagagcctctgccagaactggcggggatggcgcaaacagtcagcggggcccaattcccccactggcggcggtggcggaggtggcagtggcggtaccagaatgcgaggtgagagtgagctggggggaagaggagcggcaggccctgcttgggcctcgctcgggagctgtccgggaccaggagctgtccccgaccaagagctctcttcaaccaggggaagaaaggggagctgtccccggccgggagctgtccccgactgggagctgtcccaagcttag

SEQ ID NO: 190 - DNA, 388 bp, Artificial
  cDNA Sequence
accgcaaagcctgccgggagcttggtgcgctatggcgacacccagcctgcggggtcgtctggcgcggtttgggaacccgcggaagcctgtgctgaagcccaataaacctctcattctagctaaccgcgtcggggagcggcgccgggagaagggcgaggcgacttgcatcacggagatgtcggtgatgatggcttgctggaagcagaatgaattccgcgacgatgcgtgcagaaaagagatccagggcttcctcgattgtgccgcgagggctcaggaagcccgaaagatgagatcaatacaggaaaccctgggagagtctgggagtttacttccaaataaattgaataagttgttacagaggtttcctaacaaaccttacctcagctga

SEQ ID NO: 191 - DNA, 336 bp, Artificial
  cDNA Sequence
gggcggggcgcggagcccgccgtctcggaggccgcggctcggcccggcactgcggagggccgcttgatttcccggaacccaggtcgcgcggctgctagggccggagccggtggatccgagcgggtgccaccagcggcggcgcgccgcctcccccggtgggagcggtggttgggccaggctgcggcagagcgttcgctcggagatggcggagcagccgcgacgcggcccgtggccccgaaagcagggaagccgggcagccccgggacgcggcggagcccggggacagcggggacgccgcccagtcctccgggtatgaagctaaaatgcagcggctaa

SEQ ID NO: 192 - DNA, 3457 bp, Artificial
  cDNA Sequence
ggagcctgggagccttgacgttaggaacgaagtctaacctggatctggagccgggtgagatcaaattgggaatgctttcataatgaacgtcaaccagtcagttccacctgtgccaccatttgggcagccccagcccatctacccagggtatcatcagtccagctatggtgggcaatcagggtccacagcccccgccattccctatggagcctacaatggcccagtaccaggctatcagcaaacacctccccaaggtatgtcaagagccccaccttcctcgggggcacctccagcctcaacagcacaggctccttgtggccaggctgcatatggccagtttggccaaggagatgtacagaatgggccaagctccactgttcagatgcaaaggctgcctgggtctcagccatttgggtccccattggcccctgtgggcaaccagccacctgtgcttcagccctatggccctcccccgacaagtgcacaggtggctacgcagctgtctggaatgcagatcagcggtgctgtggccccagcccctccttcttcagggctgggctttggcccaccaacatcgctggcttcagcctcaggaagtttccctaactctggtctgtatggctcctatcctcagggccaggctcctccccttagccaggcccaaggtcatcctgggatccagactccccagcgatctgccccatcacaggcctccagcttcacacccccagcttcagggggtcctcggctgccttcgatgactggtccactcctgcctggacagagttttggagggccctcagtgagccagcccaaccatgtgtcttcacctcctcaagctctgccccctggcacccagatgactgggcccctgggaccactgccacctatgcactccccgcagcagccaggctatcagccccaacaaaatggttccttcggaccagcccggggccctcagtctaattatggaggcccctacccagcagcacccacctttggcagtcagcctgggcctcctcagccactgcctcctaagcgcctggaccctgatgccatcccaagccctattcaggtcattgaagatgacaggaacaaccggggtacagagccatttgttactggagtacggggccaggtgccacccttagtcactaccaacttcctggtgaaagaccaagggaatgcaagtccccgatacatccgatgtacatcctataatatcccttgcacatctgacatggctaagcaggctcaggtgcccctggcagcagtcatcaaaccgctggcaaggctgcccccagaggaggcttcaccgtatgttgtggaccatggggaatctggccctttgcgctgcaaccgctgcaaagcatacatgtgtcccttcatgcagttcattgaaggagggaggcgtttccagtgctgtttttgcagctgtatcaatgatgttcccccccagtattttcagcacctggatcataccggcaaacgtgtggatgcttatgaccgccctgagctatccctgggctcttatgaattcttggccactgtagattactgcaagaacaataagttccccagccctcctgcctttatcttcatgattgacgtctcctacaatgccatcaggactggtcttgttaggctcctctgtgaggagctcaagtcactgttagactttctacctagggagggtggggcagaagagtcagcaatccgcgttggctttgtcacctacaataaggtgctccacttctataatgtgaagagctcattggcccagccacagatgatggttgtgtctgatgtggctgacatgtttgtgccactgctggatggcttcctggtcaacgtcaatgagtctcgggcagttatcaccagcttattggatcagattccagaaatgtttgcagacacaagggaaacagagacagtatttgtaccagttatccaggctggaatggaggctctgaaggctgctgagtgtgcagggaagctctttctattccatacatccctgcccattgcagaggccccagggaaactgaagaacagagatgacaggaagctgatcaatacagacaaggagaagactctgttccagcctcagacaggtgcctatcagaccctggccaaagagtgtgtggcccaaggctgctgtgtagatctctttctcttccctaaccagtatgtggatgtggccacactctctgttgtgccccagctcactggtggctctgtctacaaatatgcttcctttcaggtggagaacgaccaggagcggttcctgagtgacctgcgtcgtgatgtccagaaggttgttggctttgatgctgtgatgcgggtccggacaagcactggtatccgtgctgtagatttctttggagctttctacatgagcaacacgacagatgtggagctggctgggctagatggggacaaaacagtgactgtggagttcaagcatgacgatcggctcaatgaagagagcggagctctcctgcagtgtgccctgctttacaccagctgtgcagggcagcgtcggctccgcatccataatctggccctgaactgctgcacccagctggctgatctatatcgaaactgtgagactgacacgctcatcaactacatggccaagtttgcatatcggggagtcctgaatagccctgtgaaggctgttcgtgacacgctcatcacccagtgtgcccagatcctggcctgttacagaaagaactgtgctagcccctcctctgcaggacagttgatccttcctgagtgcatgaagctactcccagtttacctgaactgtgtgttgaagagtgatgtcctgcagcctggagctgaagtcactactgatgaccgtgcctatgtccgacagctagttacctccatggatgtgactgagaccaatgtcttcttctaccctcggctcttacctttgacaaagtctcccgttgagagtactaccgaaccaccagcagttcgagcctctgaagagcgtctaagcaatggggatatatatttactggagaatgggctcaacctcttcctctgggtgggagcaagcgtccaacagggtgttgtccagagccttttcagcgtctcctccttcagtcagatcaccagtggtttgagtgttctgccagttctggataatccactgtccaagaaggttcgaggcctcattgatagcttaggcacagagatcccggtacatgaagcttaccgtggtgaaacaggaagacaagatggagatgctgttcaagcacttcctggtggaagacaagagtctgagtgggggagcatcttatgtggactttctctgtcatatgcacaaggagattcggcagctactgagctaaagcaagtgggtaaatggcatagggcccaggctagcttccagaaagcaccccaggatgtcagagaaattgggacagtaacatatcttatgtaa

SEQ ID NO: 193 - DNA, 288 bp, Artificial
  cDNA Sequence
ggcacccgctcggatccaccggctccggccctagcagccgcgcgacctgggttccgggaaatcaagcggccctccgcagtgccgggccgagccgcggcctccgagacggcgggctccgcgccccgcccgcggaagcgcaccccctcctctccgcgcgatggcactgccggccgagcgtcggggaccacgacttcggagcaggggcgggctcaggcctgggctcatccactcagccccgcggagggggagccgggccggcccactcgggggaggggaggagtaagaggc

SEQ ID NO: 194 - DNA, 3535 bp, Artificial
  cDNA Sequence
aggtagaggggaagagattgaactttgctgacctttgatgtgaggcgctcagccagggccaaggggagagcctggcaagatttgcagcctgaagccatgggccagggggccatggtgacctgagacaagtggactctgtatagttgccccctgcttccccttctacctcccctaccctatgctaaggggactcgtctccacctcgtaaaggaaactccccaagggaatccctgtcccctattttcctatccttctacccttccaagacagtcctagcctatagaactcctacctcccatcccctgaggtggtccccattcctccctcccttcctccccccgccatgctccagttgtggaaggtggtacgcccagctcggcagctggaactgcaccgcctcatactgctgctgatcgctttcagcctgggctccatgggcttcctggcttattatgtgtccaccagccctaaggccaaggaacccttgcccctgcccttgggagactgcagcagcggtggggcagctggtcctggccctgcacggcctccagttccacctcggccccccaggcctccagagacagctcgaactgaacccgtggtccttgtgtttgtggagagtgcatactcacagctggggcaggaaattgtggccatcctggagtctagtcgttttcgttatagcactgagttggcacctggccgaggggacatgcccacattgactgataatacccatggccgctatgtcttggtcatttatgagaacctgctcaagtatgtcaacctggatgcctggagtcgggaactgctagaccggtactgcgtggagtatggtgtgggcatcattggctttttccgagcccacgagcacagcctactgagcgcccagctcaagggctttcccctttttttacactcaaacttggggctccgggactaccaagtgaatccttctgccccgctactgcatctcacacgccccagccgcctagaaccagggccactgcctggtgatgactggaccatcttccaatccaatcatagtacatatgaaccagtgcttcttgccagccttcggccagctgagcccgcagtgccaggaccagttcttcgtcgggcccggcttcccactgtggtacaggacctggggcttcatgatggcatccagcgggtgctctttggacatggcctttccttctggctccacaaacttatcttcgttgatgctgttgcatacctcactggcaagcgcctctgcctggaccttgaccgctacatcttggtagacatcgatgacatctttgtgggcaaggaagggacccgcatgaaggtggctgatgttgaggctctgttgaccacccagaacaaactcaggaccttagttcccaacttcaccttcaacttgggcttctcgggcaagttctatcatactgggacagaggaggaggatgcaggggacgacatgctgctgaagcaccgcaaagagttctggtggttcccccacatgtggagccacatgcagccacacctgttccacaatcgctccgtgctggctgaccagatgaggctcaacaaacagtttgctctggagcatgggattcccacggacctggggtatgctgtggccccccaccactcgggtgtgtaccccatccacacgcagctctatgaggcctggaaatccgtgtggggcatccaggtgaccagcactgaggagtatccccatctccgccctgcccgctaccgccgtggcttcattcacaatggcattatggtgctgccccggcagacatgtggcctcttcactcacacaatcttctataatgagtatcctggaggctctcgtgaactagaccggagcatccgaggtggagagctctttctgacagtgctgcttaatccgatcagcatctttatgacccatctgtccaattatggaaatgaccggctgggcctatacacctttgagagcttggtgcgcttcctccagtgttggacacggctgcgcctacagacccttcctcctgtcccacttgcacagaagtactttgaacttttccctcaggagcgaagccccctttggcagaatccctgtgatgacaagaggcacaaagatatctggtccaaggagaaaacctgtgatcgtctcccgaagttcctcattgtgggaccccagaaaacagggactacagctattcacttcttcctgagcctgcacccagctgtaactagcagcttccctagccccagcacatttgaggagattcagttcttcaacagccctaattaccacaagggtattgactggtacatggatttcttccctgttccttccaatgccagcactgatttcctatttgaaaaaagtgccacctactttgactctgaagttgtaccacggcggggggctgccctcctgccacgagccaagatcatcacagtgctcaccaaccctgctgacagggcctactcctggtaccagcatcagcgagcccatggagacccagttgctctgaactataccttctatcaggtgatttcagcctcctcccagacccctctggcactacgctccctgcagaaccgctgtcttgtccctggctactattctacccatctacaacgctggctgacttactacccctctggacagttgctgattgtggatgggcaagagctgcgtaccaacccagcagcctcaatggagagcatccagaagttcctgggtatcacaccctttctgaactacacacggaccctcaggtttgatgatgataagggattttggtgccagggacttgaaggtggtaagactcgctgtctaggccggagcaaaggccggaggtatccagatatggacactgagtcccgtcttttccttacggattttttccggaaccataatttggagttgtcgaagctgctgagccggcttggacagccagtgccctcgtggcttcgggaagaactgcagcattccagtctgggctgatgtcccagcctcccataccagcaaaatgccccctgcttccctaaggggcaggtccagagcagggcccacaagggggattagagtggcctggcccctccccctctacctcagtagcccccaggcctgagatggctgagaagggaagggtatccttttcccacagttctgggacaaataaaggggcttcctttggtaccccacataatagtgctaggtacctttgacccatcatcttgggaggtggggaggaatgagagggtccaggcagggtgtaggggaatgtattagtccaatgagatttccctcttcatccgcagcagtgtatctattctatacctggctatgggagagaccccttgcatgggagggaccccttgctatggcccctttagccaggcagtgggatctacctgtggcccggcctccctaatgtcattcacattgaatggggatgaggtcggacagtggctcatagagccgagtatgagccctagctgtgggctagaaatgtccttaataaacatccttatttttctgttt

SEQ ID NO: 195 - DNA, 3807 bp, Artificial
  cDNA Sequence
agtctcgcggtgctgccgggctcagccccgtctcctcctcttgctccctcggccgggcggcggtgactgtgcaccgacgtcggcgcgggctgcaccgccgcgtccgcccgcccgccagcatggccaccaccgccacctgcacccgtttcaccgacgactaccagctcttcgaggagcttggcaagggtgctttctctgtggtccgcaggtgtgtgaagaaaacctccacgcaggagtacgcagcaaaaatcatcaataccaagaagttgtctgcccgggatcaccagaaactagaacgtgaggctcggatatgtcgacttctgaaacatccaaacatcgtgcgcctccatgacagtatttctgaagaagggtttcactacctcgtgtttgaccttgttaccggcggggagctgtttgaagacattgtggccagagagtactacagtgaagcagatgccagccactgtatacatcagattctggagagtgttaaccacatccaccagcatgacatcgtccacagggacctgaagcctgagaacctgctgctggcgagtaaatgcaagggtgccgccgtcaagctggctgattttggcctagccatcgaagtacagggagagcagcaggcttggtttggttttgctggcaccccaggttacttgtcccctgaggtcttgaggaaagatccctatggaaaacctgtggatatctgggcctgcggggtcatcctgtatatcctcctggtgggctatcctcccttctgggatgaggatcagcacaagctgtatcagcagatcaaggctggagcctatgatttcccatcaccagaatgggacacggtaactcctgaagccaagaacttgatcaaccagatgctgaccataaacccagcaaagcgcatcacggctgaccaggctctcaagcacccgtgggtctgtcaacgatccacggtggcatccatgatgcatcgtcaggagactgtggagtgtttgcgcaagttcaatgcccggagaaaactgaagggtgccatcctcacgaccatgcttgtctccaggaacttctcagctgccaaaagcctattgaacaagaagtcggatggcggtgtcaagccacagagcaacaacaaaaacagtctcgtaagcccagcccaagagcccgcgcccttgcagacggccatggagccacaaaccactgtggtacacaacgctacagatgggatcaagggctccacagagagctgcaacaccaccacagaagatgaggacctcaaagctgccccgctccgcactgggaatggcagctcggtgcctgaaggacggagctcccgggacagaacagccccctctgcaggcatgcagccccagccttctctctgctcctcagccatgcgaaaacaggagatcattaagattacagaacagctgattgaagccatcaacaatggggactttgaggcctacacgaagatttgtgatccaggcctcacttcctttgagcctgaggcccttggtaacctcgtggaggggatggatttccataagttttactttgagaatctcctgtccaagaacagcaagcctatccataccaccatcctaaacccacacgtccacgtgattggggaggacgcagcgtgcatcgcctacatccgcctcacccagtacatcgacgggcagggtcggcctcgcaccagccagtcagaagagacccgggtctggcaccgtcgggatggcaagtggctcaatgtccactatcactgctcaggggcccctgccgcaccgctgcagtgagctcagccacaggggctttaggagattccagccggaggtccaaccttcgcagccagtggctctggagggcctgagtgacagcggcagtcctgtttgtttgaggtttaaaacaattcaattacaaaagcggcagcagccaatgcacgcccctgcatgcagccctcccgcccgcccttcgtgtctgtctctgctgtaccgaggtgttttttacatttaagaaaaaaaaaaaagaaaaaaagattgtttaaaaaaaaaaggaatccataccatgatgcgttttaaaaccaccgacagcccttgggttggcaagaaggcaggagtatgtatgaggtccatcctggcatgagcagtggctcacccaccggccttgaagaggtgagcttggcctctctggtccccatggacttagggggaccaggcaagaactctgacagagctttgggggccgtgatgtgattgcagctcctgaggtggcctgcttaccccaggtctaggaatgaacttctttggaacttgcataggcgcctagaatggggctgatgagaacatcgtgaccatcagacctacttgggagagaacgcagagctcccagcctgctgtggaggcagctgagaagtggtggcctcaggactgagagcccggacgttgctgtactgtcttgtttagtgtagaagggaagagaattggtgctgcagaagtgtacccgccatgaagccgatgagaaacctcgtgttagtctgacatgcactcactcatccatttctataggatgcacaatgcatgtgggccctaatattgaggccttatccctgcagctaggagggggaggggttgttgctgctttgcttcgtgttttcttctaacctggcaaggagagagccaggccctggtcagggctcccgtgccgcctttggcggttctgtttctgtgctgatctggaccatctttgtcttgccttttcacggtagtggtccccatgctgaccctcatctgggcctgggccctctgccaagtgcccctgtgggatgggaggagtgaggcagtgggagaagaggtggtggtcgtttctatgcattcaggctgcctttggggctgcctcccttcttattcttccttgctgcacgtccatctcttttcctgtctttgagattgacctgactgctctggcaagaagaagaggtgtccttacagaggcctctttactgaccaactgaagtatagacttactgctggacaatctgcatgggcatcacccctccccgcatgtaacccaaaagaggtgtccagagccaaggcttctaccttcattgtccctctctgtgctcaaggagttccattccaggaggaagagatctataccctaagcagatagcaaagaagataatggaggagcaattggtcatggccttggtttccctcaaaacaacgctgcagatttatctgcacaaacatctccacttttgggggaaaggtgggtagattccagttccctggactaccttcaggaggcacgagagctgggagaagaggcaaagctacaggtttacttgggagccagctgagaagagagcagactcacaggtgctggtgcttggatttagccaggctcctccgagcacctcatgcatgtcccagcccctgggccctagccctttcctgccctgcagtctgcagtgccagcacgcaaatcccttcaccacagggtttcgttttgctggcttgaagacaaatggtcttagaattcattgagacccatagcttcatatggctgctccagccccacttcttagcattcttactcctcttctggggctaatgtcagcatctatagacaatagactattaaaaaatcaccttttaaacaagaaacggaaggcatttgatgcagaatttttgcatgacaacatagaaataatttaaaaatagtgtttgttctgaatgttggtagacccttcatagctttgttacaatgaaaccttgaactgaaaatatttaataaaataacctttaaacagtc

SEQ ID NO: 196 - DNA, 2098 bp, Artificial
  cDNA Sequence
cccgtctcctcctcttgctccctcggccgggcggcggtgactgtgcaccgacgtcggcgcgggctgcaccgccgcgtccgcccgcccgccagcatggccaccaccgccacctgcacccgtttcaccgacgactaccagctcttcgaggagcttggcaaggggatgataccctctttttaatctttccttccccgaccttcaactgttcctgctgagagaagggcagggtctctctgctcccttctgccctggttctcttggccgggaccgcagggctgtctgagatgcagcaggtgtgctttctctgtggtccgcaggtgtgtgaagaaaacctccacgcaggagtacgcagcaaaaatcatcaataccaagaagttgtctgcccgggatcaccagaaactagaacgtgaggctcggatatgtcgacttctgaaacatccaaacatcgtgcgcctccatgacagtatttctgaagaagggtttcactacctcgtgtttgaccttgttaccggcggggagctgtttgaagacattgtggccagagagtactacagtgaagcagatgccagccactgtatacatcagattctggagagtgttaaccacatccaccagcatgacatcgtccacagggacctgaagcctgagaacctgctgctggcgagtaaatgcaagggtgccgccgtcaagctggctgattttggcctagccatcgaagtacagggagagcagcaggcttggtttggttttgctggcaccccaggttacttgtcccctgaggtcttgaggaaagatccctatggaaaacctgtggatatctgggcctgcggggtcatcctgtatatcctcctggtgggctatcctcccttctgggatgaggatcagcacaagctgtatcagcagatcaaggctggagcctatgatttcccatcaccagaatgggacacggtaactcctgaagccaagaacttgatcaaccagatgctgaccataaacccagcaaagcgcatcacggctgaccaggctctcaagcacccgtgggtctgtcaacgatccacggtggcatccatgatgcatcgtcaggagactgtggagtgtttgcgcaagttcaatgcccggagaaaactgaagggtgccatcctcacgaccatgcttgtctccaggaacttctcagttggcaggcagagctccgcccccgcctcgcctgccgcgagcgccgccggcctggccgggcaagctgccaaaagcctattgaacaagaagtcggatggcggtgtcaagaaaaggaagtcgagttccagcgtgcacctaatgccacagagcaacaacaaaaacagtctcgtaagcccagcccaagagcccgcgcccttgcagacggccatggagccacaaaccactgtggtacacaacgctacagatgggatcaagggctccacagagagctgcaacaccaccacagaagatgaggacctcaaagctgccccgctccgcactgggaatggcagctcggtgcctgaaggacggagctcccgggacagaacagccccctctgcaggcatgcagccccagccttctctctgctcctcagccatgcgaaaacaggagatcattaagattacagaacagctgattgaagccatcaacaatggggactttgaggcctacacgaagatttgtgatccaggcctcacttcctttgagcctgaggcccttggtaacctcgtggaggggatggatttccataagttttactttgagaatctcctgtccaagaacagcaagcctatccataccaccatcctaaacccacacgtccacgtgattggggaggacgcagcgtgcatcgcctacatccgcctcacccagtacatcgacgggcagggtcggcctcgcaccagccagtcagaagagacccgggtctggcaccgtcgggatggcaagtggctcaatgtccactatcactgctcaggggcccctgccgcaccgctgcagtgagctcagccacagggggctttaggagattccagccggaggtccaaccttcgcagccagtggctctggagggcctgagtgacagcggcagtcctgtttgtttgag

SEQ ID NO: 197 - DNA, 3720 bp, Artificial
  cDNA Sequence
agtctcgcggtgctgccgggctcagccccgtctcctcctcttgctccctcggccgggcggcggtgactgtgcaccgacgtcggcgcgggctgcaccgccgcgtccgcccgcccgccagcatggccaccaccgccacctgcacccgtttcaccgacgactaccagctcttcgaggagcttggcaagggtgctttctctgtggtccgcaggtgtgtgaagaaaacctccacgcaggagtacgcagcaaaaatcatcaataccaagaagttgtctgcccgggatcaccagaaactagaacgtgaggctcggatatgtcgacttctgaaacatccaaacatcgtgcgcctccatgacagtatttctgaagaagggtttcactacctcgtgtttgaccttgttaccggcggggagctgtttgaagacattgtggccagagagtactacagtgaagcagatgccagccactgtatacatcagattctggagagtgttaaccacatccaccagcatgacatcgtccacagggacctgaagcctgagaacctgctgctggcgagtaaatgcaagggtgccgccgtcaagctggctgattttggcctagccatcgaagtacagggagagcagcaggcttggtttggttttgctggcaccccaggttacttgtcccctgaggtcttgaggaaagatccctatggaaaacctgtggatatctgggcctgcggggtcatcctgtatatcctcctggtgggctatcctcccttctgggatgaggatcagcacaagctgtatcagcagatcaaggctggagcctatgatttcccatcaccagaatgggacacggtaactcctgaagccaagaacttgatcaaccagatgctgaccataaacccagcaaagcgcatcacggctgaccaggctctcaagcacccgtgggtctgtcaacgatccacggtggcatccatgatgcatcgtcaggagactgtggagtgtttgcgcaagttcaatgcccggagaaaactgaagggtgccatcctcacgaccatgcttgtctccaggaacttctcagttggcaggcagagctccgcccccgcctcgcctgccgcgagcgccgccggcctggccgggcaagctgccaaaagcctattgaacaagaagtcggatggcggtgtcaagaaaaggaagtcgagttccagcgtgcacctaatggagccacaaaccactgtggtacacaacgctacagatgggatcaagggctccacagagagctgcaacaccaccacagaagatgaggacctcaaagtgcgaaaacaggagatcattaagattacagaacagctgattgaagccatcaacaatggggactttgaggcctacacgaagatttgtgatccaggcctcacttcctttgagcctgaggcccttggtaacctcgtggaggggatggatttccataagttttactttgagaatctcctgtccaagaacagcaagcctatccataccaccatcctaaacccacacgtccacgtgattggggaggacgcagcgtgcatcgcctacatccgcctcacccagtacatcgacgggcagggtcggcctcgcaccagccagtcagaagagacccgggtctggcaccgtcgggatggcaagtggctcaatgtccactatcactgctcaggggcccctgccgcaccgctgcagtgagctcagccacaggggctttaggagattccagccggaggtccaaccttcgcagccagtggctctggagggcctgagtgacagcggcagtcctgtttgtttgaggtttaaaacaattcaattacaaaagcggcagcagccaatgcacgcccctgcatgcagccctcccgcccgcccttcgtgtctgtctctgctgtaccgaggtgttttttacatttaagaaaaaaaaaaaagaaaaaaagattgtttaaaaaaaaaaggaatccataccatgatgcgttttaaaaccaccgacagcccttgggttggcaagaaggcaggagtatgtatgaggtccatcctggcatgagcagtggctcacccaccggccttgaagaggtgagcttggcctctctggtccccatggacttagggggaccaggcaagaactctgacagagctttgggggccgtgatgtgattgcagctcctgaggtggcctgcttaccccaggtctaggaatgaacttctttggaacttgcataggcgcctagaatggggctgatgagaacatcgtgaccatcagacctacttgggagagaacgcagagctcccagcctgctgtggaggcagctgagaagtggtggcctcaggactgagagcccggacgttgctgtactgtcttgtttagtgtagaagggaagagaattggtgctgcagaagtgtacccgccatgaagccgatgagaaacctcgtgttagtctgacatgcactcactcatccatttctataggatgcacaatgcatgtgggccctaatattgaggccttatccctgcagctaggagggggaggggttgttgctgctttgcttcgtgttttcttctaacctggcaaggagagagccaggccctggtcagggctcccgtgccgcctttggcggttctgtttctgtgctgatctggaccatctttgtcttgccttttcacggtagtggtccccatgctgaccctcatctgggcctgggccctctgccaagtgcccctgtgggatgggaggagtgaggcagtgggagaagaggtggtggtcgtttctatgcattcaggctgcctttggggctgcctcccttcttattcttccttgctgcacgtccatctcttttcctgtctttgagattgacctgactgctctggcaagaagaagaggtgtccttacagaggcctctttactgaccaactgaagtatagacttactgctggacaatctgcatgggcatcacccctccccgcatgtaacccaaaagaggtgtccagagccaaggcttctaccttcattgtccctctctgtgctcaaggagttccattccaggaggaagagatctataccctaagcagatagcaaagaagataatggaggagcaattggtcatggccttggtttccctcaaaacaacgctgcagatttatctgcacaaacatctccacttttgggggaaaggtgggtagattccagttccctggactaccttcaggaggcacgagagctgggagaagaggcaaagctacaggtttacttgggagccagctgagaagagagcagactcacaggtgctggtgcttggatttagccaggctcctccgagcacctcatgcatgtcccagcccctgggccctagccctttcctgccctgcagtctgcagtgccagcacgcaaatcccttcaccacagggtttcgttttgctggcttgaagacaaatggtcttagaattcattgagacccatagcttcatatggctgctccagccccacttcttagcattcttactcctcttctggggctaatgtcagcatctatagacaatagactattaaaaaatcaccttttaaacaagaaacggaaggcatttgatgcagaatttttgcatgacaacatagaaataatttaaaaatagtgtttgttctgaatgttggtagacccttcatagctttgttacaatgaaaccttgaactgaaaatatttaataaaataacctttaaacagtc

SEQ ID NO: 198 - DNA, 3624 bp, Artificial
  cDNA Sequence
agtctcgcggtgctgccgggctcagccccgtctcctcctcttgctccctcggccgggcggcggtgactgtgcaccgacgtcggcgcgggctgcaccgccgcgtccgcccgcccgccagcatggccaccaccgccacctgcacccgtttcaccgacgactaccagctcttcgaggagcttggcaagggtgctttctctgtggtccgcaggtgtgtgaagaaaacctccacgcaggagtacgcagcaaaaatcatcaataccaagaagttgtctgcccgggatcaccagaaactagaacgtgaggctcggatatgtcgacttctgaaacatccaaacatcgtgcgcctccatgacagtatttctgaagaagggtttcactacctcgtgtttgaccttgttaccggcggggagctgtttgaagacattgtggccagagagtactacagtgaagcagatgccagccactgtatacatcagattctggagagtgttaaccacatccaccagcatgacatcgtccacagggacctgaagcctgagaacctgctgctggcgagtaaatgcaagggtgccgccgtcaagctggctgattttggcctagccatcgaagtacagggagagcagcaggcttggtttggttttgctggcaccccaggttacttgtcccctgaggtcttgaggaaagatccctatggaaaacctgtggatatctgggcctgcggggtcatcctgtatatcctcctggtgggctatcctcccttctgggatgaggatcagcacaagctgtatcagcagatcaaggctggagcctatgatttcccatcaccagaatgggacacggtaactcctgaagccaagaacttgatcaaccagatgctgaccataaacccagcaaagcgcatcacggctgaccaggctctcaagcacccgtgggtctgtcaacgatccacggtggcatccatgatgcatcgtcaggagactgtggagtgtttgcgcaagttcaatgcccggagaaaactgaagggtgccatcctcacgaccatgcttgtctccaggaacttctcagctgccaaaagcctattgaacaagaagtcggatggcggtgtcaaggagccacaaaccactgtggtacacaacgctacagatgggatcaagggctccacagagagctgcaacaccaccacagaagatgaggacctcaaagtgcgaaaacaggagatcattaagattacagaacagctgattgaagccatcaacaatggggactttgaggcctacacgaagatttgtgatccaggcctcacttcctttgagcctgaggcccttggtaacctcgtggaggggatggatttccataagttttactttgagaatctcctgtccaagaacagcaagcctatccataccaccatcctaaacccacacgtccacgtgattggggaggacgcagcgtgcatcgcctacatccgcctcacccagtacatcgacgggcagggtcggcctcgcaccagccagtcagaagagacccgggtctggcaccgtcgggatggcaagtggctcaatgtccactatcactgctcaggggcccctgccgcaccgctgcagtgagctcagccacaggggctttaggagattccagccggaggtccaaccttcgcagccagtggctctggagggcctgagtgacagcggcagtcctgtttgtttgaggtttaaaacaattcaattacaaaagcggcagcagccaatgcacgcccctgcatgcagccctcccgcccgcccttcgtgtctgtctctgctgtaccgaggtgttttttacatttaagaaaaaaaaaaaagaaaaaaagattgtttaaaaaaaaaaggaatccataccatgatgcgttttaaaaccaccgacagcccttgggttggcaagaaggcaggagtatgtatgaggtccatcctggcatgagcagtggctcacccaccggccttgaagaggtgagcttggcctctctggtccccatggacttagggggaccaggcaagaactctgacagagctttgggggccgtgatgtgattgcagctcctgaggtggcctgcttaccccaggtctaggaatgaacttctttggaacttgcataggcgcctagaatggggctgatgagaacatcgtgaccatcagacctacttgggagagaacgcagagctcccagcctgctgtggaggcagctgagaagtggtggcctcaggactgagagcccggacgttgctgtactgtcttgtttagtgtagaagggaagagaattggtgctgcagaagtgtacccgccatgaagccgatgagaaacctcgtgttagtctgacatgcactcactcatccatttctataggatgcacaatgcatgtgggccctaatattgaggccttatccctgcagctaggagggggaggggttgttgctgctttgcttcgtgttttcttctaacctggcaaggagagagccaggccctggtcagggctcccgtgccgcctttggcggttctgtttctgtgctgatctggaccatctttgtcttgccttttcacggtagtggtccccatgctgaccctcatctgggcctgggccctctgccaagtgcccctgtgggatgggaggagtgaggcagtgggagaagaggtggtggtcgtttctatgcattcaggctgcctttggggctgcctcccttcttattcttccttgctgcacgtccatctcttttcctgtctttgagattgacctgactgctctggcaagaagaagaggtgtccttacagaggcctctttactgaccaactgaagtatagacttactgctggacaatctgcatgggcatcacccctccccgcatgtaacccaaaagaggtgtccagagccaaggcttctaccttcattgtccctctctgtgctcaaggagttccattccaggaggaagagatctataccctaagcagatagcaaagaagataatggaggagcaattggtcatggccttggtttccctcaaaacaacgctgcagatttatctgcacaaacatctccacttttgggggaaaggtgggtagattccagttccctggactaccttcaggaggcacgagagctgggagaagaggcaaagctacaggtttacttgggagccagctgagaagagagcagactcacaggtgctggtgcttggatttagccaggctcctccgagcacctcatgcatgtcccagcccctgggccctagccctttcctgccctgcagtctgcagtgccagcacgcaaatcccttcaccacagggtttcgttttgctggcttgaagacaaatggtcttagaattcattgagacccatagcttcatatggctgctccagccccacttcttagcattcttactcctcttctggggctaatgtcagcatctatagacaatagactattaaaaaatcaccttttaaacaagaaacggaaggcatttgatgcagaatttttgcatgacaacatagaaataatttaaaaatagtgtttgttctgaatgttggtagacccttcatagctttgttacaatgaaaccttgaactgaaaatatttaataaaataacctttaaacagtc

SEQ ID NO: 199 - DNA, 501 bp, Artificial
  cDNA Sequence
atagctgcctctgcctttgccggtgcagtgagagcagcttcaggaatcttatggcctctgaatattttggcatcttcagcctaccaaaactgtgtcaaaaatgcctctcttatttctgcattgtccactggacgttttagtcatattcagacaccagttgtttcctccactcccagacttaccacatctgagagaaacctgacatgtgggcatacttcagcgatccttaatagagtggccctcttgcttccaagtgtcttgaagctgccagccagatctctaacatacgtcagtacaggaaaaggcaagagaaggattgtgaaagctgtcatctataggtttcttcgacttcattgtggcctttggatgagaagggctggttataagaaaaaattatggaaaaaggcacctgcaagaaaaaagcgattgagggaatttgtattcggcaataaaacccagagtaaactcgataaaatgacgacgtccttctggaagaggtga

SEQ ID NO: 200 - DNA, 303 bp, Artificial
  cDNA Sequence
cagtgctcagcattacgtaagaatggctttgtggtgctcaaaggctggccatgtaagatcgtggagatgtctgcttcgaagactggcaagcacggccacgccaaggtccatctggttggtattgacatctttactgggaagaaatatgaagatatctgcccgtcaactcataatatggatgtccccaacatcaaaaggaatgacttccagctgattggcatccaggatgggtacctatcactgctccaggacagcggggaggtaccagaggaccttcgtctccctgagggagaccttggcaag

SEQ ID NO: 201 - DNA, 747 bp, Artificial
  cDNA Sequence
atgtggctgtgccctctggccctcaccctcatcttgatggcagcctctggtgctgcgtgcgaagtgaaggacgtttgtgttggaagccctggtatccccggcactcctggatcccacggcctgccaggcagggacgggagagatggtgtcaaaggagaccctggccctccaggccccatgggtccgcctggagaaacaccatgtcctcctgggaataatgggctgcctggagcccctggtgtccctggagagcgtggagagaagggggaggctggcgagagaggccctccagggcttccagctcatctagatgaggagctccaagccacactccacgacttcagacatcaaatcctgcagacaaggggagccctcagtctgcagggctccataatgacagtaggagagaaggtcttctccagcaatgggcagtccatcacttttgatgccattcaggaggcatgtgccagagcaggcggccgcattgctgtcccaaggaatccagaggaaaatgaggccattgcaagcttcgtgaagaagtacaacacatatgcctatgtaggcctgactgagggtcccagccctggagacttccgctactcagatgggacccctgtaaactacaccaactggtaccgaggggagcctgcaggtcggggaaaagagcagtgtgtggagatgtacacagatgggcagtggaatgacaggaactgcctgtactcccgactgaccatctgtgagttctga

SEQ ID NO: 202 - DNA, 869 bp, Artificial
  cDNA Sequence
cccaagcagctggaggctctgtgtgtgggtcgctgatttcttggagcctgaaaagaaagtaacacagcagggatgaggacagatggtgtgagtcagtgagagcagcgactggacccagagccatgtggctgtgccctctggccctcaacctcatcttgatggcagcctctggtgctgtgtgcgaagtgaaggacgtttgtgttggaagccctggtatccccggcactcctggatcccacggcctgccaggcagggacgggagagatggtctcaaaggagaccctggccctccaggccccatgggtccacctggagaaatgccatgtcctcctggaaatgatgggctgcctggagcccctggtatccctggagagtgtggagagaagggggagcctggcgagaggggccctccagggcttccagctcatctagatgaggagctccaagccacactccacgactttagacatcaaatcctgcagacaaggggagccctcagtctgcagggctccataatgacagtaggagagaaggtcttctccagcaatgggcagtccatcacttttgatgccattcaggaggcatgtgccagagcaggcggccgcattgctgtcccaaggaatccagaggaaaatgaggccattgcaagcttcgtgaagaagtacaacacatatgcctatgtaggcctgactgagggtcccagccctggagacttccgctactcagacgggacccctgtaaactacaccaactggtaccgaggggagcccgcaggtcggggaaaagagcagtgtgtggagatgtacacagatgggcagtggaatgacaggaactgcctgtactcccgactgaccatctgtgagttctga

SEQ ID NO: 203 - DNA, 1111 bp, Artificial
  cDNA Sequence
cctgcctgacatctgggtagggggtttgtccctggaattctgggacactggctggggtttgaggagagaagccagtacctacctggctgcaggatgaagctggccagtggcttcttggttttgtggctcagccttgggggtggcctggctcagagcgacacgagccctgacacggaggagtcctattcagactggggccttcggcacctccggggaagctttgaatccgtcaatagctacttcgattcttttctggagctgctgggagggaagaatggagtctgtcagtacaggtgccgatatggaaaggcaccaatgcccagacctggctacaagccccaagagcccaatggctgcggctcctatttcctgggtctcaaggtaccagaaagtatggacttgggcattccagcaatgacaaagtgctgcaaccagctggatgtctgttatgacacttgcggtgccaacaaatatcgctgtgatgcaaaattccgatggtgtctccactcgatctgctctgaccttaagcggagtctgggctttgtctccaaagtggaagcagcctgtgattccctggttgacactgtgttcaacaccgtgtggaccttgggctgccgcccctttatgaatagtcagcgggcagcttgcatctgtgcagaggaggagaaggaagagttatgaggaagaagtgattccttcctggttttgagtgacaccacagctgtcagccttcaagatgtcaagtcttcgagtcagcgtgactcattcattcttccaacagtttggacaccacaaagcaggagaaagggaacatttttctacagctggaaagtgagtcctatcctttgaggaaatttgaaaaaagacatggagtggtttgaaagctactcttcatttaagactgctctccccaaccaagacacatttgcctggaaattcagttcttagcttaaagactaaaatgcaagcaaaccctgcaattcctggacctgatagttatattcatgagtgaaattgtggggagtccagccatttgggaggcaatgactttctgctggcccatgtttcagttgccagtaagcttctcacatttaataaagtgtacttttta

SEQ ID NO: 204 - DNA, 2361 bp, Artificial
  cDNA Sequence
aaagcagtgcttctctctggggccaaggccagagctgtggacaccttatcccactcatcctcatcctcttcctctgataaagcccctaccagtgctgataaagtctttctcgtgagagcctagaggccttaaaaaaaaaagtgcttgaaagagaaggggacaaaggaacaccagtattaagaggattttccagtgtttctggcagttggtccagaaggatgcctccattcctgcttctcacctgcctcttcatcacaggcacctccgtgtcacccgtggccctagatccttgttctgcttacatcagcctgaatgagccctggaggaacactgaccaccagttggatgagtctcaaggtcctcctctatgtgacaaccatgtgaatggggagtggtaccacttcacgggcatggcgggagatgccatgcctaccttctgcataccagaaaaccactgtggaacccacgcacctgtctggctcaatggcagccaccccctagaaggcgacggcattgtgcaacgccaggcttgtgccagcttcaatgggaactgctgtctctggaacaccacggtggaagtcaaggcttgccctggaggctactatgtgtatcgtctgaccaagcccagcgtctgcttccacgtctactgtggtcatttttatgacatctgcgacgaggactgccatggcagctgctcagataccagcgagtgcacatgcgctccaggaactgtgctaggccctgacaggcagacatgctttgatgaaaatgaatgtgagcaaaacaacggtggctgcagtgagatctgtgtgaacctcaaaaactcctaccgctgtgagtgtggggttggccgtgtgctaagaagtgatggcaagacttgtgaagacgttgaaggatgccacaataacaatggtggctgcagccactcttgccttggatctgagaaaggctaccagtgtgaatgtccccggggcctggtgctgtctgaggataaccacacttgccaagtccctgtgttgtgcaaatcaaatgccattgaagtgaacatccccagggagctggttggtggcctggagctcttcctgaccaacacctcctgccgaggagtgtccaacggcacccatgtcaacatcctcttctctctcaagacatgtggtacagtggtcgatgtggtgaatgacaagattgtggccagcaacctcgtgacaggtctacccaagcagaccccggggagcagcggggacttcatcatccgaaccagcaagctgctgatcccggtgacctgcgagtttccacgcctgtacaccatttctgaaggatacgttcccaaccttcgaaactccccactggaaatcatgagccgaaatcatgggatcttcccattcactctggagatcttcaaggacaatgagtttgaagagccttaccgggaagctctgcccaccctcaagcttcgtgactccctctactttggcattgagcccgtggtgcacgtgagcggcttggaaagcttggtggagagctgctttgccacccccacctccaagatcgacgaggtcctgaaatactacctcatccgggatggctgtgtttcagatgactcggtaaagcagtacacatcccgggatcacctagcaaagcacttccaggtccctgtcttcaagtttgtgggcaaagaccacaaggaagtgtttctgcactgccgggttcttgtctgtggagtgttggacgagcgttcccgctgtgcccagggttgccaccggcgaatgcgtcgtggggcaggaggagaggactcagccggtctacagggccagacgctaacaggcggcccgatccgcatcgactgggaggactagttcgtagccatacctcgagtccctgcattggacggctctgctctttggagcttctccccccaccgccctctaagaacatctgccaacagctgggttcagacttcacactgtgagttcagactcccagcaccaactcactctgattctggtccattcagtgggcacaggtcacagcactgctgaacaatgtggcctgggtggggtttcatctttctagggttgaaaactaaactgtccacccagaaagacactcaccccatttccctcatttctttcctacacttaaatacctcgtgtatggtgcaatcagaccacaaaatcagaagctgggtataatatttcaagttacaaaccctagaaaaattaaacagttactgaaattatgacttaaatacccaatgactccttaaatatgtaaattatagttataccttgaaatttcaattcaaatgcagactaattatagggaatttggaagtgtatcaataaaacagtatataatttt

SEQ ID NO: 205 - DNA, 2358 bp, Artificial
  cDNA Sequence
aaagcagtgcttctctctggggccaaggccagagctgtggacaccttatcccactcatcctcatcctcttcctctgataaagcccctaccagtgctgataaagtctttctcgtgagagcctagaggccttaaaaaaaaaagtgcttgaaagagaaggggacaaaggaacaccagtattaagaggattttccagtgtttctggcagttggtccagaaggatgcctccattcctgcttctcacctgcctcttcatcacaggcacctccgtgtcacccgtggccctagatccttgttctgcttacatcagcctgaatgagccctggaggaacactgaccaccagttggatgagtctcaaggtcctcctctatgtgacaaccatgtgaatggggagtggtaccacttcacgggcatggcgggagatgccatgcctaccttctgcataccagaaaaccactgtggaacccacgcacctgtctggctcaatggcagccaccccctagaaggcgacggcattgtgcaacgccagcttgtgccagcttcaatgggaactgctgtctctggaacaccacggtggaagtcaaggcttgccggaggctactatgtgtatcgtctgaccaagcccagcgtctgcttccacgtctactgtggtcatttttatgacatctgcgacgaggactgccatggcagctgctcagataccagcgagtgcacatgcgctccaggaactgtgctaggccctgacaggcagacatgctttgatgaaaatgaatgtgagcaaaacaacggtggctgcagtgagatctgtgtgaacctcaaaaactcctaccgctgtgagtgtggggttggccgtgtgctaagaagtgatggcaagacttgtgaagacgttgaaggatgccacaataacaatggtggctgcagccactcttgccttggatctgagaaaggctaccagtgtgaatgtccccggggcctggtgctgtctgaggataaccacacttgccaagtccctgtgttgtgcaaatcaaatgccattgaagtgaacatccccagggagctggttggtggcctggagctcttcctgaccaacacctcctgccgaggagtgtccaacggcacccatgtcaacatcctcttctctctcaagacatgtggtacagtggtcgatgtggtgaatgacaagattgtggccagcaacctcgtgacaggtctacccaagcagaccccggggagcagcggggacttcatcatccgaaccagcaagctgctgatcccggtgacctgcgagtttccacgcctgtacaccatttctgaaggatacgttcccaaccttcgaaactccccactggaaatcatgagccgaaatcatgggatcttcccattcactctggagatcttcaaggacaatgagtttgaagagccttaccgggaagctctgcccaccctcaagcttcgtgactccctctactttggcattgagcccgtggtgcacgtgagcggcttggaaagcttggtggagagctgctttgccacccccacctccaagatcgacgaggtcctgaaatactacctcatccgggatggctgtgtttcagatgactcggtaaagcagtacacatcccgggatcacctagcaaagcacttccaggtccctgtcttcaagtttgtgggcaaagaccacaaggaagtgtttctgcactgccgggttcttgtctgtggagtgttggacgagcgttcccgctgtgcccagggttgccaccggcgaatgcgtcgtggggcaggaggagaggactcagccggtctacagggccagacgctaacaggcggcccgatccgcatcgactgggaggactagttcgtagccatacctcgagtccctgcattggacggctctgctctttggagcttctccccccaccgccctctaagaacatctgccaacagctgggttcagacttcacactgtgagttcagactcccagcaccaactcactctgattctggtccattcagtgggcacaggtcacagcactgctgaacaatgtggcctgggtggggtttcatctttctagggttgaaaactaaactgtccacccagaaagacactcaccccatttccctcatttctttcctacacttaaatacctcgtgtatggtgcaatcagaccacaaaatcagaagctgggtataatatttcaagttacaaaccctagaaaaattaaacagttactgaaattatgacttaaatacccaatgactccttaaatatgtaaattatagttataccttgaaatttcaattcaaatgcagactaattatagggaatttggaagtgtatcaataaaacagtatataatttt

SEQ ID NO: 206 - DNA, 3470 bp, Artificial
  cDNA Sequence
agccaacaccgcctttctcagcatggagacctttgagcccatcagccaagagcccctcagccaagccagctatgacaaagccccagacccagttcctgagctccaagactcgttctatgcagaactgcaacgtgcagagagcctccaagagaagagcataaaagaggccaagaccaaatgcaggacaattgcatccctgctcactgcagcccccaacccccactccaaaggggtacttatgtttaagaaacggcggcagagagccaagaagtacaccctggtgagcttcggggctgctgctgggacaggcgctgaggaggaggacggcgttccccccacgagtgagtccgagctggacgaagaagccttctctgacgcccgcagcctcaccaatcaatctgactgggacagtccctatctggacatggagcttgccagggcgggctcaagagcatcagagggccagggctctgggctgggagggcagctgagtgaggtctctgggcgaggggtgcagctctttgaacagcagcgccagcgcgcagactccagcacccaggaactggcacgggtcgaaccagcagccatgctcaacggggaaggcctgcagtcaccacctcgggcccagagtgctcccccagaggcagctgtgctcccacccagccccttgccggcgcctgtagccagccccagacccttccaaccaggtggtggagccccgaccccagctccaagcatctttaaccggtcagccaggccctttaccccgggcctacaagggcagcggccaactaccacctcggttattttccggcctttagcccccaaaagggcgaacgacagcctggggggcctcagccccgccccaccccccttcttgtcttcgcaggggcccacccctctgcccagcttcacttcaggggttcccagccacgcgccagtctctggttcccccagcaccccacgctcctcgggccctgtgacagccaccagctccctgtacatcccagcccctagtcggcctgtcaccccaggtggagctccagagccccccgctcctcctagcgcagctgccatgacctccaccgcttctatcttcctatctgcgcctttgcgaccctctgcgcgcccagaggcgcctgccccaggcccaggggctcctgagccccccagcgctcgcgagcagcgcatctctgtgccagctgcccgcacgggtatcctgcaggaggcccggcgccgggggacccggaagcagatgttccggccgggaaaggaggagacgaagaactcgcccaaccccgagctgctatcgctggtacagaacctggatgaaaagcctcgggccgggggtgcagaatctggtcctgaagaagatgctctgagcctcggggctgaagcctgcaacttcatgcagccagtaggggccaggagttacaagaccctgcctcacgtgacacctaagaccccccctccaatggctcccaagaccccgccccctatgactcctaagactccacccccagtggctcctaagcccccatctcgagggctccttgatgggctcgtgaatggggcagcctcttcggctggaatccctgagccaccaaggctgcagggcaggggtggggagctgtttgctaagcggcagagccgtgcggacaggtatgtggtggaaggtacacctggtcctggtcttggccctcggcctagaagtccttctcctaccccgtctctgcccccttcctggaaatattcacccaacatccgtgccccgcctcctattgcttacaacccactgctctctccctttttcccccaggcggcccgaactctccctaaggcccaatcccaggggcctcgggcaacacccaagcagggcatcaaggctctagattttatgcggcatcagccctatcaacttaaaactgccatgttctgttttgatgaggttcccccgactcctggccctatcgcctcagggtcccccaaaactgcccgagtccaggagattcgccggttttccactccggcaccccagcccactgcagaacccctggctcccactgtgcttgccccccgagcagccactacactggatgagcccatctggagaacagaactggcctcagcccctgttcctagcccagcccctcctccagaggctcccaggggccttggggcttctcccagctcctgcggtttccaggtagccaggccccgattttcagccaccagaacaggattgcaagctcatgtgtggaggcctggggcagggcaccagtgaacaggcacaggtcccaggaccaaggagaggtggaacatccagttcctaaagttgcttctcctaccctatcccatcccctgtcacgcatctggaagctaaattgcctcctgccagagatggtttccaagttgatgtccccttcccccaccttcctcctcactctctacctccctgccgctttccaaccaagtatgtctgctttggtatctttgcctctctttgtctctgcatttcctttcctggatctctgtctttatttccaggcttctccacccatattcctccacagatctctcttccttgacatttgtgcttttctccctgggcctcattttaatgttcagtgagaagtaaacagagcagaagtgaccactgggacttcaggcaagaagctcaccaccaggcacacagcaaagggactgaactgacccctgtttgcactaagccacccccaccccccactctgctttcccaagcttgactggcatatacctaggcctgtgtgtgtgtgtgtgtgtgtgtgtgtgtgtgtgtgtgtgctcttccgtctaaggcatgaataagaggggaggtcaaaataaagacccaatctgaggccgggcacggtggctcacgccggtaatcccagcactttgggaggccgaggcgggcggatcacgaggtcaggagatcgagaccatcctggctaacacggtgaaaccccatttccactaaaaatacaaaaaattagctgggcgtggtggcgagcgcctgtagtcccagctactcgggaggctgaggcaggagaatggcatgaacctggaaggcggagcttgcagtgagctgagattgcgccactgcactccagcctgggcgacggagcgagactctgtctcaaaacaaacaaacaaacaaaagacccaatctgagtcttatcgttgtactgatagaagggtcagatatccccacatggagttgagtgggagaaagagattcactagagaataactccttagagaccaatgtctgtagcaggtgtacagcatcttgtgaaagttatggagcatgaaaagactgaagggccaggacagtttgcatgggctgagttataccagctagaccaggaatagaacaaagaattctatacctcaggatttcaaaaagttagcaacttgagaggccagtgctgagcaacccagtacccagg

SEQ ID NO: 207 - DNA, 1130 bp, Artificial
  cDNA Sequence
cggtcacagcagctcagtcctccaaagctgctggaccccagggagagctgaccactgcccgagcagccggctgaatccacctccacaatgccgctctcaggaaccccggcccctaataagaagaggaaatccagcaagctgatcatggaactcactggaggtggacaggagagctcaggcttgaacctgggcaaaaagatcagtgtcccaagggatgtgatgttggaggaactgtcgctgcttaccaaccggggctccaagatgttcaaactgcggcagatgagggtggagaagtttatttatgagaaccaccctgatgttttctctgacagctcaatggatattatatctttagtccctggctcttgcaatttccctagtgtaggggcgtgggattacctttcattggctactaaatgctattatttgactgaattttctctcccatggctaccaggagaccaggcaggcggagaaggaaaacatatcactgtgttcaagacctatatttccccatgggagcgagccatgggggttgacccccagcaaaaaatggaacttggcattgacctgctggcctatggggccaaagctgaacttcccaaatataagtccttcaacaggacggcaatgccctatggtggatatgagaaggcctccaaacgcatgaccttccagatgcccaagtttgacctggggcccttgctgagtgaacccctggtcctctacaaccaaaacctctccaacaggccttctttcaatcgaacccctattccctggctgagctctggggagcctgtagactacaacgtggatattggcatccccttggatggagaaacagaggagctgtgaggtgtttcctcctctgatttgcatcatttcccctctctggctccaatttggagagggaatgctgagcagatagcccccattgttaatccagtatccttatgggaatggagggaaaaaggagagatctacctttccatcctttactccaagtccccactccacgcatccttcctcaccaactcagagctccccttctacttgctccatatggaacctgctcgtttatggaatttgctctgccaccagtaacagtcaataaacttcaaggaaaatga

SEQ ID NO: 208 - DNA, 1517 bp, Artificial
  cDNA Sequence
cctaagtgcttctttggatctcaggctctaggtgcaatgtgaaggggagtccctgggcagactgatccctggctcagacagttcagtgggagaatcccaaaggccttttccctccttcctgagcctccgggcaaggagggagggatcttggttccagggtctcagtaccccctgtgccatttgagctgcttgcgctcatcatctctattaataaccaacttccctcccccactgccagtgctgcccccacgcctgcccagctcgtgttctccggtcacagcagctcagtcctccaaagctgctggaccccagggagagctgaccactgcccgagcagccggctgaatccacctccacaatgccgctctcaggaaccccggcccctaataagaagaggaaatccagcaagctgatcatggaactcactggaggtggacaggagagctcaggcttgaacctgggcaaaaagatcagtgtcccaagggatgtgatgttggaggaactgtcgctgcttaccaaccggggctccaagatgttcaaactgcggcagatgagggtggagaagtttatttatgagaaccaccctgatgttttctctgacagctcaatggatcacttccagaagttccttccaacagtggggggacagctgggcacagctggtcagggattctcatacagcaagagcaacggcagaggcggcagccaggcagggggcagtggctctgccggacagtatggctctgatcagcagcaccatctgggctctgggtctggagctgggggtacaggtggtcccgcgggccaggctggcagaggaggagctgctggcacagcaggggttggagaccaggcaggcggagaaggaaaacatatcactgtgttcaagacctatatttccccatgggagcgagccatgggggttgacccccagcaaaaaatggaacttggcattgacctgctggcctatggggccaaagctgaacttcccaaatataagtccttcaacaggacggcaatgccctatggtggatatgagaaggcctccaaacgcatgaccttccagatgcccaagtttgacctggggcccttgctgagtgaacccctggtcctctacaaccaaaacctctccaacaggccttctttcaatcgaacccctattccctggctgagctctggggagcctgtagactacaacgtggatattggcatccccttggatggagaaacagaggagctgtgaggtgtttcctcctctgatttgcatcatttcccctctctggctccaatttggagagggaatgctgagcagatagcccccattgttaatccagtatccttatgggaatggagggaaaaaggagagatctacctttccatcctttactccaagtccccactccacgcatccttcctcaccaactcagagctccccttctacttgctccatatggaacctgctcgtttatggaatttgctctgccaccagtaacagtcaataaacttcaaggaaaatg

SEQ ID NO: 209 - DNA, 363 bp, Artificial
  cDNA Sequence
atgctgaggatcttttcacacgtttcacggccacttggatttcttctgaggaaattatcactgtttcaggaggagagttacttcaggaaccctgcggacagagggacagcccaccagactaccatctgttgtttgaataatttttttccttatcaattggattcattttggtatcctgtttttgaactcagcttaagaacttctcatctcaaatcctatggccttctggaagatccaccactatccaaaggaaaaagtagattaatatgcctcaagggatatgacatctatggcatagggctactggtctcatcccagcgatcgggacagaaattgctaatagctcatgcaactctttcatga

SEQ ID NO: 210 - DNA, 540 bp, Artificial
  cDNA Sequence
atggttcgctattcacttgacccggagaaccccacaaaatcatgcaaatcaagaggttccaatcttcgtgttcactttaagaacactcgtgaaactgctcaggccatcaagggtatgtatatacaaaaaggcacgaagtatctgaaagatgtcactttacagaaacagtgcataccattccgacattacaatggtggagttggcaggtgtgcgcaggcaaagcacctgtttgggccacaaggtcggtggcccaaaaagagtgctgaatttttgctgcacgtgcttaaaaacacagagagtaatgctgaacttaagggtgattctctggtcattgagcatatccaagtgaacaaagcacctaagatgcaccaacggacttacagagctcatggaaacccatacatgagctcttcctgccacattgagatgatctttactgaaaaggaacagattgttcctaaaccagaagaggaggttgcccagaagaaaaagatatcccagaagaaactgaagaaacaaaaacttatggcacgggaataa

SEQ ID NO: 211 - DNA, 1605 bp, Artificial
  cDNA Sequence
atgatctggtatatattaattataggaattctgcttccccagtctttggctcatccaggcttttttacttcaattggtcagatgactgatttgatccatactgagaaagatctggtgacttctctgaaagattatattaaggcagaagaggacaagttagaacaaataaaaaaatgggcagagaagttagatcggctaactagtacagcgacaaaagatccagaaggatttgttgggcatccagtaaatgcattcaaattaatgaaacgtctgaatactgagtggagtgagttggagaatctggtccttaaggatatgtcagatggctttatctctaacctaaccattcagagacagtactttcctaatgatgaagatcaggttggggcagccaaagctctgttacgtctccaggatacctacaatttggatacagataccatctcaaagggtaatcttccaggagtgaaacacaaatcttttctaacggctgaggactgctttgagttgggcaaagtggcctatacagaagcagattattaccatacggaactgtggatggaacaagccctaaggcaactggatgaaggcgagatttctaccatagataaagtctctgttctagattatttgagctatgcggtatatcagcagggagacctggataaggcacttttgctcacaaagaagcttcttgaactagatcctgaacatcagagagctaatggtaacttaaaatattttgagtatataatggctaaagaaaaagatgtcaataagtctgcttcagatgaccaatctgatcagaaaactacaccaaagaaaaaaggggttgctgtggattacctgccagagagacagaagtacgaaatgctgtgccgtggggagggtatcaaaatgacccctcggagacagaaaaaactcttttgccgctaccatgatggaaaccgtaatcctaaatttattctggctccagctaaacaggaggatgaatgggacaagcctcgtattattcgcttccatgatattatttctgatgcagaaattgaaatcgtcaaagacctagcaaaaccaaggctgagccgagctacagtacatgaccctgagactggaaaattgaccacagcacagtacagagtatctaagagtgcctggctctctggctatgaaaatcctgtggtgtctcgaattaatatgagaatacaagatctaacaggactagatgtttccacagcagaggaattacaggtagcaaattatggagttggaggacagtatgaaccccattttgactttgcacggaaagatgagccagatgctttcaaagagctggggacaggaaatagaattgctacatggctgttttatatgagtgatgtgtctgcaggaggagccactgtttttcctgaagttggagctagtgtttggcccaaaaaaggaactgctgttttctggtataatctgtttgccagtggagaaggagattatagtacacggcatgcagcctgtccagtgctagttggcaacaaatgggtatccaataaatggctccatgaacgtggacaagaatttcgaagaccttgtacgttgtcagaattggaatga

SEQ ID NO: 212 - DNA, 1605 bp, Artificial
  cDNA Sequence
atgatctggtatatattaattataggaattctgcttccccagtctttggctcatccaggcttttttacttcaattggtcagatgactgatttgatccatactgagaaagatctggtgacttctctgaaagattatattaaggcagaagaggacaagttagaacaaataaaaaaatgggcagagaagttagatcggctaactagtacagcgacaaaagatccagaaggatttgttgggcatccagtaaatgcattcaaattaatgaaacgtctgaatactgagtggagtgagttggagaatctggtccttaaggatatgtcagatggctttatctctaacctaaccattcagagacagtactttcctaatgatgaagatcaggttggggcagccaaagctctgttacgtctccaggatacctacaatttggatacagataccatctcaaagggtaatcttccaggagtgaaacacaaatcttttctaacggctgaggactgctttgagttgggcaaagtggcctatacagaagcagattattaccatacggaactgtggatggaacaagccctaaggcaactggatgaaggcgagatttctaccatagataaagtctctgttctagattatttgagctatgcggtatatcagcagggagacctggataaggcacttttgctcacaaagaagcttcttgaactagatcctgaacatcagagagctaatggtaacttaaaatattttgagtatataatggctaaagaaaaagatgtcaataagtctgcttcagatgaccaatctgatcagaaaactacaccaaagaaaaaaggggttgctgtggattacctgccagagagacagaagtacgaaatgctgtgccgtggggagggtatcaaaatgacccctcggagacagaaaaaactcttttgccgctaccatgatggaaaccgtaatcctaaatttattctggctccagctaaacaggaggatgaatgggacaagcctcgtattattcgcttccatgatattatttctgatgcagaaattgaaatcgtcaaagacctagcaaaaccaaggctgaggcgagccaccatttcaaacccaataacaggagacttggagacggtacattacagaattagcaaaagtgcctggctctctggctatgaaaatcctgtggtgtctcgaattaatatgagaatacaagatctaacaggactagatgtttccacagcagaggaattacaggtagcaaattatggagttggaggacagtatgaaccccattttgactttgcacggaaagatgagccagatgctttcaaagagctggggacaggaaatagaattgctacatggctgttttatatgagtgatgtgtctgcaggaggagccactgtttttcctgaagttggagctagtgtttggcccaaaaaaggaactgctgttttctggtataatctgtttgccagtggagaaggagattatagtacacggcatgcagcctgtccagtgctagttggcaacaaatgggtatccaataaatggctccatgaacgtggacaagaatttcgaagaccttgtacgttgtcagaattggaatga

SEQ ID NO: 213 - DNA, 2151 bp, Artificial
  cDNA Sequence
agacagtcacagttcgctggagagaacaaagccaactgttgtaggggtggatactcacatggaacttgatgaagttcattgctgccctggaagagattcgggaggaggcttcatcaaaggtcccatgctccagggactccagggtgagggtaaactggccccaatcccaaaacccactcttccctctccctctcgcctcaccctgttcgtatctagttctcaaatggaagaccatgggtttccagccaggagaaatggattgacccaagcaagcttcatctaccagatgcccgcaggctggggcagtcccggcggcctcttcctcccttgccagccagtgccaacccccgtggttctcaagcctccgctgccaccctgtcccatttcctggggagagtctggccctgctgtggatggaatccggaggaccccagctccctgagcagcccctcctctcccctggtgctgatcagaggtccttgggcagcatcagtcaaagcaagagcgcactcactttggagtcgctcacgaccaggacgcagagaagcaggcgcgccagcagggctctcatggtggcgaggtcggggcgctagacggcggctctgcaaaggaaggagaagtcagggcaagaggcggaggaacgggaaggcaggccaggcgggcgactgcagcgcaggggagatgcccgcggtgaccaggctccccagctgtctctctcctctctgggctccggactccgggcagcctggatcggcacccgcgggggacgcccgggacggggcgccttgactccgtgcagccgccggggagcccagggagcccgggcagcccagggcgggggaggcagacgctcgggagctggggccgccgcgcatccggcccggggatctcaggaccgcggcactcaccggtggctgcggcaggagggcgcgagccggcgctgcggggacaggtggaccctggcccgggctccggggctgcggtctccgcactgtgctgcgacccgcggcgcctgctctatatcagggcccgccccggcgccgcccctccctctcccgcccggctccctcccctgtcttgcagcgctcagcgacccggaccccgcgtgcttccgcaacgctcacaaagatttgggggaagcgcgatctccagcggaggggacccaacagcgtctggactgaggaatcgagaggcttgtaaattctccgtgcttcctcccatgcacctggccgggggcctgccccagtgcaaggagtccccgaattgcagagaggagagaaggcgcacaggagactctctacctcgcccagctctgaagcctcctggggtcctctaatcagttcttctgcaacttctccccgctgggccccaacttgcctaagactgcctcagacccccttgcccgcagctgatggagctgtgaagtcttcatcaacgcgacaaatgtacgagacatactctcccagaagcacagacagaaaaacccctgcctgtaggggctccctctgtgcgtctgttcagtggcagtccccagatatcaccaacacaaccagtggatggaacaaagccgggcttattgctttcggcagtaagggggtttgtttgatggtgctatcagagggggaaaggcaaggccagattactgaaaatttgcagcttggtttaaagtccgtttttgacagggcttgataaggattgggttaggtgtcgtgatatgatgttacaggattgtgggaacaaagtcctagggcataaactgttggtgcttcctattgaagtgttaacgggtcttttgggaagtttccataatgagcaattcatttatttgtgcaggcaagaataaaagtaaagacaatggaaacatgtagacagttctaactgtggaggttctggagggtgtggaagttctgttctcacctctgagtagaggaattgggagactggaggacaaaataagaggaagatttatttttcactgtttgtccttttacactcttaacattttaaaaagcacatctctgtatagcccattccaaaaagataattatgcattttttaatgcatgtgtatttagtgttttacttcatcatagagccttgtttattctattcagatagaaacaattgtttatcaaataaaattgtcctccag

SEQ ID NO: 214 - DNA, 1017 bp, Artificial
  cDNA Sequence
atggggaaaaaacagaacagaaaaactggaaactctaaaacgcagagcgcctctcctcctccaaaggaacgcagttcctcaccagcaacggaacaaagctggatggagaatgactttgacgagctgagagaagaaggtttcagacgatcaaattactctgagctacgggaggacattcaaaccaaaggcaaagaagttgaaaactttgaaaaaaatttagaagaatgtataactagaataaccaatacagagaagtgcttaaaggagctgatggagctgaaaaccaaggctcgagaactacgtgaagaatgcagaagcctcaggagccgatgcgatcaactggaagaaagggtatcagcaatggaagatgaaatgaatgaaatgaagcgagaagggaagtttagagaaaaaagaataaaaagaaatgagcaaagcctccaagaaatatgggactatgtgaaaagaccaaatctacgtctgattggtgtacctgaaagtgatgcggagaatggaaccaagttggaaaacactctgcaggatattatccaggagaacttccccaatctagcaaggcaggccaacgttcagattcaggaaatacagagaatgccacaaagatactcctcgagaagagcaactccaagacacataattgtcagattcaccaaagttgaaatgaaggaaaaaatgttaagggcagccagagagaaaggtcgggttaccctcaaagggaagcccatcagactaacagcggatctctcggcagaaaccctacaagccagaagagagtgggggccaatattcaacattcttaaagaaaagaattttcaacccagaatttcatatccagccaaactaagcttcataagtgaaggagaaataaaatactttacagacaagcaaatgctgagagattttgtcaccaccaggcctgccctaaaagagctcctgaaggaagcgctaaacatggaaaggaacaaccggtaccagccgctgcaaaatcatgctaaaatgtaa

SEQ ID NO: 215 - DNA, 2169 bp, Artificial
  cDNA Sequence
gcgcgacgtcagtttgagttctgtgttctccccgcccgtgtcccgcccgacccgcgcccgcgatgctggcgctgcgctgcggctcccgctggctcggcctgctctccgtcccgcgctccgtgccgctgcgcctccccgcggcccgcgcctgcagcaagggctccggcgacccgtcctcttcctcctcctccgggaacccgctcgtgtacctggacgtggacgccaacgggaagccgctcggccgcgtggtgctggagctgaaggcagatgtcgtcccaaagacagctgagaacttcagagccctgtgcactggtgagaagggcttcggctacaaaggctccaccttccacagggtgatcccttccttcatgtgccaggcgggcgacttcaccaaccacaatggcacaggcgggaagtccatctacggaagccgctttcctgacgagaactttacactgaagcacgtggggccaggtgtcctgtccatggctaatgctggtcctaacaccaacggctcccagttcttcatctgcaccataaagacagactggttggatggcaagcatgttgtgttcggtcacgtcaaagagggcatggacgtcgtgaagaaaatagaatctttcggctctaagagtgggaggacatccaagaagattgtcatcacagactgtggccagttgagctaatctgtggccagggtgctggcatggtggcagctgcaaatgtccatgcacccaggtggccgcgttgggctgtcagccaaggtgcctgaaacgatacgtgtgcccactccactgtcacagtgtgcctgaggaaggctgctagggatgttagacctcggccaggacccaccacattgcttcctaatacccacccttcctcacgacctcatttctgggcatctttgtggacatgatgtcacccaccccttgtcaagcattgcctgtgattgcccagcccagattcatctgtgccttggacatggtgatggtgatgggttgccatccaagtgaaagtcttttccttgaccaagggggacagtcagttttgcaaaaggactctaatacctgtttaatattgtcttcctaattgggataatttaattaacaagattgactagaagtgaaactgcaacactaacttccccgtgctgtggtgtgacctgagttggtgacacaggccacagaccccagagcttggcttttgaaacacaactcagggcttttgtgaaggttcccccgctgagatctttcctcctggttactgtgaagcctgttggtttgctgctgtcgtttttgaggagggcccatgggggtaggagcagttgaacctgggaacaaacctcacttgagctgtgcctagacaatgtgaattcctgtgttgctaacagaagtggcctgtaagctcctgtgctccggagggaagcatttcctggtaggctttgatttttctgtgtgttaaagaaattcaatctactcatgatgtgttatgcataaaacatttctggaacatggatttgtgttcaccttaaatgtgaaaataaatcctattttctatggaagactggtacctggtttctggaagaggggtctgtgacttggagctgatctttactgagctcgccgtggcagatgccatgctcaggacgttcatgtggatggtttcatgtcatcgtgctggcaacttgtcctccctgccttagagatgaggctcagacaaacgaccttagcacccatagcctatgccatgagcactggctccaccctgaatcccagctcctccccttagtgaccccaagtctgtttccctcagctgcataaggaggcgatatagtttgaatatttgtccccagccaaatctcatgttgaactgtaatccccagtgctggaggtggggcctgctacgaggtgtttggatcatggggacgggtatttcatggcttggtgctgttttcttgatggtgaattattgcaagatacggtcatttaaaattgtgtggcacctccccctgcccccttcttgctcctgctttcaccatgtgacatgcctgatcccccttcaccttttgccatggtcataagcttcctgaggcctccctggaagctgagcagatgccagcaccatgcttcctgtacatcctgcagaaccataagccaattaaaccttttt

SEQ ID NO: 216 - DNA, 207 bp, Artificial
  cDNA Sequence
atggctatagattgtggtttgacactcctggctgcccactgcagctctggggcaatgtcagtgtttacgttccttcctcaacttggcggcaacagaggaaaggaccttagtagtggttgtggtcaagggtcttttgcttgtatcctgggagctccacaccagagagatgtaggtcagcaattcctcagtgcaatcaccccaggatga

SEQ ID NO: 217 - DNA, 2330 bp, Artificial
  cDNA Sequence
cagccccggagcccgggccagggtccacctgtccccgcagcgccggctcgcgccctcctgccgcagccaccgagccgccgtctagcgccccgacctcgccaccatgagagccctgctggcgcgcctgcttctctgcgtcctggtcgtgagcgactccaaaggcagcaatgaacttcatcaagttccatcgaactgtgactgtctaaatggaggaacatgtgtgtccaacaagtacttctccaacattcactggtgcaactgcccaaagaaattcggagggcagcactgtgaaatagataagtcaaaaacctgctatgaggggaatggtcacttttaccgaggaaaggccagcactgacaccatgggccggccctgcctgccctggaactctgccactgtccttcagcaaacgtaccatgcccacagatctgatgctcttcagctgggcctggggaaacataattactgcaggaacccagacaaccggaggcgaccctggtgctatgtgcaggtgggcctaaagctgcttgtccaagagtgcatggtgcatgactgcgcagatggaaaaaagccctcctctcctccagaagaattaaaatttcagtgtggccaaaagactctgaggccccgctttaagattattgggggagaattcaccaccatcgagaaccagccctggtttgcggccatctacaggaggcaccgggggggctctgtcacctacgtgtgtggaggcagcctcatcagcccttgctgggtgatcagcgccacacactgcttcattgattacccaaagaaggaggactacatcgtctacctgggtcgctcaaggcttaactccaacacgcaaggggagatgaagtttgaggtggaaaacctcatcctacacaaggactacagcgctgacacgcttgctcaccacaacgacattgccttgctgaagatccgttccaaggagggcaggtgtgcgcagccatcccggactatacagaccatctgcctgccctcgatgtataacgatccccagtttggcacaagctgtgagatcactggctttggaaaagagaattctaccgactatctctatccggagcagctgaaaatgactgttgtgaagctgatttcccaccgggagtgtcagcagccccactactacggctctgaagtcaccaccaaaatgctgtgtgctgctgacccacagtggaaaacagattcctgccagggagactcagggggacccctcgtctgttccctccaaggccgcatgactttgactggaattgtgagctggggccgtggatgtgccctgaaggacaagccaggcgtctacacgagagtctcacacttcttaccctggatccgcagtcacaccaaggaagagaatggcctggccctctgagggtccccagggaggaaacgggcaccacccgctttcttgctggttgtcatttttgcagtagagtcatctccatcagctgtaagaagagactgggaagataggctctgcacagatggatttgcctgtgccacccaccagggcgaacgacaatagctttaccctcaggcataggcctgggtgctggctgcccagacccctctggccaggatggaggggtggtcctgactcaacatgttactgaccagcaacttgtctttttctggactgaagcctgcaggagttaaaaagggcagggcatctcctgtgcatgggtgaagggagagccagctcccccgacggtgggcatttgtgaggcccatggttgagaaatgaataatttcccaattaggaagtgtaacagctgaggtctcttgagggagcttagccaatgtgggagcagcggtttggggagcagagacactaacgacttcagggcagggctctgatattccatgaatgtatcaggaaatatatatgtgtgtgtatgtttgcacacttgtgtgtgggctgtgagtgtaagtgtgagtaagagctggtgtctgattgttaagtctaaatatttccttaaactgtgtggactgtgatgccacacagagtggtctttctggagaggttataggtcactcctggggcctcttgggtcccccacgtgacagtgcctgggaatgtattattctgcagcatgacctgtgaccagcactgtctcagtttcactttcacatagatgtccctttcttggccagttatcccttccttttagcctagttcatccaatcctcactgggtggggtgaggaccactcctgtacactgaatatttatatttcactatttttatttatatttttgtaattttaaataaaagtgatcaataaaatgtgatttttctgatg

SEQ ID NO: 218 - DNA, 5327 bp, Artificial
  cDNA Sequence
gcacagtctgtctcttcgccggttcccggccccgtggatcctacttctctgtcgcccgcggttcgccgccccgctcgccgccgcgatgccagtgtttcatacgcgcacgatcgagagcatcctggagccggtggcacagcagatctcccacctggtgataatgcacgaggagggcgaggtggacggcaaagccattcctgacctcaccgcgcccgtggccgccgtgcaggcggccgtcagcaacctcgtccgggttggaaaagagactgttcaaaccactgaggatcagattttgaagagagatatgccaccagcatttattaaggttgagaatgcttgcaccaagcttgtccaggcagctcagatgcttcagtcagacccttactcagtgcctgctcgagattatctaattgatgggtcaaggggcatcctctctggaacatcagacctgctccttaccttcgatgaggctgaggtccgtaaaattattagagtttgcaaaggaattttggaatatcttacagtggcagaggtggtggagactatggaagatttggtcacttacacaaagaatcttgggccaggaatgactaagatggccaagatgattgacgagagacagcaggagctcactcaccaggagcaccgagtgatgttggtgaactcgatgaacaccgtgaaagagttgctgccagttctcatttcagctatgaagatttttgtaacaactaaaaactcaaaaaaccaaggcatagaggaagctttaaaaaatcgcaattttactgtagaaaaaatgagtgctgaaattaatgagataattcgtgtgttacaactcacctcttgggatgaagatgcctgggccagcaaggacactgaagccatgaagagagcattggcctccatagactccaaactgaaccaggccaaaggttggctccgtgaccctagtgcctccccaggggatgctggtgagcaggccatcagacagatcttagatgaagctggaaaagttggtgaactctgtgcaggcaaagaacgcagggagattctgggaacttgcaaaatgctagggcagatgactgatcaagtggctgacctccgtgccagaggacaaggatcctcaccggtggccatgcagaaagctcagcaggtatctcagggtctggatgtgctcacagcaaaagtggaaaatgcagctcgcaagctggaagccatgaccaactcaaagcagagcattgcaaagaagatcgatgctgctcagaactggcttgcagatccaaatggtggaccggaaggagaagagcagattcgaggtgctttggctgaagctcggaaaatagcagaattatgtgatgatcctaaagaaagagatgacattctacgttcccttggggaaatatctgctctgacttctaaattagcagatctacgaagacaggggaaaggagattctccagaggctcgagccttggccaaacaggtggccacggccctgcagaacctgcagaccaaaaccaaccgggctgtggccaacagcagaccggccaaagcagctgtacaccttgagggcaagattgagcaagcacagcggtggattgataatcccacagtggatgaccgtggagtcggtcaggctgccatccgggggcttgtggccgaagggcatcgtctggctaatgttatgatggggccttatcggcaagatcttctcgccaagtgtgaccgagtggaccagctgacagcccagctggctgacctggctgccagaggggaaggggagagtcctcaggcacgagcacttgcatctcagctccaagactccttaaaggatctaaaagctcggatgcaggaggccatgactcaggaagtgtcagatgttttcagcgataccacaactcccatcaagctgttggcagtggcagccacggcgcctcctgatgcgcctaacagggaagaggtatttgatgagagggcagctaactttgaaaaccattcaggaaagcttggtgctacggccgagaaggcggctgcggttggtactgctaataaatcaacagtggaaggcattcaggcctcagtgaagacggcccgagaactcacaccccaggtggtctcggctgctcgtatcttacttaggaaccctggaaatcaagctgcttatgaacattttgagaccatgaagaaccagtggatcgataatgttgaaaaaatgacagggctggtggacgaagccattgataccaaatctctgttggatgcttcagaagaagcaattaaaaaagacctggacaagtgcaaggtagctatggccaacattcagcctcagatgctggttgctggggcaaccagtattgctcgtcgggccaaccggatcctgctggtggctaagagggaggtggagaattccgaggatcccaagttccgtgaggctgtgaaagctgcctctgatgaattgagcaaaaccatctccccgatggtgatggatgcaaaagctgtggctggaaacatttccgaccctggactgcaaaagagcttcctggactcaggatatcggatcctgggagctgtggccaaggtcagagaagccttccaacctcaggagcctgacttcccgccgcctccaccagaccttgaacaactccgactaacagatgagcttgctcctcccaaaccacctctgcctgaaggtgaggtccctccacctaggcctccaccaccagaggaaaaggatgaagagttccctgagcagaaggccggggaggtgattaaccagccaatgatgatggctgccagacagctccatgatgaagctcgcaaatggtccagcaagccgggcatcccagccgctgaggtgggtataggtgttgtagctgaggcagatgcggccgatgctgctggcttccctgtcccccctgacatggaagacgattacgaacctgagctgctgttaatgccatccaatcagccggtcaaccagcccattctggccgcggctcagtccttgcatcgggaagctaccaagtggtctagtaagggcaatgacatcattgcagcagccaagcgcatggctctgctgatggctgagatgtctcggctggtaagagggggcagtggtaccaagcgggcactcattcagtgtgccaaggacatcgccaaggcctcagatgaggtgactcggttggccaaggaggttgccaagcagtgcacagataaacggattagaaccaacctcttacaggtatgtgagcgaatcccaaccataagcacccagctcaaaatcctgtccacagtgaaggccaccatgctgggccggaccaacatcagtgatgaggagtctgagcaggccacagagatgctggttcacaatgcccagaacctcatgcagtctgtgaaggagactgtgcgggaagctgaagctgcttcaatcaaaattcgaacagatgctggatttacactgcgctgggttagaaagactccctggtaccagtaggcacctggctgagcctggctggcacagaaacctctactaaaaagaaggaaaatgatctgagtcccaggagctgcccagagttgctgggagctgaaaaatcacatcctggcctggcacatcagaaaggaatgggggcctcttcaaattagaagacatttatactcttttttcatggacactttgaaatgtgtttctgtataaagcctgtattctcaaacacagttacacttgtgcaccctctatcccaataggcagactgggtttctagcccatggacttcacataagctcagaatccaagtgaacactagccagacactctgctctgcccttgttccctaggggacacttccctctgtttctctttccttggctcccattcactcttccagaatcccaagacccagggcccaggcaaatcagttactaagaagaaaattgctgtgcctcccaaaattgttttgagctttccatgttgctgccaaccataccttccttccctgggctgtgctacctgggtccttttcagaagtgagctttgctgctacaggggaaggtggcctctgtggagccccagcatatgggggcctggattcatttcctgcccttcctcagtttaatccttctagtttcccacaatataaaactgtacttcactgtcaggaagaaatcacagaatcatatgattctgcttttaccatgcccctgagcaatgtctgtgctagggaaacttcccgtcccatatcctgcctcagcccgccaaggtagccatcccatgaacacactgtgtcctggtgctctctgccactggaagggcagagtagccagggtgtggccctgccatcttcccagcagggccactcccggcactccatgcttagtcactgcctgcagaggtctgtgctgaggccttatcattcattcttagctcttaattgttcattttgagctgaaatgctgcattttaattttaaccaaaacatgtctcctatcctggtttttgtagccttcctccacatcctttctaaacaagattttaaagacatgtaggtgtttgttcatctgtaactctaaaagatcctttttaaattcagtcctaagaaagaggagtgcttgtcccctaagagtgtttaatggcaaggcagccctgtctgaaggacacttcctgcctaagggagagtggtatttgcagactagaattctagtgctgctgaagatgaatcaatgggaaatactactcctgtaattcctacctccctgcaaccaactacaaccaagctctctgcatctactcccaagtatggggttcaagagagtaatgggtttcatatttcttatcaccacagtaagttcctactaggcaaaatgagagggcagtgtttcctttttggtacttattactgctaagtatttcccagcacatgaaaccttattttttcccaaagccagaaccagatgagtaaaggagtaagaaccttgcctgaacatccttccttcccacccatcgctgtgtgttagttcccaacatcgaatgtgtacaacttaagttggtcctttacactcaggctttcactatttcctttataatgaggatgattattttcaaggccctcagcatatttgtatagttgcttgcctgatataaatgcaatattaatgcctttaaagtatgaatctatgccaaagatcacttgttgttttactaaagaaagattacttagaggaaataagaaaaatcatgtttgctctcccggttcttccagtggtttgagacactggtttacactttatgccggatgtgcttttctccaatatcagtgctcgagacacagtgaagc

SEQ ID NO: 219 - DNA, 5123 bp, Artificial
  cDNA Sequence
gcacagtctgtctcttcgccggttcccggccccgtggatcctacttctctgtcgcccgcggttcgccgccccgctcgccgccgcgatgccagtgtttcatacgcgcacgatcgagagcatcctggagccggtggcacagcagatctcccacctggtgataatgcacgaggagggcgaggtggacggcaaagccattcctgacctcaccgcgcccgtggccgccgtgcaggcggccgtcagcaacctcgtccgggttggaaaagagactgttcaaaccactgaggatcagattttgaagagagatatgccaccagcatttattaaggttgagaatgcttgcaccaagcttgtccaggcagctcagatgcttcagtcagacccttactcagtgcctgctcgagattatctaattgatgggtcaaggggcatcctctctggaacatcagacctgctccttaccttcgatgaggctgaggtccgtaaaattattagagtttgcaaaggaattttggaatatcttacagtggcagaggtggtggagactatggaagatttggtcacttacacaaagaatcttgggccaggaatgactaagatggccaagatgattgacgagagacagcaggagctcactcaccaggagcaccgagtgatgttggtgaactcgatgaacaccgtgaaagagttgctgccagttctcatttcagctatgaagatttttgtaacaactaaaaactcaaaaaaccaaggcatagaggaagctttaaaaaatcgcaattttactgtagaaaaaatgagtgctgaaattaatgagataattcgtgtgttacaactcacctcttgggatgaagatgcctgggccagcaaggacactgaagccatgaagagagcattggcctccatagactccaaactgaaccaggccaaaggttggctccgtgaccctagtgcctccccaggggatgctggtgagcaggccatcagacagatcttagatgaagctggaaaagttggtgaactctgtgcaggcaaagaacgcagggagattctgggaacttgcaaaatgctagggcagatgactgatcaagtggctgacctccgtgccagaggacaaggatcctcaccggtggccatgcagaaagctcagcaggtatctcagggtctggatgtgctcacagcaaaagtggaaaatgcagctcgcaagctggaagccatgaccaactcaaagcagagcattgcaaagaagatcgatgctgctcagaactggcttgcagatccaaatggtggaccggaaggagaagagcagattcgaggtgctttggctgaagctcggaaaatagcagaattatgtgatgatcctaaagaaagagatgacattctacgttcccttggggaaatatctgctctgacttctaaattagcagatctacgaagacaggggaaaggagattctccagaggctcgagccttggccaaacaggtggccacggccctgcagaacctgcagaccaaaaccaaccgggctgtggccaacagcagaccggccaaagcagctgtacaccttgagggcaagattgagcaagcacagcggtggattgataatcccacagtggatgaccgtggagtcggtcaggctgccatccgggggcttgtggccgaagggcatcgtctggctaatgttatgatggggccttatcggcaagatcttctcgccaagtgtgaccgagtggaccagctgacagcccagctggctgacctggctgccagaggggaaggggagagtcctcaggcacgagcacttgcatctcagctccaagactccttaaaggatctaaaagctcggatgcaggaggccatgactcaggaagtgtcagatgttttcagcgataccacaactcccatcaagctgttggcagtggcagccacggcgcctcctgatgcgcctaacagggaagaggtatttgatgagagggcagctaactttgaaaaccattcaggaaagcttggtgctacggccgagaaggcggctgcggttggtactgctaataaatcaacagtggaaggcattcaggcctcagtgaagacggcccgagaactcacaccccaggtggtctcggctgctcgtatcttacttaggaaccctggaaatcaagctgcttatgaacattttgagaccatgaagaaccagtggatcgataatgttgaaaaaatgacagggctggtggacgaagccattgataccaaatctctgttggatgcttcagaagaagcaattaaaaaagacctggacaagtgcaaggtagctatggccaacattcagcctcagatgctggttgctggggcaaccagtattgctcgtcgggccaaccggatcctgctggtggctaagagggaggtggagaattccgaggatcccaagttccgtgaggctgtgaaagctgcctctgatgaattgagcaaaaccatctccccgatggtgatggatgcaaaagctgtggctggaaacatttccgaccctggactgcaaaagagcttcctggactcaggatatcggatcctgggagctgtggccaaggtcagagaagccttccaacctcaggagcctgacttcccgccgcctccaccagaccttgaacaactccgactaacagatgagcttgctcctcccaaaccacctctgcctgaaggtgaggtccctccacctaggcctccaccaccagaggaaaaggatgaagagttccctgagcagaaggccggggaggtgattaaccagccaatgatgatggctgccagacagctccatgatgaagctcgcaaatggtccagcaagggcaatgacatcattgcagcagccaagcgcatggctctgctgatggctgagatgtctcggctggtaagagggggcagtggtaccaagcgggcactcattcagtgtgccaaggacatcgccaaggcctcagatgaggtgactcggttggccaaggaggttgccaagcagtgcacagataaacggattagaaccaacctcttacaggtatgtgagcgaatcccaaccataagcacccagctcaaaatcctgtccacagtgaaggccaccatgctgggccggaccaacatcagtgatgaggagtctgagcaggccacagagatgctggttcacaatgcccagaacctcatgcagtctgtgaaggagactgtgcgggaagctgaagctgcttcaatcaaaattcgaacagatgctggatttacactgcgctgggttagaaagactccctggtaccagtaggcacctggctgagcctggctggcacagaaacctctactaaaaagaaggaaaatgatctgagtcccaggagctgcccagagttgctgggagctgaaaaatcacatcctggcctggcacatcagaaaggaatgggggcctcttcaaattagaagacatttatactcttttttcatggacactttgaaatgtgtttctgtataaagcctgtattctcaaacacagttacacttgtgcaccctctatcccaataggcagactgggtttctagcccatggacttcacataagctcagaatccaagtgaacactagccagacactctgctctgcccttgttccctaggggacacttccctctgtttctctttccttggctcccattcactcttccagaatcccaagacccagggcccaggcaaatcagttactaagaagaaaattgctgtgcctcccaaaattgttttgagctttccatgttgctgccaaccataccttccttccctgggctgtgctacctgggtccttttcagaagtgagctttgctgctacaggggaaggtggcctctgtggagccccagcatatgggggcctggattcatttcctgcccttcctcagtttaatccttctagtttcccacaatataaaactgtacttcactgtcaggaagaaatcacagaatcatatgattctgcttttaccatgcccctgagcaatgtctgtgctagggaaacttcccgtcccatatcctgcctcagcccgccaaggtagccatcccatgaacacactgtgtcctggtgctctctgccactggaagggcagagtagccagggtgtggccctgccatcttcccagcagggccactcccggcactccatgcttagtcactgcctgcagaggtctgtgctgaggccttatcattcattcttagctcttaattgttcattttgagctgaaatgctgcattttaattttaaccaaaacatgtctcctatcctggtttttgtagccttcctccacatcctttctaaacaagattttaaagacatgtaggtgtttgttcatctgtaactctaaaagatcctttttaaattcagtcctaagaaagaggagtgcttgtcccctaagagtgtttaatggcaaggcagccctgtctgaaggacacttcctgcctaagggagagtggtatttgcagactagaattctagtgctgctgaagatgaatcaatgggaaatactactcctgtaattcctacctccctgcaaccaactacaaccaagctctctgcatctactcccaagtatggggttcaagagagtaatgggtttcatatttcttatcaccacagtaagttcctactaggcaaaatgagagggcagtgtttcctttttggtacttattactgctaagtatttcccagcacatgaaaccttattttttcccaaagccagaaccagatgagtaaaggagtaagaaccttgcctgaacatccttccttcccacccatcgctgtgtgttagttcccaacatcgaatgtgtacaacttaagttggtcctttacactcaggctttcactatttcctttataatgaggatgattattttcaaggccctcagcatatttgtatagttgcttgcctgatataaatgcaatattaatgcctttaaagtatgaatctatgccaaagatcacttgttgttttactaaagaaagattacttagaggaaataagaaaaatcatgtttgctctcccggttcttccagtggtttgagacactggtttacactttatgccggatgtgcttttctccaatatcagtgctcgagacacagtgaagc

SEQ ID NO: 220 - DNA, 1536 bp, Artificial
  cDNA Sequence
gtggtgtcgtccttgcagagttctgtggtggaagctttcaacaaggtgctgagcagtgtcaatccagtccctgtttacattccaaacctgagtcctcccaccaatgcagggatcacgttaccaacgcgtgggtacaagtgcttggagtgtggggactcctttgcagttgaaaagagtctgacccagcactatgacagacagagcatgcgcatcgaagtaacatgcaaccatggtacaaagaacctcattttttacaacaaatgcagcctcctttcccatgcccgtgggcataaggagaaaggggtggtaatacaatgctcccacttcattttaaagccagtcccagcaggtcaaatgatagtttctccatcaagcaatatttccacttcaacttccactcttcagagccctgtgggagctggcacacacactgtcacaaaaattcagtctggcataactgggacagtcatatcggctcctttaagcattcccatcaccccagccatgcccctagatgaagacccctccaaagtgtgtagacatagtctaaaatgtttggagtgtaatgaacttcagtatgagacatcaatggctacacatttccagcaggctgcagatacacgtggacaaaagacttgcactatctgccagatgctgcttcctaaccagtgcagttacgcatcacaccagagaatccatcagcacaaatctctctacacctgccctgagtgcggggccatctgcaggtcggtgcacttccagacccatgtcaccaagaactgtctgcactacatgaggagagttggttttcgatgtgtgcattgcaatgttgtatactctgatgtggctgccctgcagtctcacattcaaggttctcactgtgaagtcttctacaagtgtcctatttgtccaatggcatgtaagtccgccccaagcacacattcccacacctacacacagcatcctggcatcaagataggagaaccagaaataatatataagtgttccatgtgcgacactgtgttcaccctgcaaaccttgctgtatcgccactttgaccaacacattgaaaaccagaagttgtctgttttcaagtgtccagactgttatcttttatatgcacagaagcaacttatgatggaccatatcaagtctatgcatggaacattgaaaagtattgaagggcctccaaacttgggtataaacttgcctttgagcattaagcctgcaactcaaaattcagcaaatcagaacaaagaggacaccaaatccatgaatgggaaagagaaattggaaaagaaatctccatctcctgtgaaaaaatcagtggaaaccaagaaagtggccagtcctgggtggacgtgttgggagtgtgaccgcctgttcattcagagagatgtgtacatatcccacgtgaggaaggagcaagggaagcaaatgaagaaacatccctgccgccagtgtgacagctcatcccacagcctgtgccagcacaaccggatcaagcacaaaggcatcaggaaagtgtatgcctgc

SEQ ID NO: 221 - DNA, 375 bp, Artificial
  cDNA Sequence
atgactcttaatgagcatgctgccttcaagcatctgtttaacaaagcacatcttgcaccacccttaatccattcaaccctgagtggacatagcacatgtttcagagagcacagggttgggggtaaggtcacagatcaacaggatcccaaggcagaagaatttttcttagtacagaacaaaatgaaaagtctcccatgtctacctctttctacacagacatggcaaccatccgatttctcaatcttttccccacctttcccccctttctattccacaaaaccgccattgtcatcatggcccgttctcaatgagctgttgagtacacctcccagacggggtggtggccgggcagaggggctcctcacttcccagtag

SEQ ID NO: 222 - DNA, 2543 bp, Artificial
  cDNA Sequence
aacttgctctaacttcctcggccgagccgggccgcgccgccgctgccgccgccgcgcgcggattctgcttctcagaagatgcactattatagatactctaacgccaaggtcagctgctggtacaagtacctccttttcagctacaacatcatcttctggttggctggagttgtcttccttggagtcgggctgtgggcatggagcgaaaagggtgtgctgtccgacctcaccaaagtgacccggatgcatggaatcgaccctgtggtgctggtcctgatggtgggcgtggtgatgttcaccctggggttcgccggctgcgtgggggctctgcgggagaatatctgcttgctcaactttttctgtggcaccatcgtgctcatcttcttcctggagctggctgtggccgtgctggccttcctgttccaggactgggtgagggaccggttccgggagttcttcgagagcaacatcaagtcctaccgggacgatatcgatctgcaaaacctcatcgactcccttcagaaagctaaccagtgctgtggcgcatatggccctgaagactgggacctcaacgtctacttcaattgcagcggtgccagctacagccgagagaagtgcggggtccccttctcctgctgcgtgccagatcctgcgcaaaaagttgtgaacacacagtgtggatatgatgtcaggattcagctgaagagcaagtgggatgagtccatcttcacgaaaggctgcatccaggcgctggaaagctggctcccgcggaacatttacattgtggctggcgtcttcatcgccatctcgctgttgcagatatttggcatcttcctggcaaggacgctgatctcagacatcgaggcagtgaaggccggccatcacttctgaggagcagagttgagggagccgagctgagccacgctgggaggccagagcctttctctgccatcagccctacgtccagagggagaggagccgacacccccagagccagtgccccatcttaagcatcagcgtgacgtgacctctctgtttctgcttgctggtgctgaagaccaagggtcccccttgttacctgcccaaacttgtgactgcatccctctggagtctacccagagacagagaatgtgtctttatgtgggagtggtgactctgaaagacagagagggctcctgtggctgccaggagggcttgactcagaccccctgcagctcaagcatgtctgcaggacaccctggtcccctctccactggcatccagacatctgctttgggtcatccacatctgtgggtgggccgtgggtagagggacccacaggcgtggacagggcatctctctccatcaagcaaagcagcatgggggcctgcccgtaacgggaggcggacgtggccccgctgggcctctgagtgccagcgcagtctgctgggacatgcacatatcaggggttgtttgcaggatcctcagccatgttcaagtgaagtaagcctgagccagtgcgtggactggtgccacgggagtgccttgtccactgtccccctgtgtccaccagctattctcctggcgccggaactgcctctggtcttgatagcattaagccctgatggcgccggtggcgcggtgggcatggttcttcactgagagccggctctccttttcttaaagtgtgtaaatagtttatttataggggtaagaatgttctcacaccatttcacttcctcttcctctcctccagcattctcctctgagcagccttagatagtgtccatggctggagccgaccctttgagtccccttgagtgtcttaagaaccagcccacaacagcctctctttctcctccacatactgcagcctccctccatgcatcccacatacaagcactcccccactccccagcgtggcctcactgtcttctggtcttggtgctactgaaattgtcacccagaatttgaatcctgaccctccccactgcaagcccagggagccccagcccaagatggccagcctgaaactgttggccagggctcctcttgtggccatgtacccagggctggctggcctgccatttgcctctccccggagacagccgttcttctgcaaccacaccccgtgcctagccacaaccccaggctgcagctgctcagaagctccaggcattttgtttctggtgaccgcccctaatgggatatcggtgatcactggtccacccttcctgtcagggcttttctggggctgctcttggaaatgaagtcttaagtactgaataactcccctggggatagctggggcatttgtctagctgggctactttctaacactttgccatagctcagaccacttctcatcgttcagggatggactgcaaccttaatttacttgccggagtgtacattctagtgtggtgtatactggtggctgttgatgatgatttttttttttttacacaattctctgtagactaggagaagaatgcttgtgtttttcggaagtgtgatgcttctctttgactgccaaactcttttatggaatatatctttatatt

SEQ ID NO: 223 - DNA, 2486 bp, Artificial
  cDNA Sequence
ctctaacttcctcggccgagccgggccgcgccgccgctgccgccgccgcgcgcggattctgcttctcagaagatgcactattatagatactctaacgccaaggtcagctgctggtacaagtacctccttttcagctacaacatcatcttctggggtgtgctgtccgacctcaccaaagtgacccggatgcatggaatcgaccctgtggtgctggtcctgatggtgggcgtggtgatgttcaccctggggttcgccggctgcgtgggggctctgcgggagaatatctgcttgctcaactttttctgtggcaccatcgtgctcatcttcttcctggagctggctgtggccgtgctggccttcctgttccaggactgggtgagggaccggttccgggagttcttcgagagcaacatcaagtcctaccgggacgatatcgatctgcaaaacctcatcgactcccttcagaaagctaaccagtgctgtggcgcatatggccctgaagactgggacctcaacgtctacttcaattgcagcggtgccagctacagccgagagaagtgcggggtccccttctcctgctgcgtgccagatcctgcgcaaaaagttgtgaacacacagtgtggatatgatgtcaggattcagctgaagagcaagtgggatgagtccatcttcacgaaaggctgcatccaggcgctggaaagctggctcccgcggaacatttacattgtggctggcgtcttcatcgccatctcgctgttgcagatatttggcatcttcctggcaaggacgctgatctcagacatcgaggcagtgaaggccggccatcacttctgaggagcagagttgagggagccgagctgagccacgctgggaggccagagcctttctctgccatcagccctacgtccagagggagaggagccgacacccccagagccagtgccccatcttaagcatcagcgtgacgtgacctctctgtttctgcttgctggtgctgaagaccaagggtcccccttgttacctgcccaaacttgtgactgcatccctctggagtctacccagagacagagaatgtgtctttatgtgggagtggtgactctgaaagacagagagggctcctgtggctgccaggagggcttgactcagaccccctgcagctcaagcatgtctgcaggacaccctggtcccctctccactggcatccagacatctgctttgggtcatccacatctgtgggtgggccgtgggtagagggacccacaggcgtggacagggcatctctctccatcaagcaaagcagcatgggggcctgcccgtaacgggaggcggacgtggccccgctgggcctctgagtgccagcgcagtctgctgggacatgcacatatcaggggttgtttgcaggatcctcagccatgttcaagtgaagtaagcctgagccagtgcgtggactggtgccacgggagtgccttgtccactgtccccctgtgtccaccagctattctcctggcgccggaactgcctctggtcttgatagcattaagccctgatggcgccggtggcgcggtgggcatggttcttcactgagagccggctctccttttcttaaagtgtgtaaatagtttatttataggggtaagaatgttctcacaccatttcacttcctcttcctctcctccagcattctcctctgagcagccttagatagtgtccatggctggagccgaccctttgagtccccttgagtgtcttaagaaccagcccacaacagcctctctttctcctccacatactgcagcctccctccatgcatcccacatacaagcactcccccactccccagcgtggcctcactgtcttctggtcttggtgctactgaaattgtcacccagaatttgaatcctgaccctccccactgcaagcccagggagccccagcccaagatggccagcctgaaactgttggccagggctcctcttgtggccatgtacccagggctggctggcctgccatttgcctctccccggagacagccgttcttctgcaaccacaccccgtgcctagccacaaccccaggctgcagctgctcagaagctccaggcattttgtttctggtgaccgcccctaatgggatatcggtgatcactggtccacccttcctgtcagggcttttctggggctgctcttggaaatgaagtcttaagtactgaataactcccctggggatagctggggcatttgtctagctgggctactttctaacactttgccatagctcagaccacttctcatcgttcagggatggactgcaaccttaatttacttgccggagtgtacattctagtgtggtgtatactggtggctgttgatgatgatttttttttttttacacaattctctgtagactaggagaagaatgcttgtgtttttcggaagtgtgatgcttctctttgactgccaaactcttttatggaatatatctttatatt

SEQ ID NO: 224 - DNA, 555 bp, Artificial
  cDNA Sequence
aacttgctctaacttcctcggccgagccgggccgcgccgccgctgccgccgccgcgcgcggattctgcttctcagaagatgcactattatagatactctaacgccaaggtcagctgctggtacaagtacctccttttcagctacaacatcatcttctggttggctggagttgtcttccttggagtcgggctgtgggcatggagcgaaaagggtgtgctgtccgacctcaccaaagtgacccggatgcatggaatcgaccctccttggggtctttcctgtaccccctcctcaaccctggtccaccccctctcaggatcttgtcaacgttatttttcctgtcccgtcttcctatcgctggccttcctttcccatcctaaaaacttgccgaggccctatggctccctccctttctttcccaggcagcttcttatctgggctgtctgtaccccttcctttgcaccacccaccatgccccacgtagctgaaagctgcttatcccaattgtcaactctggccttcttcagcctctgtagcaccagacactgcacctcctga

SEQ ID NO: 225 - DNA, 72 bp, Artificial
  cDNA Sequence
atggggtttctccatgttggtcaggctggtctcgaactcctgacctcaggtgatccacccacctcggcctcc

SEQ ID NO: 226 - DNA, 3363 bp, Artificial
  cDNA Sequence
ctcggcttctccagcttcggtaggagaggatccggcgccgaatcactgactggcacaggtgttgggaaaatgatccacagtctatttctcataaactgttccggtgacatatttctagagaagcactggaagagcgttgtgagccagtctgtctgtgattatttctttgaagctcaagagaaagctgctgatgttgaaaatgtaccacctgtcatttcaacacctcaccactacctcatcagtatctaccgggataagctcttctttgtatctgtcatacagaccgaagtgccacctctctttgtaattgagttcctacatcgagttgctgacacttttcaggactactttggtgagtgttcagaggctgcaattaaggataatgtggtcatagtatatgaactcttagaagaaatgttagacaatggatttccactggctaccgaatctaacattttgaaagaattgattaaaccaccaacaattctacgctctgttgtcaactctattacaggcagtagtaatgttggggacacactccccaccgggcagctgtccaacataccatggcgtcgggcaggggtaaagtacacaaacaatgaagcctattttgatgttgttgaagaaatagacgcaattatagataaatcaggatctacagtctttgcagaaattcagggggtcattgatgcttgcattaaactatctggaatgcctgatctctccctttctttcatgaaccctaggcttctggatgatgtcagctttcacccctgcatccggttcaagcgttgggaatctgaaagagttttgtcatttattcctccagatggaaatttccgactcatatcataccgtgtcagctcacaaaatctagtggcaataccagtgtatgtgaaacatagtatcagctttaaggagaacagttcttgcggcagatttgatataacaattggaccaaagcagaatatggggaaaactattgaaggaattacagtgacagttcacatgccaaaagttgtgctgaacatgaacctgacacccacacaaggcagctatacatttgatccagtcaccaaggtactaacatgggatgtgggaaaaattactccacaaaagctcccaagtcttaaaggactggtaaatttacagtctggagcccccaaaccagaagagaatccgagcctcaacatacagtttaagatccagcagcttgctatttcaggcttaaaagtaaaccgtttggacatgtatggggagaaatataagccatttaaaggagtcaaatacgtcacgaaagctggaaagttccaagtgaggacatgagaagaggccaaaattcctcaggaccagtttgttttccaagtgtcattacgatgtatcactattaggtaccaagtgagtgggaatacatattctagttaaagcatttgtgtctagctacacaccgctaacaaagttacttagttatcaatgtaggattcttaaggagctttaagctaaggaaaccttttagtgacttagcttattttgtatcttttcacttaggaagattttggaggtgatttttttccataggaggataccatctggcggctgcacattgtaacagtaaaggcagaaagctgtagtgataacctctctcctaaaagagttaactggtctcatccagcagaagctatcttaaatctgtgatgtgtcaggtgcagccaaatatcacaccttctgatcttagccatcccaaaccagtatctgtcccgagaggaaattccccccacccccagaagtttacagaaaactgcctcttcaagtgtttgccttattcagcttttcacttgtgccattaagcaagcactgtagcaaaagccacttccacatggccctggcagggagcactgctgctccatgctccattctcactgtacttggtattgtattttttataaataagatttttatgtaaagcttagaatttgatttacagggaccttgctgcagtaaataccatctcaattttgtgccactggttcagctgttagcacagtaaaaaaatcatttgtatcaaaggggcaaatgctttattaaggtagtaaaagggaacattacttctgcttttaggaagttactgcaagcacaagcatttgtgcttttaagcaaattaaagtagtaaaagaaaaacttaagtgaaacctttgccatcttcatgttttataatataaagcttacccaacaccagttaagccatggttaacctaaatgcctcatgccccagttcagcaaaaggaggaaaatgtgcctgcctcacagtcatcagtctttttaaatcttttttgttgttgttcttaagggtttgaatttgtctgcattccttgtctttaggggaaattcccttttcatattgtgtgcttcccaaagctatagtcatagatttcttccagaaactattgtcataattgtcactggagtgcttaaatatacgtactatactgacaaaatacatggaagtgagttataatgaggcagaaacaaaatcctcggtaacattgatgatactctaccgatcaccgtggttttggaaagtcagtcaacagttgtattattgcactcaatttcattgtgacattttatttaacttcttcatcttggtggtccttgcccagttattttgcctcattagacatcaagaaatggagaaagactgaaagttaatatcttaagtgcttgttcttcatgtttccttcttgttatttatgctattctctttgtggctccattcttctttcaatcttctcagcttataaccgtctttcccttatgctaaggatagcccttacactcatcccatctatgctgtcaagggctgctggttggtgctggtacaaggagcccactcagcagttttcttacctttgcctgccctgcctttcatggaataagaaaggcaacgttttgcagcttccaaatttctgaagaaactaatctcagattggcagttaaagtcaaaatgttgccaaatatttattccttttgcctaagtttggctacccggttcaattgctttttatttttaatgtcttgactcttcagagttcgtacctcaaaagaacaatgagaacatttgctttgctttctgctgaatccctaatctcaacaatctatacctggactgtccagttctcctcctgtgctatcttctcttctatccaagtagaatgtacgccaggagctccttccctctagcaatttctactaaaatgtccaagtagaatgtttccttttacaatcaaattactgtatttattaatttgctagaatccagtaaatcattttggtagctctggctgtgctatcaataaaaagatg

SEQ ID NO: 227 - DNA, 465 bp, Artificial
  cDNA Sequence
atggcagatgatttggacttcgagacaggagatgcaggggcctcagccaccttcccaatgcagtgctcagcattacgtaagaatggctttgtggtgctcaaaggctggccatgtaagatcgtggagatgtctgcttcgaagactggcaagcacggccacgccaaggtccatctggttggtattgacatctttactgggaagaaatatgaagatatctgcccgtcaactcataatatggatgtccccaacatcaaaaggaatgacttccagctgattggcatccaggatgggtacctatcactgctccaggacagcggggaggtaccagaggaccttcgtctccctgagggagaccttggcaaggagattgagcagaagtacgactgtggagaagagatcctgatcacggtgctgtctgccatgacagaggaggcagctgttgcaatcaaggccatggcaaaataa

SEQ ID NO: 228 - DNA, 4929 bp, Artificial
  cDNA Sequence
cgcagtcggggggaggcggcggcagcggcagcggctgcgggcagcgcgcggggcgcagggcgcggggcgatcaccgtcggggctcgggaggcgggcagtgggcacaggctccccggtgcccgcccctccgctgcggaggggggccgcgagcgggcggccggggaggggccggcaccgccgccacaaaatgagcctgctgtcggccatcgacacgagcgccgcctcggtgtaccagcccgcccagctgctcaactgggtctacctgtcgctgcaggacacgcaccaggctagcgccttcgatgccttccggcccgagccgaccgccggcgccgcacccccggagctggccttcggcaagggccgccccgagcagctgggctcgcccctgcactccagctatctcaacagcttcttccagctgcagcgcggagaggcgctgagcaacagtgtgtacaagggcgcctcaccctatggctccctcaacaacatcgccgatggcctcagctccctcaccgagcacttctcagacctgaccctcacctccgaggctcgcaagcccagcaagcggcccccacccaactacctgtgccacctgtgcttcaacaaaggacactacatcaaggactgcccccaggcacgccccaaaggcgagggcctgactccataccagggcaaaaagcgctgcttcggcgagtacaagtgtcccaagtgcaagagaaaatggatgagcgggaactcctgggccaacatggggcaggagtgcatcaagtgccacatcaacgtgtatccacacaagcagagacccctggagaagcccgacggcctggacgtgtccgaccagagcaaggagcacccgcagcacctctgcgagaagtgcaaggtcctgggctactactgccgtcgcgtgcagtgacgggctgcccgcccgcacccagagccaccccccgccagcccgaggagacgctgcttccctgtgctactccgaggggctgcgtgtcgccctgtgcatggggtgccctcgcaggcctgcggggctgggccgggggctcttagcgtccttgtcttgtgtgtgttgacaaacagtgttactgacattgctgccccccacaggccagggaaagcagggagtctggggctttttgcaggcgggcctggggtctcagtggaggggacaaaggcaagcaaaagcccatgtccaggagccctgggtgtccccacaggctcgcctctgagagcctctttggggtgagcagccttgtattggccacaggtgcactaaattgactgtgaatcccaaacctccccagaccagccaggccgcctgcccccacccagaaccttccggtttgccctgtatggaaagccactctcagaaatccctctttcctgagtcagcaatcgtggcaaggggacatgtgttccaacagcggctggggagtggacctctctgtcccttgcccaccttaagccccaaatccagaccccctctgacatcactggcattgcacctgggtgtgcccccctccccacgctatggacccagataggaggggttaggcatgggggaggcacagaatgctggagagatgcgtcctggtgaacgtggggcagcccctcccacgacccccaccagactgccttaggttttgtcagccccactccctttccttcccctctgcctcccacccactctgggggtccacatcaagatagctgggcccagtgtggaagcccagcgtgtctgttccagcagaaaggacacaagcctggtgttctggagacctcggctcaagtctttgccctgctgccgacgcattgtgtcaccttgggcaaggacttcgcatctccaggcctcagtttccccattagttaaatgacagcataacactagagagcagagggcccatttcagctctgttgttctgggattcaggctggccggtgctgtgtcctggagctttatttggggagtttcacccagaatggtgggagaaacctcccaggtgccaggtaccccgcatcgtgacccttcacttggtgtcttaggaagtcaagctgagggatgctgagtcctcccctgctggcccctgcagccccagccctgcttttcatcccccacccctgcaaacatggaggagccccctccttctcacctcggtctcctagcccctgacatggagaaccctgagacaagccacagaacccctcttttctaaaatggagacaataatttcctacctcccaagggagcagagaggcctcgtggcacgtccgtggccagggagcccactgtcctggctggcggcgggatcgtgcgctcctctgtctcccggatgagaagccccgtttccatggtcttgacccttcctttctcccggctgtcagaactgggtctcttgattttgcccctacattatgcctctgtgggaaaaaaaaaaaatcagaccaagaaatgagcctgaaattcagtgtttaccatggctcaaggatgcccatctggtgtccagttgccttttgtattcaaatgaaaatgctttgtacaactgaggagttacagtgaagtgttaaccaggggtccagggagcgagttgaaaagatggagtgagtgtatttgcagccagggagctgcagggtggatttgaggggccataccctctgagcacttaaaaaaggtatttgctccaggccaggcagcaggctgtggacacccttgccaccactggggactgccactgaggactccccgagcacgttgttccccgtcttctccaaggtgttgaggtgagctggggttggccccggcccaggcttctgtcccaaggagaagctgccactgacagtcatcctaccgcactgctaaagagaatgttcgcagtggtgggcggcgtgcctgtgccaacccttccagggacccggccatgggggaccttggcccaaggatgcctggggcctgccagctgtgctgcaaaggtggggggcccacaccctaaaactaacccaggccccagaccactggaggccagggcttccctgcacgggctaaggggagttgggatatcaccccaaagtgaccttgccagtgagctgttcagcaggtagccactgccctgccatctgtgcagagccagccaccttgggggctggggttcccgctttgaggcccaccttccatactccccttgactcggctctggctgaactggggaactctcttgtggtcagcaaagcccctgccatgcaggccaggtgccattgagaattaagtgctcagagggccaggagcccaggggatgggaaagtgtgtggttttagtacgttcaaaagggacaatcgcttgcagttggtagatctagcgatctagttgggagataatggtgtttaccccatatgaagtattcaatagttctacttgtgaatttgtatttattttgagttatacttgacacagaattccttttttaaaaaaatatgtgtgtattttggaaaaaaaattcatagatgttaaaatttctgcatggttaccagtttttctcacaacactgaatttggtagcttttcccgaaaaaatcttcacagtaattttttgtctgtatatatttgagggcctttttttaaaaaaaaaaaaagaaaagaaaaatataattgtttgatttttgagattaaaacaaacaaaaagagaggcattttcaaaatttcagaactttcaggagggcaagagaatatcaaacaaagatttctggaagtattttgccaaccttctggttgagctgcaagaaaatatttatggtgagaacttttctgtttcccgttattgggtttttggttggtttttgtttgttttttactatgctttggtctgtaaaaatatgcaactgaactacattcagaaggaaatattgtctacatagaatattatatgaagttggtacataattctgatgaggaaaaaaaatctttgcaattctttaagccatattgttgtttttctgtgttgttttccctggatgaaaatatcagtattaagtagacagcatattattcaagtgtttagacttattaatatgttcttgtcctgtatttatacatatgtgtattttggaaagtattgccttttttaagggaagctataattcgatacatagtgaaaaagggaatggtgacccctttgtgcctcttccactgaggataacaaacagcattgtaatccattctcttgcaccttcttcttcttatcttgttattacggttttattaattttgtagagggacagggagtgggcaaggggaagaagcagcttatttgactaaccagcccctctgtggtccaccagcgtcttggcttggtgggagggctctcaatcagcagggccccaggagggaagaagaagtggggcaaagcctggcctcgccgctcgggagctttgccatctgagccacgcctcctccaggccatgctccttgaacttggaaatgtcaaccggagcccttacaccagccctccagcatctaatagacttgaatctactctaaacgaatatttaatccaacctcactacattgtagctcagtccaacgactaaccctgaaatgggggtgttccagccttcagcgagatggccaagcggtcccctgggggctgtggcagcgggcttatccttctctgttgccaaccttgccgtccgacctcctccgcccccatgcggtgaccccgtccgtgtctgtgtctgtccatacgtgtgagtccagctaaaaagacaaaacagaacccgtgggcccagctcggaaggtgcgtggagaaggctccgacgtctccgaagtgcagcccttgggatggcattccgttgtgtgccttattcctggagaatctgtatacggctcgcctatagaaatatagcctcttcatgctgtattaaaaggacttttaaaagc

SEQ ID NO: 229 - DNA, 747 bp, Artificial; identical to SEQ ID NO: 201
  cDNA Sequence

SEQ ID NO: 230 - DNA, 207 bp, Artificial; identical to SEQ ID NO: 216
  cDNA Sequence

SEQ ID NO: 231 - DNA, 869 bp, Artificial; identical to SEQ ID NO: 202
  cDNA Sequence

SEQ ID NO: 232 - DNA, 612 bp, Artificial
  cDNA Sequence
ggcactcctggatcccacggcctgccaggcagggacgggagagatggtctcaaaggagaccctggccctccaggccccatgggtccacctggagaaatgccatgtcctcctggaaatgatgggctgcctggagcccctggtatccctggagagtgtggagagaagggggagcctggcgagaggggccctccagacaaagtggtcagtggcctgacccggactcctctgctctcagccctcagtctgcagggctccataatgacagtaggagagaaggtcttctccagcaatgggcagtccatcacttttgatgccattcaggaggcatgtgccagagcaggcggccgcattgctgtcccaaggaatccagaggaaaatgaggccattgcaagcttcgtgaagaagtacaacacatatgcctatgtaggcctgactgagggtcccagccctggagacttccgctactcagacgggacccctgtaaactacaccaactggtaccgaggggagcccgcaggtcggggaaaagagcagtgtgtggagatgtacacagatgggcagtggaatgacaggaactgcctgtactcccgactgaccatctgtgagttctga

SEQ ID NO: 233 - DNA, 1050 bp, Artificial
  cDNA Sequence
ggtgttctgggtgggggtgatggggtgtgggatgatgccagccggcatggaggaaatggggtggcacggctatgggggtggcaggattcccctcctgtccctgcactgaagagaggagggctttgtagaacctctggggcaagtgtgggaggcctgctgcagacatggggcccagcggtctctgctgccacagggcttggcccagcgcctgcctctcaggtagtctggaggaagccacagtcattgaaccagtatccttgtcccactccctccctttttctagcctctcttgggtcggggaagggggagctcagtgtcccctcccttgcacccctctgcctccaccagcctggaggttgggcccaggcctgtgggggtggggaggtggccacccacttggctgtcccagccctgtcccagacagccctgtattcctgcagcctgggcttgttcccaaacagggtgaggctcctgggatgggcctggctcacctggggctctcccctgcccccacagtggtcttgctgcggagcccgaggccccaatgactggaacctcaatatctacttcaactgcactgacttgaaccccagccgggagcgctgcggggtgcccttctcctgctgcgtcagggaccctgcggaggatgtcctcaacacccagtgtggctacgacgtccggctcaaactggagctggagcagcagggcttcatccacaccaaaggctgcgtgggccagtttgagaagtggctgcaggacaacctgattgtggtggcgggagtcttcatgggcatcgccctcctccagatctttggcatctgcctggcccagaacctcgtgagtgacatcaaggcagtgaaagccaactggagcaaatggaatgatgactttgaaaaccactggcttacgcccaccatttccgaggtcctgtccacggcggggcctcagcagaactctctgactggggcccctggcccggccccacccagccgacatgttttctttggcctgggtggtttataccctgagccaacctttaaaaattggtag

SEQ ID NO: 234 - DNA, 2373 bp, Artificial
  cDNA Sequence
cgcggggcgctgggcctggctcccggctccggtttccgggccggcgggtggccgctcaccatgcccggcaagcaccagcatttccaggaacctgaggtcggctgctgcgggaaatacttcctgtttggcttcaacattgtcttctgggtgctgggagccctgttcctggctatcggcctctgggcctggggtgagaagggcgttctctcgaacatctcagcgctgacagatctgggaggccttgaccccgtgtggctgtttgtggtagttggaggcgtcatgtcggtgctgggctttgctggctgcattggggccctccgggagaacaccttcctgctcaagtttttctccgtgttcctcggtctcatcttcttcctggagctggcaacagggatcctggcctttgtcttcaaggactggattcgagaccagctcaacctcttcatcaacaacaacgtcaaggcctaccgggacgacattgacctccagaacctcattgactttgctcaggaatactggtcttgctgcggagcccgaggccccaatgactggaacctcaatatctacttcaactgcactgacttgaaccccagccgggagcgctgcggggtgcccttctcctgctgcgtcagggaccctgcggaggatgtcctcaacacccagtgtggctacgacgtccggctcaaactggagctggagcagcagggcttcatccacaccaaaggctgcgtgggccagtttgagaagtggctgcaggacaacctgattgtggtggcgggagtcttcatgggcatcgccctcctccagatctttggcatctgcctggcccagaacctcgagcaaatggaatgatgactttgaaaaccactggcttacgcccaccatttccgaggtcctgtccacggcggggcctcagcagaactctctgactggggcccctggcccggccccacccagccgacatgttttctttggcctgggtggtttataccctgagccaacctttaaaaattggtagatttcacataaaagtccagatccacagcttctcttgaagaatgaccacctggctacgccggctcttcggtggcaacactacctgggacactgcctccccagtcaccaagggccccagctggcccgttctactcacctaagtgccgcctgacccttgtacactaggagctggcctcccacctctgcagggttattccctgcacctcgaggccgctgcgggccaatctggagtgaaacacggggacctgaaggatggagaggctggaccccgctttgaagagggtgcagcctgggaagggcggccttgctggggactgcggtgggagtagagtgcccaggagagggtctgaggggtgggatgggggtcaggacaattttgcaaaagaagtagctggaagccatgggactggcgggagcctgtttgggggatctggatggttgactcctaggagtcaagttcagcatcttcaccgtggctgcagagctgcctgatgggcactagagggcatgccagccccacactccctgggtctggcttcctcccgcaacctcactctagtagagcctgtgcctgcctactagcgctctggggttcggagagtttgggaatttctcagagccaactggctcaggcttgggaaggctggctgctgccctcagctccgcctcatcagctatgtgaaggggtgtgtgtggagtgatcctgccgccccctccctgggctcgtccagagatctcaaactccgatgcccctggggccacgtatgttgtataaatggatgaaacaggcccttgagttgggagcctgcttcactttgactttcccactgttgctggagacaaagacatcgtgatgagagaaagttcgcacaatctagtcggtaacagccactttccttgagaccaagagagtgcggtggggatgggggggagagcacgggtccccgtctgacagtggccgctgccatattcaggtgtagctaattgctctggtgtgggaatgcaggcctaatgacagaaatctggagaagccagaaatacagatttgtatgtgagatgtcctgattttttaagttgttggcagaaattaattcagaaatcaaatctgcaggccaaacaaggtgcaggacccagctttggccccatgcccctgtaggtccctctgggacagtcaccgctggggtcctggctgctctgtcattgagggatgctgggcactgctgccgggtggccagggtatggggcatgtgcccagcaatgtggctccttggccccgctggccagtgtcctgggcccctgacaggcgctggctgtgagtggtttgtacatgctacaataaatgcagctggcagcatt

SEQ ID NO: 235 - DNA, 686 bp, Artificial
  cDNA Sequence
gaggccatgaagccgcagccgcccggctaggccccgggcggctctagcccagggcggcccgcggggcgctgggcctggctcccggctccggtttccgggccggcgggtggccgctcaccatgcccggcaagcaccagcatttccaggaacctgaggtcggctgctgcgggaaatacttcctgtttggcttcaacattgtcttctggttctccgtgttcctcggtctcatcttcttcctggagctggcaacagggatcctggcctttgtcttcaaggactggattcgagaccagctcaacctcttcatcaacaacaacgtcaaggcctaccgggacgacattgacctccagaacctcattgactttgctcaggaatacgaggatgtcctcaacacccagtgtggctacgacgtccggctcaaactggagctggagcagcagggcttcatccacaccaaaggctgcgtgggccagtttgagaagtggctgcaggacaacctgattgtggtggcgggagtcttcatgggcatcgccctcctccaggtacccttgtggccccacgtgcccctccccttgccggggccgccctcactctcccctcacctgtcctctgtcttacagatctttggcatctgcctggcccagaacctcgtgagtgacatcaaggcagtgaaagccaactggtga

SEQ ID NO: 236 - DNA, 363 bp, Artificial
  cDNA Sequence
ggctccggtttccgggccggcgggtggccgctcaccatgcccggcaagcaccagcatttccaggaacctgaggtcggctgctgcgggaaatacttcctgtttggcttcaacattgtcttctgggtgctgggagccctgttcctggctatcggcctctgggcctggggtgagaagggcgttctctcgaacatctcagcgctgacagatctgggaggccttgaccccgtgtggctgtgtggtagttggaggcgtcatgtcggtgctgggctttgctggtgcattggggccctccgggagaacaccttcctgctcaagtttttctccgtgttcctcggtctcatcttcttcctggagctggcaaca

SEQ ID NO: 237 - DNA, 1807 bp, Artificial
  cDNA Sequence
ggactttgtgttccgctgaccctcctcggggcgcttcctcccgtgccgcccttcccctcccccgccgcgtccttgcgaggcgcctcccattcggtgggaccgacccggggggatggagggggcacgcttctacaaccctcctgggaccccgaagagacgcccgcgtgcgacctgagacgccgccctcgccgagggcccatgggcgcgtccccacaggcgggcagtggacgtgagggcggcgagcggcggggccgcggcgtccaggagggccgcgctcgggctcggccccgcgcaggccgcgcgcgcgcgctcccgccgccgcccgggccgcgcccgccccgcctctaggcgccggccccggagcccggtccgcgagcagcggcggctgccggagggacgatgagctgcgcggggcgggcgggccctgcccggctcgccgcgctcgccctgctgacctgcagcctgtggccggcacgggcagacaacgcgagccaggagtactacacggcgctcatcaacgtgacggtgcaggagcccggccgcggcgccccgctcacgtttcgcatcgaccgcgggcgctacgggcttgactcccccaaggccgaggtccgcggccaggtgctggcgccgctgcccctccacggagttgctgatcatctgggctgtgatccacaaacccggttctttgtccctcctaatatcaaacagtggattgccttgctgcagaggggaaactgcacgtttaaagagaaaatatcacgggccgctttccacaatgcagttgctgtagtcatctacaataataaatccaaagaggagccagttaccatgactcatccaggcactggagatattattgctgtcatgataacagaattgaggggtaaggatattttgagttatctggagaaaaacatctctgtacaaatgacaatagctgttggaactcgaatgccaccgaagaacttcagccgtggctctctagtcttcgtgtcaatatcctttattgttttgatgattatttcttcagcatggctcatattctacttcattcagaagatcaggtacacaaatgcacgcgacaggaaccagcgtcgtctcggagatgcagccaagaaagccatcagtaaattgacaaccaggacagtaaagaagggtgacaaggaaactgacccagactttgatcattgtgcagtctgcatagagagctataagcagaatgatgtcgtccgaattctcccctgcaagcatgttttccacaaatcctgcgtggatccctggcttagtgaacattgtacctgtcctatgtgcaaacttaatatattgaaggccctgggaattgtgccgaatttgccatgtactgataacgtagcattcgatatggaaaggctcaccagaacccaagctgttaaccgaagatcagccctcggcgacctcgccggcgacaactcccttggccttgagccacttcgaacttcggggatctcacctcttcctcaggatggggagctcactccgagaacaggagaaatcaacattgcagtaacaaaagaatggtttattattgccagttttggcctcctcagtgccctcacactctgctacatgatcatcagagccacagctagcttgaatgctaatgaggtagaatggttttgaagaagaaaaaacctgctttctgactgattttgccttgaaggaaaaaagaacctatttttgtgcatcatttaccaatcatgccacacaagcatttatttttagtacattttattttttcataaaattgctaatgccaaagctttgtatt

SEQ ID NO: 238 - DNA, 1847 bp, Artificial
  cDNA Sequence
ctcctgccctccactgactccagagagggagatccccagtacttgactccatcacgcagatgggagcaggcaccagctatggagagggatacagctgcgtctccacatgacccatcctgcatgacaccaaagccaccgccagacagtgcctcggattctatgcaaaacctgggaagcggagacctaccccagccccgggaggaagctagctcttcaggggaccgtctgaggactggagtttgatccatgaacctggcttcgaggccttgcttttctctcttcttcattcatattcattcccaacaccttagaaggtgttgcttaatttatttctagaaaagcagcccagagtcagtcattgaagccttccccaccccctggccaaaaaaaaaaaaaaaaaaaaactggacacattttggatctgttgggagcttggagtccagtggttggcatagttgtcacattgggagcagagaagaagcaaccaggggccctgatcaggggactgagccgtagagtcccaggatggcacccaatggcacagcctcttccttttgcctggactctaccgcatgcaagatcaccatcaccgtggtccttgcggtcctcatcctcatcaccgttgctggcaatgtggtcgtctgtctggccgtgggcttgaaccgccggctccgcaacctgaccaattgtttcatcgtgtccttggctatcactgacctgctcctcggcctcctggtgctgcccttctctgccatctaccagctgtcctgcaagtggagctttggcaaggtcttctgcaatatctacaccagcctggatgtgatgctctgcacagcctccattcttaacctcttcatgatcagcctcgaccggtactgcgctgtcatggacccactgcggtaccctgtgctggtcaccccagttcgggtcgccatctctctggtcttaatttgggtcatctccattaccctgtcctttctgtctatccacctggggtggaacagcaggaacgagaccagcaagggcaatcataccacctctaagtgcaaagtccaggtcaatgaagtgtacgggctggtggatgggctggtcaccttctacctcccgctactgatcatgtgcatcacctactaccgcatcttcaaggtcgcccgggatcaggccaagaggatcaatcacattagctcctggaaggcagccaccatcagggagcacaaagccacagtgacactggccgccgtcatgggggccttcatcatctgctggtttccctacttcaccgcgtttgtgtaccgtgggctgagaggggatgatgccatcaatgaggtgttagaagccatcgttctgtggctgggctatgccaactcagccctgaaccccatcctgtatgctgcgctgaacagagacttccgcaccgggtaccaacagctcttctgctgcaggctggccaaccgcaactcccacaaaacttctctgaggtccaacgcctctcagctgtccaggacccaaagccgagaacccaggcaacaggaagagaaacccctgaagctccaggtgtggagtgggacagaagtcacggccccccagggagccacagacaggtaatagccctagccattggtgcacaggatgggggcaatgggaggggatgctactgatgggaatgattaagggagctgctgtttaggtggtgctggtttatgttctaggaactcttcatgagcactttgtaaacaccctcttgcttaatcctcccaacggcccccaaaggtagaacttagctcccttttaaaaggagcacattaaaattctcagaggacttggcaagggccgcacagctggggcct

SEQ ID NO: 239 - DNA, 3104 bp, Artificial
  cDNA Sequence
ggacctgggggtgatctccagcatctcgctgtcctggttcctgaccctcttcctcagcgtcatgcccttcgagagcgccgtggtcatcgtcgactgctttttctatgagggcatcaaggtgatcctgcaggtggccctggccgtcctggacgccaacatggagcagctgctgggctgcagcgacgagggcgaggccatgaccatgctgggcagatacctggataatgtggtcaacaagcagagtgtctctcctcctatcccgcacctccgtgccttgctgagcagcagcgatgacccccctgcagaggtggacatctttgagctcctgaaagtgtcctatgagaaattcagcagcctgagggccgaagacattgagcagatgcggtttaaacagaggctgaaagtgatccagtccttggaggacacggccaagaggagtgtggtccgagctatacctgtggacattggtttctccattgaagagctggaggacctttacatggtgtttaaggccaagcacctggctagccagtactgggggtgcagccgcacaatggccggccgtcgggaccccagcctgccctacctggagcagtaccggattgatgccagccagttccgggaactctttgccagcctgacaccctgggcctgtggctcccacacacctctgctggcagggcgcatgttcaggctcctggacgaaaacaaggactcgctgatcaacttcaaggagttcgtgacagggatgagcgggatgtaccacggggacctgacagagaagctcaaggtgctctacaagctacaccttcccccagctctgagcccagaggaagccgagtcagccctggaggcggcccattatttcacagaggacagctcctcagaagaagcactaccacaggaagagcaagaaggaagtggaagtgaggagagaggagaggagaaggggaccagctctccggactatcggcactaccttcgaatgtgggccaaggagaaagaggctcagaaggagacgattaaggatcttcccaagatgaaccaggagcagttcattgagctgtgcaagacgctttacaacatgttcagtgaagaccccatggagcaggacctgtaccacgccatcgccaccgtggccagcctcctgctccgcatcggagaggtggggaagaagttctcagcccgcacaggcaggaagcccagggactgtgccactgaggaggacgagccaccagcacccgaactgcatcaggacgcagccagggagcttcagcccccagctgcaggagacccccaagccaaagcaggcggagacacacacctcggaaaagccccacaggagagccaggtggtggtggaggggggcagcggcgagggacagggctcaccctcccagctgctgtctgacgatgaaaccaaagacgacatgtccatgtcctcctactcggtggtcagcacgggctccctgcaatgtgaagaccttgcagacgacacggtgctggtgggcggggaggcctgcagccccacagcgcgcatcggcggcaccgtcgacaccgactggtgcatctcctttgagcagatcctggcctccatcctgacggagtccgtgctggtgaacttctttgagaagagagtggacattggactcaagatcaaggaccaaaagaaagtggagagacagttcagcaccgccagtgaccatgagcagcctggagtttccggctgatgcctgcagctgtgaggcctggcccaaggtgtcatcagtggggctggcctcatctcctcctgcctttcctcccttatcagtttctctttaaaggtgtgcccctcctgctctcccaggagcagtgagttgtgagtggaaagaaggctggtgcagacccagctgccttagacagattccctgggcctgcatctcctggcgccggctgcttctgggcccaggaagaggctgtggctcccaccttccttacacctggtgggagcccgcctcgcaccagctgcacctgcctagcattacaggctctcagatctgcccttgcttgcctcatacctctgtgctccacactgcggccaggccagctgagtccctccatccgtggatgctttcctgcagctatgtggtatgggggtcattcctgcctcttggcaccaggttggggggcatgtgcttgttgggcaccaaagtgatggaaccctcaggtgctctccgggagcctgaacctcctgactgaggaacatgggcagaacatgtttattgcacagagtgggcgctgcgcacaggcgtggctgtacacgtgctctcagctcatcatcctttccagtaactttaaaaaaacatccctcaggtcctgatatatttccttggattcatttcacttggctagaaattacactgtgctcaatgccttaataaatccctgaaagaaataaaaaccactgtgtgcaatgccttgctgtggcccccaaccactgcttaggcctcccaacttctccccaggccaagtatggggccctggctgtgttctggaagttcaagacacttagtcctccacagtgggtggaagagtgcaaggtctgccaggtcagatggagacgcagaacctgctggtgcaagctgggcaggtcctgaccaacctgcatcaggggatgccctgagctccacaggtcttcatgggcaggggttgtgggtcctggtgaaggaagtgcatcctcaggcctgggctgtagcaagctgtctgcccttgggttcaagaaccagactgtggagccaaaggtgaccgcagggggccccagggctggagccacaaggataccctcactttgcatgaggagctgaaactgaccagtgtccagtgttagcccccacatggggctgctcttgcttctactaaaagatacagcagttacccccttatccacaggggatacagtggatatctaaaaccagacccccagtggatgtctaaaaccacagataataacaaaccttatacatactgttttttcctatgcatacatacctgtgattaagtttatgaattaggcaccttaagagattgacaacaataactaataataaaatgtaacggttatactgt

SEQ ID NO: 240 - DNA, 4483 bp, Artificial
  cDNA Sequence
cgcgggcctcggcccggtgcgagcggctccgcgatgtggctgagcccggaggaggtgctggtggccaatgcgctgtgggtgacggagcgggccaaccccttcttcgtgctgcagcgacgccggggccacggcaggggcggcggccttacgggtcttctcgtgggcaccctggacgtggtgctggactccagtgcccgcgtggccccttaccgcatcctgcaccagacccaggactcccaggtctactggacagtggcgtgtggttcttcccgcaaagagatcacaaaacactgggaatggctggaaaataacttgctccagacactgtccatcttcgacagtgaggaagatatcaccaccttcgtcaagggcaagatacacggaatcatcgcagaagagaacaagaacctgcagccccagggagacgaggaccccgggaagttcaaggaggctgagctgaagatgcggaagcagtttgggatgcctgagggcgagaagctggtgaattactactcctgcagctactggaagggccgcgtgccccggcagggctggctgtacctgacggtcaaccacctgtgcttctactccttcctgctggggaaggaagtgagcctcgtggtgcagtgggtggacataacgcgtctggagaagaacgccaccctgctcttccccgagagcatccgtgtggacacccgcgaccaggagctcttcttctccatgttcctcaacatcggcgagaccttcaagctcatggagcagttggccaacctggccatgcggcagctgctggacagcgagggcttcctggaggacaaggccctgcctaggcccatccggccacacaggaacatctcagccctgaagcgagacctggacgcccgagccaagaatgagtgctaccgagccacgttccggctgcccagggatgagcggctagacggccacacaagctgcaccctgtggacgccgttcaacaagctgcacatccctggccagatgttcatctccaacaactacatctgcttcgccagcaaggaggaggacgcttgccacctcatcatacccctgagggaggtgaccattgtcgaaaaagctgacagctccagcgtgctgcccagccccctgtccatcagcaccaaaagcaaaatgacattcctgtttgccaacctgaaagaccgtgatttcttggtgcagaggatctctgacttcctccagaaaacaccatccaagcagccaggcagtatcgggagcaggaaagccagtgttgtggaccctagcacagagtcttccccagctcctcaggaggggtcggagcagcccgccagcccagcctctcccctcagcagccgccagagcttctgtgcgcaggaggcgccaaccgcatcccagggcctgctgaagctcttccagaaaaactcgcccatggaggaccttggagccaagggggccaaggagaagatgaaagaggagtcatggcacatccacttcttcgagtacgggcgtggcgtgtgcatgtaccgcacagccaagacgcgggcactggtcctgaagggtatccctgagagcctccggggagagctgtggctcctcttctccggggcctggaatgagatggtgactcaccccgggtactatgctgagctggtggagaagtccaccgggaagtacagcctggccacagaggagatcgagcgagacctgcaccgctccatgcccgagcaccctgccttccagaacgagctggggattgctgccctccggcgggtgctgactgcctatgccttccgaaaccccaccatcggctactgccaggcaatgaacatcgtgacctcggtgctcctgctctatggcagtgaggaggaggccttctggctcctggtggccctgtgcgagcgcatgctgcccgactactacaacaccagggtggtgggagccctggtggaccaaggcatcttcgaagagctcacgagagacttcctgccgcagctctcggagaagatgcaggacctgggggtgatctccagcatctcgctgtcctggttcctgaccctcttcctcagcgtcatgcccttcgagagcgccgtggtcatcgtcgactgctttttctatgagggcatcaaggtgatcctgcaggtggccctggccgtcctggacgccaacatggagcagctgctgggctgcagcgacgagggcgaggccatgaccatgctgggcagatacctggataatgtggtcaacaagcagagtgtctctcctcctatcccgcacctccgtgccttgctgagcagcagcgatgacccccctgcagaggtggacatctttgagctcctgaaagtgtcctatgagaaattcagcagcctgagggccgaagacattgagcagatgcggtttaaacagaggctgaaagtgatccagtccttggaggacacggccaagaggagtgtggtccgagctatacctgtggacattggtttctccattgaagagctggaggacctttacatggtgtttaaggccaagcacctggctagccagtactgggggtgcagccgcacaatggccggccgtcgggaccccagcctgccctacctggagcagtaccggattgatgccagccagttccgggaactctttgccagcctgacaccctgggcctgtggctcccacacacctctgctggcagggcgcatgttcaggctcctggacgaaaacaaggactcgctgatcaacttcaaggagttcgtgacagggatgagcgggatgtaccacggggacctgacagagaagctcaaggtgctctacaagctacaccttcccccagctctgagcccagaggaagccgagtcagccctggaggcggcccattatttcacagaggacagctcctcagaagcatctcctctggcctcagatctggatcttttcctgccctgggaggctcaagaagcactaccacaggaagagcaagaaggaagtggaagtgaggagagaggagaggagaaggggaccagctctccggactatcggcactaccttcgaatgtgggccaaggagaaagaggctcagaaggagacgattaaggatcttcccaagatgaaccaggagcagttcattgagctgtgcaagacgctttacaacatgttcagtgaagaccccatggagcaggacctgtaccacgccatcgccaccgtggccagcctcctgctccgcatcggagaggtggggaagaagttctcagcccgcacaggcaggaagcccagggactgtgccactgaggaggacgagccaccagcacccgaactgcatcaggacgcagccagggagcttcagcccccagctgcaggagacccccaagccaaagcaggcggagacacacacctcggaaaagccccacaggagagccaggtggtggtggaggggggcagcggcgagggacagggctcaccctcccagctgctgtctgacgatgaaaccaaagacgacatgtccatgtcctcctactcggtggtcagcacgggctccctgcaatgtgaagaccttgcagacgacacggtgctggtgggcggggaggcctgcagccccacagcgcgcatcggcggcaccgtcgacaccgactggtgcatctcctttgagcagatcctggcctccatcctgacggagtccgtgctggtgaacttctttgagaagagagtggacattggactcaagatcaaggaccaaaagaaagtggagagacagttcagcaccgccagtgaccatgagcagcctggagtttccggctgatgcctgcagctgtgaggcctggcccaaggtgtcatcagtggggctggcctcatctcctcctgcctttcctcccttatcagtttctctttaaaggtgtgcccctcctgctctcccaggagcagtgagttgtgagtggaaagaaggctggtgcagacccagctgccttagacagattccctgggcctgcatctcctggcgccggctgcttctgggcccaggaagaggctgtggctcccaccttccttacacctggtgggagcccgcctcgcaccagctgcacctgcctagcattacaggctctcagatctgcccttgcttgcctcatacctctgtgctccacactgcggccaggccagctgagtccctccatccgtggatgctttcctgcagctatgtggtatgggggtcattcctgcctcttggcaccaggttggggggcatgtgcttgttgggcaccaaagtgatggaaccctcaggtgctctccgggagcctgaacctcctgactgaggaacatgggcagaacatgtttattgcacagagtgggcgctgcgcacaggcgtggctgtacacgtgctctcagctcatcatcctttccagtaactttaaaaaaacatccctcaggtcctgatatatttccttggattcatttcacttggctagaaattacactgtgctcaatgccttaataaatccctg

SEQ ID NO: 241 - DNA, 934 bp, Artificial
  cDNA Sequence
cggcaggcattcgaggcggacagaaacggggcttggcgccccccgcgtgcacgtgtgctagcccaggcaggagggagcgcctcggcggaggagtcaaggaagagggggagggagaaacgcgccagaacctcggcccgggcgccctcgtcggccgcggaggagctgcagcctccaacaggaaggtgtggtccctgccatgctatctgctctgctcagcgactgaaggtgcccgcatcccagctctgccaggaagcaaaggttgtcacatcttcccaagccaggccagccaggagcgctgcatgcaaattctgccgtgggctaaggcacgctaaccagagccggcggcatggacttcgtcatgaagcaggcccttggaggggccacaaaggacatggggaagatgctggggggagaggaggagaaggaccccgacgcgcagaaaaaggaggaggagcggcaggaggcgctgcggcagcaggaggaggagcgtaaggccaagcacgcgcgcatggaggcggagcgggagaaggtccggcagcagatccgagataagtatgggctgaagaagaaggaggagaaggaagcagaggagaaagcagccctggagcagccctgcgaggggagcctgacccggcccaagaaggccatccctgcgggctgcggggacgaggaggaggaggaagaggagagcatcctggacacggtgctcaaatacctgcccgggccgctgcaggacatgttcaagaagtaaccaggcctcctgccccagcctactccacctgttactacttctttttggttctttcttttctttttattaggttaagtctcaattctgaaggggaaaacctcagttggcctctgcccctcttccctggccaggggcttctccccctcagctctccctcacacctcccttcatcccagggtatcc

SEQ ID NO: 242 - DNA, 2145 bp, Artificial
  cDNA Sequence
agaacagcgcagtttgccctccgctcacgcagagcctctccgtggcttccgcaccttgagcattaggccagttctcctcttctctctaatccatccgtcacctctcctgtcatccgtttccatgccgtgaggtccattcacagaacacatccatggctctcatgctcagtttggttctgagtctcctcaagctgggatcagggcagtggcaggtgtttgggccagacaagcctgtccaggccttggtgggggaggacgcagcattctcctgtttcctgtctcctaagaccaatgcagaggccatggaagtgcggttcttcaggggccagttctctagcgtggtccacctctacagggacgggaaggaccagccatttatgcagatgccacagtatcaaggcaggacaaaactggtgaaggattctattgcggaggggcgcatctctctgaggctggaaaacattactgtgttggatgctggcctctatgggtgcaggattagttcccagtcttactaccagaaggccatctgggagctacaggtgtcagcactgggctcagttcctctcatttccatcacgggatatgttgatagagacatccagctactctgtcagtcctcgggctggttcccccggcccacagcgaagtggaaaggtccacaaggacaggatttgtccacagactccaggacaaacagagacatgcatggcctgtttgatgtggagatctctctgaccgtccaagagaacgccgggagcatatcctgttccatgcggcatgctcatctgagccgagaggtggaatccagggtacagataggagatacctttttcgagcctatatcgtggcacctggctaccaaagtactgggaatactctgctgtggcctattttttggcattgttggactgaagattttcttctccaaattccagtgtaagcgagagagagaagcatgggccggtgccttattcatggttccagcagggacaggatcagagatgctcccacatccagctgcttctcttcttctagtcctagcctccaggggcccaggcccaaaaaaggaaaatccaggcggaactggactggagaagaaagcacggacaggcagaattgagagacgcccggaaacacgcagtggaggtgactctggatccagagacggctcacccgaagctctgcgtttctgatctgaaaactgtaacccatagaaaagctccccaggaggtgcctcactctgagaagagatttacaaggaagagtgtggtggcttctcagagtttccaagcagggaaacattactgggaggtggacggaggacacaataaaaggtggcgcgtgggagtgtgccgggatgatgtggacaggaggaaggagtacgtgactttgtctcccgatcatgggtactgggtcctcagactgaatggagaacatttgtatttcacattaaatccccgttttatcagcgtcttccccaggaccccacctacaaaaataggggtcttcctggactatgagtgtgggaccatctccttcttcaacataaatgaccagtcccttatttataccctgacatgtcggtttgaaggcttattgaggccctacattgagtatccgtcctataatgagcaaaatggaactcccatagtcatctgcccagtcacccaggaatcagagaaagaggcctcttggcaaagggcctctgcaatcccagagacaagcaacagtgagtcctcctcacaggcaaccacgcccttcctccccaggggtgaaatgtaggatgaatcacatcccacattcttctttagggatattaaggtctctctcccagatccaaagtcccgcagcagccggccaaggtggcttccagatgaagggggactggcctgtccacatgggagtcaggtgtcatggctgccctgagctgggagggaagaaggctgacattacatttagtttgctctcactccatctggctaagtgatcttgaaataccacctctcaggtgaagaaccgtcaggaattcccatctcacaggctgtggtgtagattaagtagacaaggaatgtgaataatgcttagatcttattgatgacagagtgtatcctaatggtttgttcattatattacactttcagt

SEQ ID NO: 243 - DNA, 1704 bp, Artificial
  cDNA Sequence
cagcagaaaaccaatgctgttaagaaattacataaatgtgatgaatgtgggaaatccttcaaatataattcccgccttgttcaacataaaattatgcacactggggaaaagcgctatgaatgtgatgactgtggagggactttccggagcagctcgagccttcgggtccacaaacggatccacactggggagaagccgtacaagtgtgaggaatgtgggaaagcctacatgtcctactccagccttataaaccacaaaagcacccattctggggagaagaactgtaaatgtgatgaatgtggaaaatccttcaattatagctctgttctggaccagcataaaaggatccacactggggagaagccctatgaatgtggtgagtgtgggaaggccttcaggaacagctctgggctcagagtccacaaaaggatccacacgggggagaagccctatgaatgcgacatctgtgggaaaaccttcagtaacagctctggccttagggtccataaaaggatccacacaggtgagaaaccttacgaatgtgatgagtgtgggaaggccttcattacttgtagaacacttctcaaccataaaagcatccactttggagataaaccctataaatgtgatgagtgtgagaaatcttttaattatagctctcttctcattcagcataaagtcatccacactggagagaaaccttatgaatgtgatgaatgtgggaaggctttcaggaacagctcaggcctcatagtgcataaaaggatccacacaggagagaaaccttacaagtgtgatgtctgtggcaaagcattcagctatagctcaggcctcgcagtccataaaagcattcaccctgggaagaaagcccatgaatgtaaggagtgtgggaaatcctttagttataactcactacttcttcaacacagaactattcataccggagagagaccttatgtatgtgatgtgtgtgggaaaacgttcagaaacaatgcaggcctcaaagtccacaggaggctccatactggggaaaaaccatataagtgtgatgtgtgtgggaaagcctatatctcacgctctagccttaaaaatcacaaaggaatccaccttggggagaagccctataaatgtagctattgtgagaaatccttcaactacagctctgcccttgaacagcataaaaggattcataccagggaaaaaccctttgggtgtgatgagtgtggtaaagctttcagaaataattctggccttaaagtacataaacgaatccacactggggaacgaccttacaaatgtgaagaatgtgggaaagcatacatctctctctcgagccttataaatcataaaagtgtacaccctggggagaagccctttaagtgtgacgagtgtgggaaggccttcaggaacagctcaggcctcacagtgcataaaaggatccacacaggtgagaaaccctatgaatgtgatgagtgtgggaaggcatacatctcacactcaagtcttatcaatcataaaagtgtccaccaggggaagcagccctataattgtgagtgtgggaaatccttcaattatagatcagtccttgaccagcacaaaaggatccacactggaaagaagccataccgatgtaatgagtgtggtaaggcttttaatatcagatcaaatctcaccaagcataaaagaacccatactggagaggaa

SEQ ID NO: 244 - DNA, 1473 bp, Artificial
  cDNA Sequence
gaggatgaggaaccaactgaagaatatgaaaatgttggaaatgcagcatctaagtggccaaaagtggaggatcctatgcctgaatctaaggttggtgacacatgtgtttgggatagcaaggtagagaatcaacagaaaaagcctgtggaaaacaggatgaaggaggacaaaagcagcatcagggaagcaatcagcaaagccaagagtacagcaaatataaagacagaacaggaaggcaaacgtgtggagaacattaatggaacctcctaccctagtctacagcagaaaaccaatgctgttaagaaattacataaatgtgatgaatgtgggaaatccttcaaatataattcccgccttgttcaacataaaattatgcacactggggaaaagcgctatgaatgtgatgactgtggagggactttccggagcagctcgagccttcgggtccacaaacggatccacactggggagaagccgtacaagtgtgaggaatgtgggaaagcctacatgtcctactccagccttataaaccacaaaagcacccattctggggagaagaactgtaaatgtgatgaatgtggaaaatccttcaattatagctctgttctggaccagcataaaaggatccacactggggagaagccctatgaatgtggtgagtgtgggaaggccttcaggaacagctctgggctcagagtccacaaaaggatccacacgggggagaagccctatgaatgcgacatctgtgggaaaaccttcagtaacagctctggccttagggtccataaaaggatccacacagtcatccacactggagagaaaccttatgaatgtgatgaatgtgggaaggctttcaggaacagctcaggcctcatagtgcataaaaggatccacacaggagagaaaccttacaagtgtgatgtctgtggcaaagcattcagctatagctcaggcctcgcagtccataaaagcattcaccctgggaagaaagcccatgaatgtaaggagtgtgggaaatcctttagttataactcactacttcttcaacacagaactattcataccggagagagaccttatgtatgtgatgtgtgtgggaaaacgttcagaaacaatgcaggcctcaaagtccacaggaggctccatactggggaaaaaccatataagtgtgatgtgtgtgggaaagcctatatctcacgctctagccttaaaaatcacaaaggaatccaccttggggagaagccctataaatgtagctattgtgagaaatccttcaactacagctctgcccttgaacagcataaaaggattcataccagggaaaaaccctttgggtgtgatgagtgtggtaaagctttcagaaataattctggccttaaagtacataaacgaatccacactggggaacgaccttacaaatgtgaagaatgtgggaaagcatacatctctctctcgagccttataaatcataaa

SEQ ID NO: 245 - DNA, 3097 bp, Artificial
  cDNA Sequence
ggcttttgactgactggatgtgggaatgttgtggaagacttctggcctgccatttcctgagaacgggactgctgagagaggagctgggaggagcactgcaaatttcactttggacacgtgagtcagagaaatctgcctcctgggccatgccgcttctaaggcctgtttcttctcatgagccccagcacaagacagatgggccagttctcacagtggataacttcccctgcctgagcaagagatgggatagtatctgggatctgtccatcaccagactctgagcttaataaggcagctgaatgaagggaggtaacggacccctgagaggggcactgaagtctgcagtggggggggaggggcctggacacaccccttcccccccagactcctccccgtcagggtcagctcagccatggactttggacctggataagaagagagaagctgcactttggtggatctgatttgggattctcagttttgaaaatggagtgctgaatggggatttgatgatctcctggagagcaactgagacaagagaagaaaggtgcatggctgcctcctaatcccatagtccagaggaggcatccctaggactgcgggcaagggagccgggcaagcccagggcagccttgaaccgtcccctggcctgccctccccggtgggggccaggatgctgaagaagcagtctgcagggcttgtgctgtggggcgctatcctctttgtggcctggaatgccctgctgctcctcttcttctggacgcgcccagcacctggcaggccaccctcagtcagcgctctcgatggcgaccccgccagcctcacccgggaagtgattcgcctggcccaagacgccgaggtggagctggagcggcagcgtgggctgctgcagcagatcggggatgccctgtcgagccagcgggggagggtgcccaccgcggcccctcccgcccagccgcgtgtgcctgtgacccccgcgccggcggtgattcccatcctggtcatcgcctgtgaccgcagcactgttcggcgctgcctggacaagctgctgcattatcggccctcggctgagctcttccccatcatcgttagccaggactgcgggcacgaggagacggcccaggccatcgcctcctacggcagcgcggtcacgcacatccggcagcccgacctgagcagcattgcggtgccgccggaccaccgcaagttccagggctactacaagatcgcgcgccactaccgctgggcgctgggccaggtcttccggcagtttcgcttccccgcggccgtggtggtggaggatgacctggaggtggccccggacttcttcgagtactttcgggccacctatccgctgctgaaggccgacccctccctgtggtgcgtctcggcctggaatgacaacggcaaggagcagatggtggacgccagcaggcctgagctgctctaccgcaccgactttttccctggcctgggctggctgctgttggccgagctctgggctgagctggagcccaagtggccaaaggccttctgggacgactggatgcggcggccggagcagcggcaggggcgggcctgcatacgccctgagatctcaagaacgatgacctttggccgcaagggtgtgagccacgggcagttctttgaccagcacctcaagtttatcaagctgaaccagcagtttgtgcacttcacccagctggacctgtcttacctgcagcgggaggcctatgaccgagatttcctcgcccgcgtctacggtgctccccagctgcaggtggagaaagtgaggaccaatgaccggaaggagctgggggaggtgcgggtgcagtatacgggcagggacagcttcaaggctttcgccaaggctctgggtgtcatggatgaccttaagtcgggggttccgagagctggctaccggggtattgtcaccttccagttccggggccgccgtgtccacctggcgcccccactgacgtgggagggctatgatcctagctggaattagcacctgcctgtccttcctgggcccctccttgccacatcatgagctgaggtgggaccacagtccccaggctgcatcggcctgcctgtgtttccctcttaggtgcatttatctttttgatttttccgagtggcatttaagtgcacaaatgataacaagaggattattctcccgttctcaagggagtcagatcaggggaactattctagggtatgttgcggggtattaagcaggaaaccactgtgtggtggggggcactgggcttgttggggccagaaatgtccacgtcctgagctttctcctggagcatgtgcagagagtttggcaacgttcgctctcttgaccagaccccttctccctgacctggctcttccagccagggcacgagccctccttctatacctgctccccttcccccagtggggactgagttatgggagaaggggacatatttgtggccaaaatgatactaaccaaaggggcttccttgtcagggcctggtggagttggtgggtcatcggggctcactgcctcctgcccttctctcctgtctgacccccacttagcccttctctccttgcagcctagcagtttatagttctgagatggaaagttgaagggggcaagcaagacctctcctcagcccatgcccagctgtcaggagagaggtgcagggaggaaggccttgtgctgggacaacctctctcttgccttacctcagagagggactatgccctgacccctcctttctgaaaatcagtgccctccctgttgctctaggaggctcctgctggcttggtagaagacagaattcgatctgcctgtccctttttcccctggggtttgacacacaggctcctctcagcatgaggtggagcagtgaccaggtggagcagtgaccaggacgcctctggcccagtgctgcccagcctccccgcccgctcccaggcgccccatgtcctcacaggccaggacgccatggcaggatggagaggacttggtggatttttgtttcttgcctgacctcagtttcatgaaagaaagtggaagctacagaattattttctaaaataaaggctgaattgtctg

SEQ ID NO: 246 - DNA, 912 bp, Artificial
  cDNA Sequence
atgctgaagaagcagtctgcagggcttgtgctgtggggcgctatcctctttgtggcctggaatgccctgctgctcctcttcttctggacgcgcccagcacctggcaggccaccctcagtcagcgctctcgatggcgaccccgccagcctcacccgggaagtcttccggcagtttcgcttccccgcggccgtggtggtggaggatgacctggaggtggccccggacttcttcgagtactttcgggccacctatccgctgctgaaggccgacccctccctgtggtgcgtctcggcctggaatgacaacggcaaggagcagatggtggacgccagcaggcctgagctgctctaccgcaccgactttttccctggcctgggctggctgctgttggccgagctctgggctgagctggagcccaagtggccaaaggccttctgggacgactggatgcggcggccggagcagcggcaggggcgggcctgcatacgccctgagatctcaagaacgatgacctttggccgcaagggtgtgagccacgggcagttctttgaccagcacctcaagtttatcaagctgaaccagcagtttgtgcacttcacccagctggacctgtcttacctgcagcgggaggcctatgaccgagatttcctcgcccgcgtctacggtgctccccagctgcaggtggagaaagtgaggaccaatgaccggaaggagctgggggaggtgcgggtgcagtatacgggcagggacagcttcaaggctttcgccaaggctctgggtgtcatggatgaccttaagtcgggggttccgagagctggctaccggggtattgtcaccttccagttccggggccgccgtgtccacctggcgcccccactgacgtgggagggctatgatcctagctggaattag

SEQ ID NO: 247 - DNA, 4495 bp, Artificial
  cDNA Sequence
gacgggtcaggagcgtagaggcggcggcaaaatggcggcgcctgaggagcgggatctaacccaggagcagacagagaagctgctgcagtttcaggatctcactggcatcgaatctatggatcagtgtcgccataccttggaacagcataactggaacatagaggctgctgtacaggacagattgaatgagcaagagggcgtacctagtgttttcaacccacctccatcacgacccctgcaggttaatacagctgaccacaggatctacagctatgttgtctcaagacctcaaccaagggcaaggctgcttggatggggttattacttgataatgcttccattccggtttacctattacacgatacttgatatatttaggtttgctcttcgttttatacggcctgaccctcgcagccgggtcactgaccccgttggggacattgtttcatttatgcactcttttgaagagaaatatgggagggcacaccctgtcttctaccagggaacgtacagccaggcacttaacgatgccaaaagggagcttcgctttcttttggtttatcttcatggagatgatcaccaggactctgatgagttttgtcgcaacacactctgtgcacctgaagttatttcactaataaacactaggatgctcttctgggcatgctctacaaacaaacctgagggatacagggtctcacaggctttacgagagaacacctatccattcctggccatgattatgctgaaggatcgaaggatgactgtggtgggacggctagaaggcctcattcaacctgatgacctcattaaccaactgacatttatcatggatgctaaccagacttacctggtgtcagaacgcctagaaagggaagaaagaaaccagacccaagtgctgagacaacagcaggatgaggcctacctggcctctctcagagctgaccaggagaaagaaagaaagaaacgggaggagcgggagcgtaagcggcggaaggaggaggaggtgcaacagcaaaagttggcagaggagagacggcggcagaatttacaggaggaaaaggaaaggaagttggaatgcctgccccctgaaccttcccctgatgaccctgaaagtgtcaagatcatcttcaaattacctaatgattctcgagtagagagacgattccacttttcacagtctctaacagtaatccacgacttcttattctccttgaaggaaagcccagaaaagtttcagattgaagccaattttcccaggcgagtgctgccctgcatcccttcagaggagtggcccaatccccctacgctacaggaggccggactcagccacacagaagttctttttgttcaggacctaactgacgaatgacatttttttcttcctgtcccctcctaccccagtccctaaaagaaatggggaaaaaagaaaacaacagcaagtcagaaaaaaaaaacaagagagagaaattcatattattattattattataatacaatattttttttaaaagactgctgcatccttaggaaggatcagaaaccatgctgcccgtaagagtcacaacctgtgtgtgcgcgcaaggttagcaacaaacgtacccgcttggcaagcccacccttcctgtggcctctgtgcacgcaccttccagtgaacagagactcttcaccttcgacccatccattgtcccagctgggaaggggacattcccactagttctcattcattcttgcttttatgaaaaataaaagtgaaaaacctccatcaaccagctacttgcagcatctcctgaggacttgcttctcctgcctctggggaagagagggaagagaaagcacagagcagagaagcagagatgttccttgaactgcccacaagttttcaataacttttatttctgttttgtaatgaccaaaggaatgaggctgacataggtatatatatatatttttttcctttatttgataaagagccaattctttaaacccatgagtttatgccctgggctccttagcccacaatagtgtaataaaagtgccccgggctggtttgtgcttatttctgccattgtccctctcacgttcccagagaggtcattctttttggtccaactcttgctgtcctttcttaccacctgtgcaccccacttggagcagtgggaggaaatctgggtttgtggccccacaaaggctgtatatgtaaagatacacctatgtatgtggtggaactcacctttacacacaactgcagcttttccttggagtctgtaccaggtggtggttatggggtctgaaccaaaggatagcagctcttcattcctcttctgacatgtgcatgctgctccccccagccctgggctttcctgaattgccaagcctggtgcctttccaaaggactagcagggcctgtggtggagccagcagaaccacaggagagtgccctgcctgtctcagtggaagtgtattattgttttaaggatagaaccagaggccttgaagggagccaagacagaactcccagcctgtgtaatctattggaaggcacattttcatttctgatgcagccaccttctggaggcagcttttatcctttctctctattgctatgttgaagtaatagggttttttttaacctctggatgtctcgtctgtggttgagtttatggtaatgggtacatgggtcaggccatgtattaacagatgccagtgcgctctgacaagtattccaaagtgttctgtagctagactggtgcaggctcgttgtaccactgcaaccgactgacgttactgtagttcctagaatgctgtgagggcggggggttcagatcaacataaagcctaacttgctggagttgtagtctcaaggctttctctcttgcttaactaaaacctaaggaccactgtttttggtagcaattatatggttactatccactgcagtcctcagttgttggggtaaatcccacatggcagagtaaggcaccccacagaaattaacttggagagcctgagaaattcccagtggccttggcatagctgtctagaacaccatctctaggaaaatttaattctgtccctggccagctattgttcttccacttcgttttctgctgtcccaaggccagatgagtggaatcaccatctgactgctgtcaataaaatgtatctggcgtgaacagcaggataacccatgttctccacataaggataaccttacgtgaaaccttcctgctgacaaccatgcagaggaatttttccacttaagtcagagccttcctccccatctggaattcacagctgttccctggcagcacacaggagggtattaaggacctttgtgaggctaggtacactgtccacacctctttggggaagttacgattttttttttccatcataattcagtctcttcttattctacagtgtgcactttatgcctctcgccttttgataatagttgttcagtgaaggaagtcagctgccagaatattaagaagggtctccctttatgtcagtacaactgttagggcggccttcccatttactttaggtttcaagaggattcaccggaagcacatgccccggtctagtcccatttgaaacagttctgctttactgagaccctaggccggtctccttgctgaccctagcgctgctgcctaggtgccatttcctttcctcctcagtcaaatacaggctgcacattttgtcacttaatgccagtacaatctgtgttactcctaaggacttttgggattttgatgagacctgcgagggagaagacactgagaagccagtgatctgcaagcatttgctcttgtttccacatcacctctgggatatttcagctgttgtttccaaatggcaaatcatcaactaaaagcacttgtttcaagttttgttctgcactcccacgactgaagttgtagattgagctgaataaccatgggaagtgaccaagcaaagacactcgattggagtcagttgaatatttgtaccctcagtggagcccttctggtcttttcttccacttctgcagaatttcctctagcaaatacttctttctccttgcttgcctccaccatgatatttgaataagagatggccagaggataacacttgtctcttaaaaactaagctaaaaagaacctagaaccttcaattgagcagttgtgaaaattgctaatggtgccaaggccaagcaaagagtttcagaaaatgactgagaaggagcgataacccccagaatgcaaaatcaggggcatcattatccggtgcttgaacaaggagctccgctctacaactggtttttttaggacttgtgaggaacacagcaacggaaatccatccacaaaggatgcagtgccccaacttgtactgcgcctgaatagtcatgtgataatttactgaagaaatctagtgtactttaaatttttttcataaaagtttacattgtattgtaggttaacattaaatgttttatagcaaaaacttc

SEQ ID NO: 248 - DNA, 4023 bp, Artificial
  cDNA Sequence
atcaaatgtggggtttgttacattccgctgccgccgcggacagttcttaaagggccagccgccggctgccgcgcagacccagctgcgtcctgcgccgcctcccgctccctgagggcctgggccgagagagactgatcgcgcgtgggcctcgcgaggcagacgccgtcgggcggacaacaaagagagaggccccggaaggagccgggctgcccccggacccgggggtggggaggggagcacattgttccgcagggcgggagctcttaaaggatccagacaggcaccccccccctcccccgccccctgcccagtttggccgtcctagatcgggaacaaaggagtcaacgtgtggccgggcggccaaagggttgtgagtcccggcccagcccctccacccccctgcccccccgatgcgaccatgggctctggcagtgactaggtggccaccctccgcccccgtgggccagcggcgattctctgcgggacctggcagcaccccgggccagctctggggaagccctggcctcgagggccccctggccagcccgcctgcccgggatgagcgcttaccctcccagcagccgccgtcccgacctccacacctccccgtagaggagcgccgagcctcggctcctgccggcgggagcccccgaatgctgcacccagccacccagcagagcccgttcatggttgatctccacgagcaggtgcaccagggacctgtccctctgtcctacacggtcaccacagtgacgacccaaggcttccccttgcctacaggccagcacatccctggctgcagtgcccagcagctcccagcatgctccgtgatgttcagtgggcagcattaccccctctgctgcctcccgcccccgcttatccaggcgtgcaccatgcagcagctgcctgtgccctatcaggcctacccccacctcatctccagtgaccactacatcctgcaccccccaccaccggccccacccccccagcccacccacatggcgcccctggggcagtttgtgtctctgcagacccagcaccctcggatgcccctccagcggctcgacaacgacgtggacctgcgtggggaccagccctccctgggcagcttcacctactccacctctgcgcctggcccagccctttccccgtcggtgcccctgcactacctgccccacgatccgctgcaccaggagctgtcctttggtgtgccatattctcacatgatgccacggagactgagcacccagagataccgcctgcagcagccactgcccccgccgcccccacccccacccccaccaccctactaccccagcttcctgccctacttcctctcgatgctgccaatgtcaccaacagcaatggggcccaccatcagcctggacctggacgtggatgatgtggagatggagaactatgaggccctcctgaacctggccgagcggctgggagatgccaagccccggggtctcaccaaagcagacatagagcagctcccgtcgtaccgctttaacccggacagccatcagtcggagcagacgctgtgtgtggtctgcttcagtgacttcgaggcgcggcagctgctccgagtcctcccctgcaaccatgagttccacaccaagtgtgttgacaagtggttgaaggccaaccggacgtgtcccatctgccgggccgacgcctccgaggtgcccagggaggctgagtgaggccacgcagccgcctgcccgggagaaccctgcctgaagctctggaaacttgtgggtggggcccagggaggatggggagggagtggcccaggcctgccccttcgctcctgcctgcatttccagagctggtgccagggtcagcccagcgaggagtccctgcaataagcccctgcatttgccaagctccaaagactccctccctagtctgcctgcctgcccgcccgccacggagctgcctgagtgtccctgatcgggtctccctcctgtgcaccctcaggtccctccttttcctgctggcactgagtgccaggggtccgctccctcagtggggccggtggagatccttggccccaggatgggcagacagagcaccatcctgggtcagaaggtctcatgctctgaaatggcgtgccctctgcccaggtggcactgccaggtgcgtagacagacggtgtcacgagccatttcctgagccccagggctgaatcccccctccttgaccccgaacagtgaactcaggcagctggctctgtgttggctgctgtgagggctgagtctggttccctaggggaccctcatcccaggaacaacattccagccccaccctcaggctggagggcgtcccagcctaatcccgagctggggcacacgtatcctgaggggcttgggccatacggggagagggagccctgtgttcccggtggttgtccctcccagggatgcagccagacccgtgcccaatctcctctccctctgttgttttgcatgaacgtgaggagcagcagtttttgttcattcatttggcccaaaatcacgtgtaggatttggggatgtggatatttaagacaatttcttttttcttttggtttaataggggcgggtatagggaccaactgggaccgagtgcccagggggccgagcacggtcatgctggccggcctgcatgcatgcgtgtgccgggctgggctgggcggccggcggtcgtggggcagggttgggggtctgtgctcagctgataactgccatgcactgtactgcacacgtccctagagcctaccgggacccgacgcttttcagggcatttctccctccagccagggcccaactcccacctgcctgggcgaatctcctccaaggaagtcccaggaggatggggaccaggaaggctgtggacccccatctccagggggccttcccagcctgatccctgtcctccaagttctggaggaggccgctgtagggtctggctgagcttcccacccactttccctggtcccaatcctttcttgtcctatacccagctggggttgctgccctgaacgaactgcgtgtggggccggcacatcctagcaggcagcccctggcgcctgctgcctcagggatgctccaaccaccctcgttctcctcgcagtggccctggctcccacctcccgccccagcctgccgtggggcccgtcagcctggtcccacccccatggagaacccaaagtcttactgtatataactccaggtgacgtttctatatttatagcagtgttgaaaacccacgtgttttacacagaaccaccctctccaacccctcccttcccgaccccaacaaaacgttttcaaaccccttacagttcctggggcaggcggaaacaggctcacagattgtgtgtcggctgcagcagtgattccaacaagcagctattgggggggaaacacagcatttaaaaagatcatcattaaaaaacaagatttatacaacaattacttaggatgtttgtgatctgccgaccttgctatagatgccatgttaccaatgatttcctgtggtgggggcttgccattgtttactctcttatttaccaacttctggcctaggcatgacagtgggcaccttcccccagccctggctgggcccagcgcctgtgttctgtgttagaaaggttttatatatatataaaattacatatatatgtagaaatatatgtaattttgggggccctgttccttgcacattttacagttacctcatttttcccatgtatgtatttgagaaaatgctaatatatagagaaaaaaatggttcttaaagcttaaatgtgtggttttttccattccatgggattcacattggtttgtagcatttaacataactagtatgttgtattatatatatgtgtatactgattgaaatttttaacagatttgtactttttttaaaatgaaagttgctagttctgcttgaccaagtagtgcaatcattattttttttaatattgttgctgatttcagagggatattcactaataaatgtatgatgtatacc

SEQ ID NO: 249 - DNA, 1275 bp, Artificial
  cDNA Sequence
atgagcgacagtaaatgtgacagtcagttttatagtgtgcaagtggcagactcaaccttcactgtcctaaaacgttaccagcagctgaaaccaattggctctggggcccaagggattgtttgtgctgcatttgatacagttcttgggataaatgttgcagtcaagaaactaagccgtccttttcagaaccaaactcatgcaaagagagcttatcgtgaacttgtcctcttaaaatgtgtcaatcataaaaatataattagtttgttaaatgtgtttacaccacaaaaaactctagaagaatttcaagatgtgtatttggttatggaattaatggatgctaacttatgtcaggttattcacatggagctggatcatgaaagaatgtcctaccttctttaccagatgctttgtggtattaaacatctgcattcagctggtataattcatagagatttgaagcctagcaacattgttgtgaaatcagactgcaccctgaagatccttgactttggcctggcccggacagcgtgcactaacttcatgatgaccccttacgtggtgacacggtactaccgggcgcccgaagtcatcctgggtatgggctacaaagagaacgtggacatctggtctgtcgggtgcatcatggcagaaatggtcctccataaagtcctgttcccgggaagagactatattgatcagtggaataaagttattgagcagctgggaacaccatcagcagagttcatgaagaaacttcagccaactgtgaggaattatgtcgaaaacagaccaaagtatcctggaatcaaatttgaagaactctttccagattggatattcccatcagaatctgagcgagacaaaataaaaacaagtcaagccagagatctgttatcaaaaatgttagtgattgatcctgacaagcggatctctgtagacgaagctctgcgtcacccatacatcactgtttggtatgaccccgccgaagcagaagccccaccacctcaaatttatgatgcccagttggaagaaagagaacatgcaattgaagaatggaaagagctaatttacaaagaagtcatggattgggaagaaagaagcaagaatggtgttgtaaaagatcagccttcagatgcagcagtaagtagcaacgccactccttctcagtcttcatcgatcaatgacatttcatccatgtccactgagcagacgctggcctcagacacagacagcagtcttgatgcctcgacgggaccccttgaaggctgtcgatga

SEQ ID NO: 250 - DNA, 1275 bp, Artificial
  cDNA Sequence
atgagcgacagtaaatgtgacagtcagttttatagtgtgcaagtggcagactcaaccttcactgtcctaaaacgttaccagcagctgaaaccaattggctctggggcccaagggattgtttgtgctgcatttgatacagttcttgggataaatgttgcagtcaagaaactaagccgtccttttcagaaccaaactcatgcaaagagagcttatcgtgaacttgtcctcttaaaatgtgtcaatcataaaaatataattagtttgttaaatgtgtttacaccacaaaaaactctagaagaatttcaagatgtgtatttggttatggaattaatggatgctaacttatgtcaggttattcacatggagctggatcatgaaagaatgtcctaccttctttaccagatgctttgtggtattaaacatctgcattcagctggtataattcatagagatttgaagcctagcaacattgttgtgaaatcagactgcaccctgaagatccttgactttggcctggcccggacagcgtgcactaacttcatgatgaccccttacgtggtgacacggtactaccgggcgcccgaagtcatcctgggtatgggctacaaagagaacgttgatatctggtcagtgggttgcatcatgggagagctggtgaaaggttgtgtgatattccaaggcactgaccatattgatcagtggaataaagttattgagcagctgggaacaccatcagcagagttcatgaagaaacttcagccaactgtgaggaattatgtcgaaaacagaccaaagtatcctggaatcaaatttgaagaactctttccagattggatattcccatcagaatctgagcgagacaaaataaaaacaagtcaagccagagatctgttatcaaaaatgttagtgattgatcctgacaagcggatctctgtagacgaagctctgcgtcacccatacatcactgtttggtatgaccccgccgaagcagaagccccaccacctcaaatttatgatgcccagttggaagaaagagaacatgcaattgaagaatggaaagagctaatttacaaagaagtcatggattgggaagaaagaagcaagaatggtgttgtaaaagatcagccttcagatgcagcagtaagtagcaacgccactccttctcagtcttcatcgatcaatgacatttcatccatgtccactgagcagacgctggcctcagacacagacagcagtcttgatgcctcgacgggaccccttgaaggctgtcgatga

SEQ ID NO: 251 - DNA, 2923 bp, Artificial
  cDNA Sequence
ggaatctttgcctacatgaactacagagtcccccggacgaggaaggagatcttcgaaaccctcatcaagggcctgcagcggctggagtacagaggctacgactcggcaggtgtggcgatcgatgggaataatcacgaagtcaaagaaagacacattcagctggtcaagaaaagggggaaagtcaaggctctcgatgaagaactttacaaacaagacagcatggacttaaaagtggagtttgagacacacttcggcattgcccacacgcgctgggccacccacggggtccccagtgctgtcaacagccaccctcagcgctcagacaaaggcaacgaatttgttgtcatccacaatgggatcatcacaaattacaaagatctgaggaaatttctggaaagcaaaggctacgagtttgagtcagaaacagatacagagaccatcgccaagctgattaaatatgtgttcgacaacagagaaactgaggacattacgttttcaacgttggtcgagagagtcattcagcagttggaaggtgcattcgcgctggttttcaagagtgtccactacccaggagaagccgttgccacacggagaggcagccccctgctcatcggagtccggagcaaatacaagctctccacagaacagatccctatcttatacaggacgtgcactctggagaatgtgaagaatatctgtaagacacggatgaagaggctggacagctccgcctgcctgcatgctgtgggcgacaaggccgtggaattcttctttgcttctgatgcaagcgctatcatagagcacaccaaccgggtcatcttcctggaggacgatgacatcgccgcagtggctgatgggaaactctccattcaccgggtcaagcgctcggccagtgatgacccatctcgagccatccagaccttgcagatggaactgcagcaaatcatgaaaggcaggtgtaacttcagtgcgtttatgcagaaggagatcttcgaacagccagaatcagttttcaatactatgagaggtcgggtgaattttgaaaccaacacagtgctcctgggtggcttgaaggaccacttgaaggagattcgacgatgccgacggctcatcgtgattggctgtggaaccagctaccacgctgccgtggctacgcggcaagttttggaggaactgactgagcttcctgtgatggttgaacttgctagtgattttctggacaggaacacacctgtgttcagggatgacgtttgctttttcatcagccagtcaggcgagaccgcggacaccctcctggcgctgcgctactgtaaggaccgcggcgctctcaccgtgggcgtcaccaacaccgtgggcagctccatctctcgcgagaccgactgcggcgtccacatcaacgcagggccggagatcggcgtggccagcaccaaggcttataccagtcagttcatctctctggtgatgtttggtttgatgatgtctgaagaccgaatttcactacaaaacaggaggcaagagatcatccgtggcttgagatctttacctgagctgatcaaggaagtgctgtctctggaggagaagatccacgacttggccctggagctctacacgcagagatcgctgctggtgatggggcggggctacaactatgccacctgcctggaaggagccctgaaaattaaagagataacctacatgcactcagaaggcatcctggctggggagctgaagcacgggcccctggcactgattgacaagcagatgcccgtcatcatggtcattatgaaggatccttgcttcgccaaatgccagaacgccctgcagcaagtcacggcccgccagggtcgccccattatactgtgctccaaggacgatactgaaagttccaagtttgcgtataagacaattgagctgccccacactgtggactgcctccagggcatcctgagcgtgattccgctgcagctgctgtccttccacctggctgttctccgaggatatgacgttgacttccccagaaatctggccaagtctgtaactgtggaatgaggctgagaccgtgacaagaccatcaccacctttcatctgattccagacctgtcccaacagcagggatgctacatgggaagagaagtggacatcccacatgttctgcgtgctcctgtagagcttgacagcttccacgtgccttctacccaagtgcttttgcttacagcagatactgtttctctgtgtcctgaagtcgccagaggagaagggaatcattgtttacacatggggatcagagcagacttctccactactgtgcaatagagatacagctctcttcagagtaactgtgaaccttttataaccaacactagagttagttttaaaagacaagatatttataatgacgactgtatagcttttaagttatttttctagtatgtggctttctgtagccgtggtaacggccaaactgttcatcctagctacccatgctctgtgtccaggcttgctcctggcaggtggcattcatctcagatgtgagcacaaggcattggccctctggactcctttctccttttctttcctctctaggctgctcctgaatcctgttctctgacatccgtggagcccctcctgcatccacctatgcctcctataagtccagttgaaatctcagcctccttcaacattttcttctcgtgtgtggcccacatccctccacttctccaacttctgtttaatctgatcacggctctttttaagccctggcagcattttggtccctgctccttgcccatagtaaaacagcttgaaatatcccatgcaagagagtagtttcaagtgggcaactctgctctctatttaaaagcgtgcacaatcaaaagtactatgcaattttaggacaataaagaacatacagtttttttgtgtg

SEQ ID NO: 252 - DNA, 8437 bp, Artificial
  cDNA Sequence
gctggcccgggagggggcgcggggcacggttgatgccggcccaggatggatcagacctgtgaactacccagaagaaattgtctgctgcccttttccaatccagtgaatttagatgcccctgaagacaaggacagccctttcggtaatggtcaatccaatttttctgagccacttaatgggtgtactatgcagttatcgactgtcagtggaacatcccaaaatgcttatggacaagattctccatcttgttacattccactgcggagactacaggatttggcctccatgatcaatgtagagtatttaaatgggtctgctgatggatcagaatcctttcaagaccctgaaaaaagtgattcaagagctcagacgccaattgtttgcacttccttgagtcctggtggtcctacagcacttgctatgaaacaggaaccctcttgtaataactcccctgaactccaggtaaaagtaacaaagactatcaagaatggctttctgcactttgagaattttacttgtgtggacgatgcagatgtagattctgaaatggacccagaacagccagtcacagaggatgagagtatagaggagatctttgaggaaactcagaccaatgccacctgcaattatgagactaaatcagagaatggtgtaaaagtggccatgggaagtgaacaagacagcacaccagagagtagacacggtgcagtcaaatcgccattcttgccattagctcctcagactgaaacacagaaaaataagcaaagaaatgaagtggacggcagcaatgaaaaagcagcccttctcccagcccccttttcactaggagacacaaacattacaatagaagagcaattaaactcaataaatttatcttttcaggatgatccagattccagtaccagtacattaggaaacatgctagaattacctggaacttcatcatcatctacttcacaggaattgccattttgtcaacctaagaaaaagtctacgccactgaagtatgaagttggagatctcatctgggcaaaattcaagagacgcccatggtggccctgcaggatttgttctgatccgttgattaacacacattcaaaaatgaaagtttccaaccggaggccctatcggcagtactacgtggaggcttttggagatccttctgagagagcctgggtggctggaaaagcaatcgtcatgtttgaaggcagacatcaattcgaagagctacctgtccttaggagaagagggaaacagaaagaaaaaggatataggcataaggttcctcagaaaattttgagtaaatgggaagccagtgttggacttgcagaacagtatgatgttcccaaggggtcaaagaaccgaaaatgtattcctggttcaatcaagttggacagtgaagaagatatgccatttgaagactgcacaaatgatcctgagtcagaacatgacctgttgcttaatggctgtttgaaatcactggcttttgattctgaacattctgcagatgagaaggaaaagccttgcgctaaatctcgagccagaaagagctctgataatccaaaaaggactagtgtgaaaaagggccacatacaatttgaagcacataaagatgaacggaggggaaagattccagagaaccttggcctaaactttatctctggggatatatctgatacgcaggcctctaatgaactttccaggatagcaaatagcctcacagggtccaacactgccccaggaagttttctgttttcttcctgtggaaaaaacactgcaaagaaagaatttgagacttcaaatggtgactctttattgggcttgcctgagggtgctttgatctcaaagtgttctcgagagaagaataaaccccaacgaagcctggtgtgtggttcaaaagtgaagctctgctatattggagcaggtgatgaggaaaagcgaagtgattccattagtatctgtaccacttctgatgatggaagcagtgacctggatcccatagaacacagctcagagtctgataacagtgtccttgaaattccagatgctttcgatagaacagagaacatgttatctatgcagaaaaatgaaaagataaagtattctaggtttgctgccacaaacactagggtaaaagcaaaacagaagcctctcattagtaactcacatacagaccacttaatgggttgtactaagagtgcagagcctggaaccgagacgtctcaggttaatctctctgatctgaaggcatctactcttgttcacaaaccccagtcagattttacaaatgatgctctctctccaaaattcaacctgtcatcaagcatatccagtgagaactcgttaataaagggtggggcagcaaatcaagctctattacattcgaaaagcaaacagcccaagttccgaagtataaagtgcaaacacaaagaaaatccagttatggcagaacccccagttataaatgaggagtgcagtttgaaatgctgctcttctgataccaaaggctctcctttggccagcatttctaaaagtgggaaagtggatggtctaaaactactgaacaatatgcatgagaaaaccagggattcaagtgacatagaaacagcagtggtgaaacatgttttatccgagttgaaggaactctcttacagatccttaggtgaggatgtcagtgactctggaacatcaaagccatcaaaaccattacttttctcttctgcttctagtcagaatcacatacctattgaaccagactacaaattcagtacattgctaatgatgttgaaagatatgcatgatagtaagacgaaggagcagcggttgatgactgctcaaaacctggtctcttaccggagtcctggtcgtggggactgttctactaatagtcctgtaggagtctctaaggttttggtttcaggaggctccacacacaattcagagaaaaagggagatggcactcagaactccgccaatcctagccctagtgggggtgactctgcattatctggcgagttgtctgcttccctacctggcttactgtccgacaagagagacctccctgcttctggtaaaagtcgttcagactgtgttactaggcgcaactgtggacgatcaaagccttcatccaaattgcgagatgctttttcagcccaaatggtaaagaacacagtgaaccgtaaagccttaaagaccgagcgcaaaagaaaactgaatcagcttccaagtgtgactcttgatgctgtactgcagggagaccgagaacgtggaggttcattgagaggtggggcagaagatcctagtaaagaggatccccttcagataatgggccacttaacaagtgaagatggtgaccatttttctgatgtgcatttcgatagcaaggttaagcaatctgatcctggtaaaatttctgaaaaaggactctcttttgaaaacggaaaaggcccagagctggactctgtaatgaacagtgagaatgatgaactcaatggtgtaaatcaagtggtgcctaaaaagcggtggcagcgtttaaaccaaaggcgcactaaacctcgtaagcgcatgaacagatttaaagagaaagaaaactctgagtgtgcctttagggtcttacttcctagtgaccctgtgcaggaggggcgggatgagtttccagagcatagaactccttcagcaagcatacttgaggaaccactgacagagcaaaatcatgctgactgcttagattcagctgggccacggttaaatgtttgtgataaatccagtgccagcattggtgacatggaaaaggagccaggaattcccagtttgacaccacaggctgagctccctgaaccagctgtgcggtcagagaagaaacgccttaggaagccaagcaagtggcttttggaatatacagaagaatatgatcagatatttgctcctaagaaaaaacaaaagaaggtacaggagcaggtgcacaaggtaagttcccgctgtgaagaggaaagccttctagcccgaggtcgatctagtgctcagaacaagcaggtggacgagaattctttgatttcaaccaaagaagagcctccagttcttgaaagggaggctccgtttttggagggccccttggctcagtcagaacttggaggtggacatgctgagttgccgcagctgaccttgtctgtgcctgtggctccggaagtctctccacggcctgcccttgagtctgaggaattgctagttaaaacgccaggaaattatgaaagtaaacgtcaaagaaaaccaactaagaaacttcttgaatccaatgatttagaccctggatttatgcccaagaagggggaccttggcctttctaaaaagtgctatgaagctggtcacctggagaatggcataactgaatcttgtgccacatcttattcaaaagattttggtggaggcactaccaagatatttgacaagccaaggaagcgaaaacgacagaggcatgctgcagccaagatgcagtgtaaaaaagtgaaaaatgatgactcgtcaaaagagattccaggctcagagggagaactaatgcctcacaggacggccacaagccccaaggagactgttgaggaaggtgtagaacacgatcccgggatgcctgcctctaaaaaaatgcagggtgaacgcggtggaggagctgcactcaaggagaatgtctgtcagaattgtgaaaaattgggtgagctgctgttatgtgaggctcagtgctgtggggctttccacctggagtgccttggattgactgagatgccaagaggaaaatttatctgcaatgaatgtcgcacaggaatccatacctgttttgtatgtaagcagagtggggaagatgttaaaaggtgccttctacccttgtgtggaaagttttaccatgaagagtgtgtccagaagtacccacccactgttatgcagaacaagggcttccggtgctccctccacatctgtataacctgtcatgctgctaatccagccaatgtttctgcatctaaaggtcggttgatgcgctgtgtccgctgtcctgtggcataccacgccaatgacttttgcctggctgctgggtcaaagatccttgcatctaatagtatcatctgccctaatcactttacccctaggcggggctgccgaaatcatgagcatgttaatgttagctggtgctttgtgtgctcagaaggaggcagccttctgtgctgtgattcttgccctgctgcttttcatcgtgaatgcctgaacattgatatccctgaaggaaactggtattgcaatgactgtaaagcaggcaaaaagccacactacagggagattgtctgggtaaaagttggacgatacaggtggtggccagctgagatctgccatcctcgagctgttccttccaacattgataagatgagacatgatgtgggagagttcccagtcctcttttttggatctaatgactatttgtggactcaccaggcccgagtcttcccttacatggagggtgacgtgagcagcaaggataagatgggcaaaggagtggatgggacatataaaaaagctcttcaggaagctgcagcaaggtttgaggaattaaaggcccaaaaagagctaagacagctgcaggaagaccgaaagaatgacaagaagccaccaccttataaacatataaaggtaaaccgtcctattggcagggtacagatcttcactgcagacttatctgaaataccccgttgcaactgtaaagctactgatgagaacccctgtgggatagactctgaatgcatcaaccgcatgctgctctatgagtgccaccccacagtgtgtcctgccggagggcgctgtcaaaaccagtgcttttccaagcgccaatatccagaggttgaaattttccgcacattacagcggggttggggtctacggacaaaaacagatattaaaaagggtgaatttgtgaatgagtatgtgggtgagcttatagatgaagaagaatgcagagctcgaattcgctatgctcaagaacatgatatcactaatttctatatgctcaccctagacaaagaccgaatcattgatgctggtcccaaaggaaactatgctcggttcatgaatcattgctgccagcccaactgtgaaacacagaagtggtctgtgaatggagatacccgtgtaggcctttttgcactaagtgacattaaagcaggcactgaacttaccttcaactacaacctagaatgtcttgggaatggaaagactgtttgcaaatgtggagccccgaactgcagtggcttcttgggtgtaaggccaaagaatcaacccattgccacggaagaaaagtcaaagaaattcaagaagaagcaacagggaaagcgcaggacccagggtgaaatcacaaaggagcgagaagatgagtgttttagttgtggggatgctggccagctcgtctcctgcaagaaaccaggctgcccaaaagtttaccacgcagactgtctcaatctgaccaagcgaccagcagggaaatgggaatgtccgtggcatcagtgtgacatctgcgggaaggaagcagcctccttctgtgagatgtgccccagctccttttgtaagcagcatcgagaagggatgcttttcatttccaaactggatgggcgtctgtcttgtactgagcatgacccctgtgggcccaatcctctggaacctggggagatccgtgagtatgtgcctcccccagtaccgctgcctccagggccaagcactcacctggcagagcaatcaacaggaatggctgctcaggcacccaaaatgtcagataaacctcctgctgacaccaaccagatgctgtcgctctccaaaaaagctctggcagggacttgtcagaggccactgctacctgaaagacctcttgagagaactgactccaggccccagcctttagataaggtcagagacctcgctgggtcagggaccaaatcccaatccttggtttccagccagaggccactggacaggccaccagcagtggcaggaccaagaccccagctaagcgacaaaccctctccagtgaccagcccaagctcctcaccctcagtcaggtcccaaccactggaaagacctctggggacggctgacccaaggctggataaatccataggtgctgccagcccaaggccccagtcactggagaaaacctcagttcccactggcctgagacttccgccgccagacagactgctcattactagcagtcccaaaccccagacttcagacaggcctactgacaaaccccatgcctctttgtcccagagactcccacctcctgagaaagtactatcagctgtggtccagacccttgtagctaaagaaaaagcactgaggcctgtggaccagaatactcagtcaaaaaatagagctgctttggtgatggatctcatagacctaactcctcgccagaaggagcgggcagcttcacctcatcaggtcacaccacaggctgatgagaagatgccagtgttggagtcaagttcatggcctgccagcaaaggtctggggcatatgccgagagctgttgagaaaggctgtgtgtcagatcctcttcagacatctgggaaagcagcagccccttcagaggacccctggcaagctgttaaatcactcacccaggccagacttctttctcagcctcctgccaaggcctttttatatgagccaacaactcaggcctcaggaagagcttctgcaggggctgagcagaccccagggcctcttagccaatccccgggcctggtgaagcaggcgaagcagatggtcggaggccagcaactacctgcacttgccgccaagagtgggcaatcttttaggtctctcgggaaggccccagcctccctccccactgaagaaaagaagttggtaaccacagagcaaagtccctgggccctgggaaaagcctcatcacgggcagggctctggcccatagtggctggacagacactggcacagtcttgctggtctgctgggagcacacagacattggcacagacttgctggtctcttggaagagggcaagaccccaaaccagagcaaaatacacttccagctcttaaccaggctccttccagtcacaagtgtgcagaatcagaacagaagtagtaccaatcaatgtcacatgaacaaacaagctgcccccagggtaccatttggggaggggaaatcttttctttctttcccccttaaaaaaaaacacatctgccccgaacactttcccactgttattctttcctcatatcccaacactcagaactcttgtgacattagccagtgggggcttatggttgtgtgaaccatgtatgaaaatccagtgggccccaaccaaggagacagacagacttgggtctctttcccccaacttttccacatggtcatcgtgaaataaaaagtccactctggagtc

SEQ ID NO: 253 - DNA, 3101 bp, Artificial
  cDNA Sequence
gggccgctcgcggccacgccgccgtcgcgggtacattcctcgctcccggccgaggagcgctcgggctgtctgcggaccctgccgcgtgcaggggtcgcggccggctggagctgggagtgaggcggcggaggagccaggtgaggaggagccaggtgagcaggaccctgtgctgggcgcggagtcacgcaggctcgaggaaggcagttggtgggaagtccagcttgggtccctgagagctgtgagaaggagatgcggctgctgctggccctgttgggggtcctgctgagtgtgcctgggcctccagtcttgtccctggaggcctctgaggaagtggagcttgagccctgcctggctcccagcctggagcagcaagagcaggagctgacagtagcccttgggcagcctgtgcgtctgtgctgtgggcgggctgagcgtggtggccactggtacaaggagggcagtcgcctggcacctgctggccgtgtacggggctggaggggccgcctagagattgccagcttcctacctgaggatgctggccgctacctctgcctggcacgaggctccatgatcgtcctgcagaatctcaccttgattacaggtgactccttgacctccagcaacgatgatgaggaccccaagtcccatagggacccctcgaataggcacagttacccccagcaagcaccctactggacacacccccagcgcatggagaagaaactgcatgcagtacctgcggggaacaccgtcaagttccgctgtccagctgcaggcaaccccacgcccaccatccgctggcttaaggatggacaggcctttcatggggagaaccgcattggaggcattcggctgcgccatcagcactggagtctcgtgatggagagcgtggtgccctcggaccgcggcacatacacctgcctggtagagaacgctgtgggcagcatccgctataactacctgctagatgtgctggagcggtccccgcaccggcccatcctgcaggccgggctcccggccaacaccacagccgtggtgggcagcgacgtggagctgctgtgcaaggtgtacagcgatgcccagccccacatccagtggctgaagcacatcgtcatcaacggcagcagcttcggagccgacggtttcccctatgtgcaagtcctaaagactgcagacatcaatagctcagaggtggaggtcctgtacctgcggaacgtgtcagccgaggacgcaggcgagtacacctgcctcgcaggcaattccatcggcctctcctaccagtctgcctggctcacggtgctgccagaggaggaccccacatggaccgcagcagcgcccgaggccaggtatacggacatcatcctgtacgcgtcgggctccctggccttggctgtgctcctgctgctggccgggctgtatcgagggcaggcgctccacggccggcacccccgcccgcccgccactgtgcagaagctctcccgcttccctctggcccgacagttctccctggagtcaggctcttccggcaagtcaagctcatccctggtacgaggcgtgcgtctctcctccagcggccccgccttgctcgccggcctcgtgagtctagatctacctctcgacccactatgggagttcccccgggacaggctggtgcttgggaagcccctaggcgagggctgctttggccaggtagtacgtgcagaggcctttggcatggaccctgcccggcctgaccaagccagcactgtggccgtcaagatgctcaaagacaacgcctctgacaaggacctggccgacctggtctcggagatggaggtgatgaagctgatcggccgacacaagaacatcatcaacctgcttggtgtctgcacccaggaagggcccctgtacgtgatcgtggagtgcgccgccaagggaaacctgcgggagttcctgcgggcccggcgccccccaggccccgacctcagccccgacggtcctcggagcagtgaggggccgctctccttcccagtcctggtctcctgcgcctaccaggtggcccgaggcatgcagtatctggagtcccggaagtgtatccaccgggacctggctgcccgcaatgtgctggtgactgaggacaatgtgatgaagattgctgactttgggctggcccgcggcgtccaccacattgactactataagaaaaccagcaacggccgcctgcctgtgaagtggatggcgcccgaggccttgtttgaccgggtgtacacacaccagagtgacgtgtggtcttttgggatcctgctatgggagatcttcaccctcgggggctccccgtatcctggcatcccggtggaggagctgttctcgctgctgcgggagggacatcggatggaccgacccccacactgccccccagagctgtacgggctgatgcgtgagtgctggcacgcagcgccctcccagaggcctaccttcaagcagctggtggaggcgctggacaaggtcctgctggccgtctctgaggagtacctcgacctccgcctgaccttcggaccctattccccctctggtggggacgccagcagcacctgctcctccagcgattctgtcttcagccacgaccccctgccattgggatccagctccttccccttcgggtctggggtgcagacatgagcaaggctcaaggctgtgcaggcacataggctggtggccttgggccttggggctcagccacagcctgacacagtgctcgaccttgatagcatggggcccctggcccagagttgctgtgccgtgtccaagggccgtgcccttgcccttggagctgccgtgcctgtgtcctgatggcccaaatgtcagggttctgctcggcttcttggaccttggcgcttagtccccatcccgggtttggctgagcctggctggagagctgctatgctaaacctcctgcctcccaataccagcaggaggttctgggcctctgaaccccctttccccacacctccccctgctgctgctgccccagcgtcttgacgggagcattggcccctgagcccagagaagctggaagcctgccgaaaacaggagcaaatggcgttttataaattatttttttg

SEQ ID NO: 254 - DNA, 2888 bp, Artificial
  cDNA Sequence
ccgaggagcgctcgggctgtctgcggaccctgccgcgtgcaggggtcgcggccggctggagctgggagtgaggcggcggaggagccaggtgaggaggagccaggaaggcagttggtgggaagtccagcttgggtccctgagagctgtgagaaggagatgcggctgctgctggccctgttgggggtcctgctgagtgtgcctgggcctccagtcttgtccctggaggcctctgaggaagtggagcttgagccctgcctggctcccagcctggagcagcaagagcaggagctgacagtagcccttgggcagcctgtgcgtctgtgctgtgggcgggctgagcgtggtggccactggtacaaggagggcagtcgcctggcacctgctggccgtgtacggggctggaggggccgcctagagattgccagcttcctacctgaggatgctggccgctacctctgcctggcacgaggctccatgatcgtcctgcagaatctcaccttgattacaggtgactccttgacctccagcaacgatgatgaggaccccaagtcccatagggacccctcgaataggcacagttacccccagcaagcaccctactggacacacccccagcgcatggagaagaaactgcatgcagtacctgcggggaacaccgtcaagttccgctgtccagctgcaggcaaccccacgcccaccatccgctggcttaaggatggacaggcctttcatggggagaaccgcattggaggcattcggctgcgccatcagcactggagtctcgtgatggagagcgtggtgccctcggaccgcggcacatacacctgcctggtagagaacgctgtgggcagcatccgctataactacctgctagatgtgctggagcggtccccgcaccggcccatcctgcaggccgggctcccggccaacaccacagccgtggtgggcagcgacgtggagctgctgtgcaaggtgtacagcgatgcccagccccacatccagtggctgaagcacatcgtcatcaacggcagcagcttcggagccgacggtttcccctatgtgcaagtcctaaagactgcagacatcaatagctcagaggtggaggtcctgtacctgcggaacgtgtcagccgaggacgcaggcgagtacacctgcctcgcaggcaattccatcggcctctcctaccagtctgcctggctcacggtgctgccaggtactgggcgcatcccccacctcacatgtgacagcctgactccagcaggcagaaccaagtctcccactttgcagttctccctggagtcaggctcttccggcaagtcaagctcatccctggtacgaggcgtgcgtctctcctccagcggccccgccttgctcgccggcctcgtgagtctagatctacctctcgacccactatgggagttcccccgggacaggctggtgcttgggaagcccctaggcgagggctgctttggccaggtagtacgtgcagaggcctttggcatggaccctgcccggcctgaccaagccagcactgtggccgtcaagatgctcaaagacaacgcctctgacaaggacctggccgacctggtctcggagatggaggtgatgaagctgatcggccgacacaagaacatcatcaacctgcttggtgtctgcacccaggaagggcccctgtacgtgatcgtggagtgcgccgccaagggaaacctgcgggagttcctgcgggcccggcgccccccaggccccgacctcagccccgacggtcctcggagcagtgaggggccgctctccttcccagtcctggtctcctgcgcctaccaggtggcccgaggcatgcagtatctggagtcccggaagtgtatccaccgggacctggctgcccgcaatgtgctggtgactgaggacaatgtgatgaagattgctgactttgggctggcccgcggcgtccaccacattgactactataagaaaaccagcaacggccgcctgcctgtgaagtggatggcgcccgaggccttgtttgaccgggtgtacacacaccagagtgacgtgtggtcttttgggatcctgctatgggagatcttcaccctcgggggctccccgtatcctggcatcccggtggaggagctgttctcgctgctgcgggagggacatcggatggaccgacccccacactgccccccagagctgtacgggctgatgcgtgagtgctggcacgcagcgccctcccagaggcctaccttcaagcagctggtggaggcgctggacaaggtcctgctggccgtctctgaggagtacctcgacctccgcctgaccttcggaccctattccccctctggtggggacgccagcagcacctgctcctccagcgattctgtcttcagccacgaccccctgccattgggatccagctccttccccttcgggtctggggtgcagacatgagcaaggctcaaggctgtgcaggcacataggctggtggccttgggccttggggctcagccacagcctgacacagtgctcgaccttgatagcatggggcccctggcccagagttgctgtgccgtgtccaagggccgtgcccttgcccttggagctgccgtgcctgtgtcctgatggcccaaatgtcagggttctgctcggcttcttggaccttggcgcttagtccccatcccgggtttggctgagcctggctggagagctgctatgctaaacctcctgcctcccaataccagcaggaggttctgggcctctgaaccccctttccccacacctccccctgctgctgctgccccagcgtcttgacgggagcattggcccctgagcccagagaagctggaagcctgccgaaaacaggagcaaatggcgttttataaattatttttttg

SEQ ID NO: 255 - DNA, 1680 bp, Artificial
  cDNA Sequence
gagctagcatcaccctgagaaagcaggctggccccaggactcacgggcgtccatgcagctgatggaggggagctggaccggacgactgtgctctcttagctctagcatcaccctgagaaagcagcctgtctccgggactcacgggcatccatgcggctgatggagggagctgggccggacgactgtgcttctcgtgcttcatgtagaacccttaggtttgcccctgaagtctgtctgctccatgtactatttagttgcttttcagcatagagcttggttttccctttttttaattgtaagaatgatgtgctctggcatgtcacactgtgaaaggggaccagatgatggagcctggactgaaagggtgaatggggccgctcacctcagaactctccctgctttgctttgctgggagcagggagcagggcagcctgggagaggctggagttcctcaaagggcagagaagaatggccttcaggggaccacagggaggaaccatgccatgatagactcaaaaagctagattatgctaataaaaaggggaagacatctgtgacacacaggaaacagtgttcgtggccttgccatagaaggcgcagtaaaggaggaaaactccggagactccctgtgaattcttggctaagaatgcacgttatctgcagtgatctaaaaacacaaacgagaacagaagtgagtggccctacctgtgagatgcacagtgctgagcggcacccagcgctggctgcaggatgggaggctggctgccgtatgattgttcgtgggaagaaattttgtagaagttatcaagctccttaaaatgttcgtgctgtgtctgcctggacagttgcaattctgagaagcgatccttgaaaatgattctgggtatagaaaaaggtacagcacagtggtgttcttagtatggctgtttacagtcgcagaaaatgagatgctaaactgctgccctaggggattggttaagcaaactggtgcttccactccatgagataggatgcagccatttgaaatatttatgaaggttttggacagtcatttggaataatggttttgttggggctcttaacttgcaagccaatagaaaagaaatctggctaatataatcctataaattatttccctacagcccatttttaaggttcccagtaactttcagaatcaaaggagacatcggatggccaggcctcagtagtggcaaggcccaggcagttccagatccctgcagcctgccactaccccgagtctctccaggtcaccagccaggcttgggggtgatggaggaggactcggtaagggacagttcacttggcaaatgtttagggagcacctgctgtggccaggcattgccctagaggcagggaatatgatagaaattgcggcagtacaggaaggtaaggtccctgtaccgcagagctcacagtctcatgggaaggagttcttacacaggtgaggtaagtgttagggagaaactaaagccaggtaatgagagagggcagtggggctgcagaggctggggtgagccacagactactgtagacacggtagcaacgtaggtctcttaagaaagtgacacacaacgtaggcctaatcacagcactttgggaggccaaggtgggaggatcactgagaccagcctgggcaacatagagagaccctgtctctgt

SEQ ID NO: 256 - DNA, 5718 bp, Artificial
  cDNA Sequence
cggccgcggcggtagcgcggaaaacaatggggccggggcggtggggagaggccgaggcttgaggtaggcagcaagcgccggctgggggtcgggccgagcggggcaggaggaaaacccgccgccgcgcgcgagcccgctccgctgccctcgggggcatggcgcggccgtgaggcggagaggggtagccgcggggagcgaagcccgcagtgccagccggccccgagaggcccggccccgggcccggcccgtgcagcccgcggcccatggtgctgcccacctgccccatggcggagttcgcgctgccgcggcacagcgcggtcatggagcgccttcgccggcgcatcgagctgtgccggcgccaccacagcacctgcgaggcccgctacgaggccgtgtcgcccgagcgcctggagctggagcgccaacacaccttcgccctgcaccagcgctgcatccaggccaaggccaagcgcgccgggaagcacaggcagccgcccgccgccacggccccggcgcccgccgccccggccccgcgcctggacgccgctgacggccccgagcacggccgcccggccacgcatcttcatgatacagttaagaggaatcttgacagcgccacttcccctcagaatggcgatcaacagaatggctacggggacctctttcctgggcataagaagactcgccgggaggcccctctgggagttgccatctcttccaatggactgcctccagcctcccccctcggtcagtctgacaagccttctggagccgacgccctgcagtccagtgggaagcactctctggggctagactctctcaacaaaaagcgtctggctgactccagccttcacttgaatggaggcagtaaccccagtgagtcatttcctctgagcctgaataaagaactgaagcaggagcctgtcgaagacctgccttgcatgatcactgggactgtcggctccatatcgcaaagcaacctcatgccagacctcaaccttaacgagcaggagtggaaggagctcatcgaggagctgaacaggtcggtgcccgatgaagacatgaaggacctgtttaatgaggacttcgaggagaagaaggacccagagtcttctggctctgccacacaaacccccttggcacaggacattaatattaagacggaattctctccagcagcctttgagcaagaacagttaggctctccacaagtgagggccgggtctgcagggcagacctttctggggccttcctctgcccctgtgagtacagattcccccagcctagggggctcccaaaccttattccacacctctggtcagccccgggcggacaatcccagtccaaacctgatgccggcatcagcccaggcccagaacgcacaaagagcccttgcaggtgtggtattgcccagtcagggcccaggaggggcctcagagctgtcctctgcccaccagctccagcagatcgctgccaagcagaagcgcgagcagatgctccagaacccacagcaggccaccccggcaccagccccgggccagatgtccacatggcagcagacggggccctcccacagttccttagatgtcccttaccccatggagaagcctgccagcccttccagctacaagcaagacttcactaactccaaactgctcatgatgcctagtgtgaataagagttcccctcggcccggaggcccctacctccagcccagccatgtgaacctgctgagtcaccagccaccgagtaacttgaatcagaactccgcgaataaccaggggtctgtgctggactacggcaatacaaaacccctttctcattacaaagcggactgtgggcaaggcagcccggggtctggccagagcaagccagccctgatggcttatcttccccagcagctgtcccatataagtcacgagcagaactccctgtttctgatgaagccaaagccaggaaatatgcctttccgatcactggttccacctggccaggagcagaacccttccagtgtccctgtgcaagcccaggctaccagtgttgggacccagccgcctgccgtgtccgtggccagctcccacaacagctccccctatctcagcagccagcaacaggccgctgtaatgaagcagcatcagttgcttttggaccaacagaaacaaagggagcagcagcaaaagcatttacagcaacagcagttccttcagaggcaacagcaccttctcgcggaacaggagaagcaacagtttcagcgccatctgacccgcccaccaccccagtaccaagacccgacacaaggcagcttcccacagcaggttggacagttcacagggtcctctgctgccgtgcccggcatgaacaccttgggtccatccaactccagctgtcctcgagtgttccctcaggctgggaatctgatgccaatgggccctggacatgcttcagtttcctctctccccacaaactcaggccaacaggaccggggtgtggctcagttccctggctcccaaaacatgcctcagagcagcctctatggcatggcttctggcataacccagatagttgcccagcccccgccacaggccaccaatggacatgcccacattccacggcagaccaacgtgggccagaacacctccgtctcagctgcctatgggcagaactctctgggaagctctggcctctcccagcagcacaataaggggaccctgaaccctggtttaacaaagccaccggtcccaagggtgtcaccagccatgggaggccagaattcctcctggcagcatcagggaatgccgaacctcagtggccagaccccagggaacagcaacgtgagtcccttcactgcagcctccagtttccacatgcagcagcaggcccacctgaaaatgtctagcccgcaattctcccaggcagtgcccaacaggcccatggctcccatgagctcagcagctgccgtggggtccttgctacccccagtgagtgcacagcagaggaccagcgcccctgccccagcaccacccccaacagcccctcagcagggcttgcctggcctgagcccagcagggcctgagctgggggccttcagccagagccctgcctcacagatgggcggtcgggcggggctgcactgcacccaggcctaccctgtgcggaccgcgggccaggagctgccttttgcctatagcgggcagccaggtggcagtgggctctctagtgtggctggacacaccgatctgatcgactccctgctgaagaacaggacttcagaggagtggatgagtgatttggacgacctgttagggtctcagtaatggaaggatttgtagtgtttttagtgttcattcatcctatatttttattctcagattcaaagaaagagcaactactttggaccaaaagcccatggcctggggagctgggcaggtagagcccaagctccaggtgaggcctggccctgggcagggtctgtggctgcgcccctcaggccagcagttgaggtccatcgggctggccccagcccatctgctggcatcagtacctggtgttgggacagcaggatagggttctaaaggtggttttctatccaaacgaccaaaaaaccaacagtaacaccagtgaaaccccacactgtcgggcttataaaaatctgtgccatcatggtgattttatccaagactgctccacttaccccagtgctggggacaagtttctgttgaaactttagatagcagaattatttgcaatttgtagcatagaaaagattttttaaatttttttacaaaaggtttttaaacagattagggtaggtgatggtttaaatcaattaagtggcattggaaacctagggtttccttttgattaagagccttttttgtttctgctctttgtcagctttcaggggagaaggaggccactggaaaattatttccctaagtgcaggctgttgactgcgtatgccaaaaagggacaggaggcatgggatagcaggtctggtgacacagctagggtcttcctagcagctcctcctcctccctcccaaggcccccaggaatcccttcctcccatgtcctggcagcaggaccccaggctacatatggaaggtagagatgtgggggtcctgtatcctggagtattatgtctccccaccttctgcagttttctctgaacatgtatgttgcccatggtgggagcgtggtcactgtgcagttgtgcacagatgtctttcctttaccgttggcctttctgtctgcctctccttcctctctgcagcccaaatggaaaacaattatttactccattggagggaaaggaagagtcttagaattcctaagggaaccttagcataaaggttttggggaaggaggccgtaggccggcccggaggaagcaattccacttggtttgacaacttctgccactcccatgtcagatgacttgcacttcttaaagagattgctttataacactaagacatcctttctaaagattcaagtggacttgactaagctgagggtccacgaaatagaatatgacatgtgagctgtttttggaaaacgaagatggagagagcacttccccgtaacgaaagcaaagtggtaagcacagggtgagacccttttacacagaatggtggagagaaaagagaatgctgaaaagtggctcagatgcagagtgttctgtggagaaactgcagccccacttctgtttccctggagtctcccaatggatcattcaggagtgtcctatgtgagaattgagccaaggaaaatactcatgcaaccagcctgagtcgcggtgaggggacgagaggttgtacacacattggtagttattttgcaccagcagtgcctttctcactgggggtacttggaccctcagatcttcttttctaatagccatttgccaccccaagtggtatgtcggccatttctccttaaaacaccttccctacctttcccatgtactcagtttagctctcaaagaaggggtgaatcataaagccagtgaaaatttcaccctctgagggagttccccaatctgaaggggaagagggtgacctcagcggcttttctcccaaaaatcggctgaaggctggttgtggatccttgttcctctcctgaccccatctggctgctgccccgtctcccacccctgtccccggggctcgctggccctgcactccgccttagtcctggggccggcgacacagtgggggctcctcacttgctgcagtgtcatagcaataaaatgtgattcttggggtccccccagggagctgcccatggctttatttatgaacctggttttcgggagtcaggggaggagatgactttgcttctgtgcacagccccgtcttccaggagccacaactcagaagaaaagggtgctcagacttttgttatacacatttgctttgtgtaaataaatgtttacaattttatatgaaagatggaataagcgctagagcttccaactgtatattttttacttttatagattttaaaactatgatcctttatatgtgtgttttgggggagctatgataagttttatggcaaacggttggtattgttaactttttattgtcatcaaaagttcataaaagtcctattaatccccatattcttctactgcccttaactctggtatacaccaaaaagaaatctttactttccttgttttatcattataaaaataaagtattttgctagtatgg

SEQ ID NO: 257 - DNA, 668 bp, Artificial
  cDNA Sequence
ctgctcttcctctcctgggccgtcctctgagcagcagacggggctaagcgttccccagctcgccttcacacacagcccgtgccaccacaccgacggtaccatgaaggacgaggtagctctactggctgctgtcaccctcctgggagtcctgctgcaagcctacttctccctgcaggtgatctcggcgcgcagggccttccgcgtgtcgccgccgctcaccaccggcccacccgagttcgagcgcgtctaccgagcccaggtgaactgcagcgagtacttcccgctgttcctcgccacgctctgggtcgccggcatcttctttcatgaaggggcggcggccctgtgcggcctggtctacctgttcgcgcgcctccgctacttccagggctacgcgcgctccgcgcagctcaggctggcaccgctgtacgcgagcgcgcgcgccctctggctgctggtggcgctggctgcgctcggcctgctcgcccacttcctcccggccgcgctgcgcgccgcgctcctcggacggctccggacgctgctgccgtgggcctgagaccaaggcccccgggccgacggagccgggaaagaagagccggagcctccagctgccccggggaggggcgctcgcttccgcatcctagtctctatcattaaagttctagtgaccg

SEQ ID NO: 258 - DNA, 1386 bp, Artificial
  cDNA Sequence
gccagctcgccgctcgctatggcgtcgctcaccgtgaaggcctaccttctgggcaaggaggacgcggcgcgcgagattcgccgcttcagcttctgctgcagccccgagcctgaggcggaagccgaggctgcggcgggtccgggaccctgcgagcggctgctgagccgggtggccgccctgttccccgcgctgcggcctggcggcttccaggcgcactaccgcgatgaggacggggacttggttgccttttccagtgacgaggaattgacaatggccatgtcctacgtgaaggatgacatcttccgaatctacattaaagagaaaaaagagtgccggcgggaccaccgcccaccgtgtgctcaggaggcgccccgcaacatggtgcaccccaatgtgatctgcgatggctgcaatgggcctgtggtaggaacccgctacaagtgcagcgtctgcccagactacgacttgtgtagcgtctgcgagggaaagggcttgcaccgggggcacaccaagctcgcattccccagccccttcgggcacctgtctgagggcttctcgcacagccgctggctccggaaggtgaaacacggacacttcgggtggccaggatgggaaatgggtccaccaggaaactggagcccacgtcctcctcgtgcaggggaggcccgccctggccccacggcagaatcagcttctggtccatcggaggatccgagtgtgaatttcctgaagaacgttggggagagtgtggcagctgcccttagccctctgggcattgaagttgatatcgatgtggagcacggagggaaaagaagccgcctgacccccgtctctccagagagttccagcacagaggagaagagcagctcacagccaagcagctgctgctctgaccccagcaagccgggtgggaatgttgagggcgccacgcagtctctggcggagcagatgaggaagatcgccttggagagccagggccatgttttgttccaggaacagatggagtcggataactgttcaggaggagatgatgactggacccatctgtcttcaaaagaagtggacccgtctacaggtgaactccagtccctacagatgccagaatccgaagggccaagctctctggacccctcccaggagggacccacagggctgaaggaagctgccttgtacccacatctcccgccaggcaacaccactcctcatggcttccttactgtttcggcagaggctgacccgcggctgattgagtccctctcccagatgctgtccatgggcttctctgatgaaggcggctggctcaccaggctcctgcagaccaagaactatgacatcggagcggctctggacaccatccagtattcaaagcatcccccgccgttgtga

SEQ ID NO: 259 - DNA, 2348 bp, Artificial
  cDNA Sequence
cctgcctctgcccttctgagcctgttcctcttccctgagtacagggcacaaagcttgcgccctgaggggcggccggcgcgctccctggcccggtccccgcccggccccgggccccccgcccctccccgacccggggccggggcccctgccgccgccgccgccgccttccgacccctgcgccccggccccggtcccccgggccatgcagcctcggccccgcgggcgcccgccgcgcacccgaggagatgaggctccgcaatggcaccttcctgacgctgctgctcttctgcctgtgcgccttcctctcgctgtcctggtacgcggcactcagcggccagaaaggcgacgttgtggacgtttaccagcgggagttcctggcgctgcgcgatcggttgcacgcagctgagcaggagagcctcaagcgctccaaggagctcaacctggtgctggacgagatcaagagggccgtgtcagaaaggcaggcgctgcgagacggagacggcaatcgcacctggggccgcctaacagaggacccccgattgaagccgtggaacggctcacaccggcacgtgctgcacctgcccaccgtcttccatcacctgccacacctgctggccaaggagagcagtctgcagcccgcggtgcgcgtgggccagggccgcaccggagtgtcggtggtgatgggcatcccgagcgtgcggcgcgaggtgcactcgtacctgactgacactctgcactcgctcatctccgagctgagcccgcaggagaaggaggactcggtcatcgtggtgctgatcgccgaggcgaggtgcttggtctccccacagactgactcacagtacacttcggcagtgacagagaacatcaaggccttgttccccacggagatccattctgggctcctggaggtcatctcaccctccccccacttctaccctgacttctcccgcctccgagagtcctttggggaccccaaggagagagtcaggtggaggaccaaacagaacctcgattactgcttcctcatgatgtacgcgcagtccaaaggcatctactacgtgcagctggaggatgacatcgtggccaagcccaactacctgagcaccatgaagaactttgcactgcagcagccttcagaggactggatgatcctggagttctcccagctgggcttcattggtaagatgttcaagtcgctggacctgagcctgattgtagagttcattctcatgttctaccgggacaagcccatcgactggctcctggaccatattctgtgggtgaaagtctgcaaccccgagaaggatgcgaagcactgtgaccggcagaaagccaacctgcggatccgcttcaaaccgtccctcttccagcacgtgggcactcactcctcgctggctggcaagatccagaaactgaaggacaaagactttggaaagcaggcgctgcggaaggagcatgtgaacccgccagcagaggtgagcacgagcctgaagacataccagcacttcaccctggagaaagcctacctgcgcgaggacttcttctgggccttcacccctgccgcgggggacttcatccgcttccgcttcttccaacctctaagactggagcggttcttcttccgcagtgggaacatcgagcacccggaggacaagctcttcaacacgtctgtggaggtgctgcccttcgacaaccctcagtcagacaaggaggccctgcaggagggccgcaccgccaccctccggtaccctcggagccccgacggctacctccagatcggctccttctacaagggagtggcagagggagaggtggacccagccttcggccctctggaagcactgcgcctctcgatccagacggactcccctgtgtgggtgattctgagcgagatcttcctgaaaaaggccgactaagctgcgggcttctgagggtaccctgtggccagccctgaagcccacatttctgggggtgtcgtcactgccgtccccggagggccagatacggccccgcccaaagggttctgcctggcgtcgggcttgggccggcctggggtccgccgctggcccggaggccctaggagctggtgctgcccccgcccgccgggccgcggaggaggcaggcggcccccacactgtgcctgaggcccggaaccgttcgcacccggcctgccccagtcaggccgttttagaagagcttttacttgggcgcccgccgtctctggcgcgaacactggaatgcatatactactttatgtgctgtgttttttattcttggatacatttgattttttcacgtaagtccacatatacttctataagagcgtgacttgtaataaagggttaatg

SEQ ID NO: 260 - DNA, 1041 bp, Artificial
  cDNA Sequence
atggcgtcgcttcagcgttctcgggtgctacgctgctgcagctgccgcctcttccaggcgcaccaggtaaaaaagagtgtcaagtggacatgcaaagcttgtggagagaagcagtcctttttgcaggcttatggtgaaggctctggtgctgattgtagacgccatgtccaaaagttaaatctactacagggacaagtttcagagctgccactcaggtctctagaagaaactgtcagtgccagtgaagaagaaaacgtgggacaccagcaggctgggaatgtgaagcagcaggaaaaatcgcagccctcagagagtcgctggctgaagtatctagaaaaggactcccaagaactggagctggaaggaacaggagtgtgtttcagcaaacagccttcatccaaaatggaggagccaggcccccgcttcagtcaagacctgcctagaaaaagaaccagaggcccagccaaggcccaggcagggcaggcggtcctcctgggccctggcattgttcttacacatggagggcatggccatcttctctttcagggacaggctggcctgacatggaaggtgaaacaaggcagcagcccctgcctccaggagaactctgcagactgcagtgccggggagctgaggggtcctgggaaggagctatggagtcccatccagcaggttacagccacatcctctaaatgggcgcaatttgtcctgccacctagaaaaagttcacatgtggacagtgagcagccaaggtctcttcagagggaccccaggccagctggtccagcacaggctaagcaagggacccccagagcacaggcctcaagagaaggcctcagcaggcccactgccgctgtccagcttcctcgggccacacaccccgtcacatctgggtctgagaggccttgcgggaagacctcatgggacgcaaggactccctgggcagagggtgggcccctggtcctggaggcacagaatcctcgacccacacgactatgtgacctctttataactggggaagacttcgatgatgatgtgtga

SEQ ID NO: 261 - DNA, 987 bp, Artificial
  cDNA Sequence
cgtcgcttcagcgttctcgggtgctacgctgctgcagctgccgcctcttccaggcgcaccaggtaaaaaagagtgtcaagtggacatgcaaagcttgtggagagaagcagtcctttttgcaggaaaaatcgcagccctcagagagtcgctggctgaagtatctagaaaaggactcccaagaactggagctggaaggaacaggagtgtgtttcagcaaacagccttcatccaaaatggaggagccaggcccccgcttcagtcaagacctgcctagaaaaaggaagtggagcaggagcaccgtccagcctccgtgcagccgtggcgtgcaggactcgggtggctctgaggtcgcctggggaccccagaagggacaggctggcctgacatggaaggtgaaacaaggcagcagcccctgcctccaggagaactctgcagactgcagtgccggggagctgaggggtcctgggaaggagctatggagtcccatccagcaggttacagccacatcctctaaatgggcgcaatttgtcctgccacctagaaaaagttcacatgtggacagtgagcagccaaggtctcttcagagggaccccaggccagctggtccagcacaggctaagcaagggacccccagagcacaggcctcaagagaaggcctcagcaggcccactgccgctgtccagcttcctcgggccacacaccccgtcacatctgggtctgagaggccttgcgggaagacctcatgggacgcaaggactccctgggcagagggtgggcccctggtcctggaggcacagaatcctcgacccacacgactatgtgacctctttataactggggaagacttcgatgatgatgtgtgatctgggactggcaggttattaatcgagatacacttgttaggagggacagggttcccctaaggcacttttaaagatactctgtaagaaccattaacaataaacttactgtcaatcatttctctct

SEQ ID NO: 262 - DNA, 570 bp, Artificial
  cDNA Sequence
ctctctgcttcctcctggctgcctcccccttcccctaccaggtgggctctgtggttcttcaagaatgaccgcagccgggcctggcaggacaacctgcacctggtcaccaaggtggacactgtggaggacttctgggcgctatacagtcacatccagctggccagcaagctctcctctggctgtgactacgccctcttcaaggatggcatccagcccatgtgggaggacagcaggaataaacggggtggccgctggctggtcagcctggccaagcagcagcgccacattgagctggaccggctgtggctggagacgctgctgtgtctgatcggggagagctttgaggaacacagcagagaggtatgtggggccgtcgtcaacatccgcaccaagggggacaagatcgctgtgtggacgagggaggcggaaaaccaggcgggcgtgctgcacgttgggcgtgtatacaaagagcgcctgggcctctccccaaagaccatcattgggtaccaggcccatgcagacacagccaccaagagcaactccctagccaagaacaagtttgtggtgtga

SEQ ID NO: 263 - DNA, 1181 bp, Artificial
  cDNA Sequence
cgtgtacaggcgggtcctggatattcgcgccgaacccagcactccggttcgacggggctgcagtttgcagggcccggataaccgaggcagtggcccctcccgcgtccccaggtttcaaggacgctaggactctccgcggccctgaggcttcgcactggggagtggggccgccaggatggacgtgttcatgaagggcctgtccatggccaaggagggcgttgtggcagccgcggagaaaaccaagcagggggtcaccgaggcggcggagaagaccaaggagggcgtcctctacgtcggaagcaagacccgagaaggtgtggtacaaggtgtggcttcagtggctgaaaaaaccaaggaacaggcctcacatctgggaggagctgtgttctctggggcagggaacatcgcagcagccacaggactggtgaagagggaggaattccctactgatctgaagccagaggaagtggcccaggaagctgctgaagaaccactgattgagcccctgatggagccagaaggggagagttatgaggacccaccccaggaggaatatcaggagtatgagccagaggcgtaggggcccaggagagcccccaccagcagcacaattctgtccctgtccctgccccgccccccagagccagggctgtccttagactccttctccccaatcacgagatcttccttccgctctgaggcaaccccctcggagcctgtgttagtgtctgtccatctgtctgtcctacccgcccgcgtccaaccccggggcatggacagggccagggttgcggtcgcggctgggagcctcgcccctccagtgttgcctcctcccatccagcgtctgcgcggatgtagcatgttctatgtgtttttaaacgaagatccgagcgacggctcctccccgatccccgacagtggctctccaagcggcccccgggcagccccagagcaccccgcccgactcccattaacctcgagaacctttttttttttaaccaaaaccaggagccaggctgtgccatgtcccccgccccccatcccagccggcccggtccgaacgcgggcgtcgtgtgttgtgattgtggcatggagagtccccatcccccccatgtgagcgtgtcccgggcgggtgggcccggccgcccccgagagtccatgaataaagctaatctgtctgt

SEQ ID NO: 264 - DNA, 4206 bp, Artificial
  cDNA Sequence
acggcggcgccgagtctgcgggtcctcccgccagcccggccggaggcagccgaggccgctcgggcggcggcggcggcggcggcgggagccggagcgcatctcgcccaggagccggagcagcggcactgcctgaaccagacagcagccttgggtgcaggcgtggtcatgagggcagatggacactgctgaagacccggcctggctccagctgcttcaaaaggattccagccccccaggaccccgacccacagccttcttctgcccacaggatgggagcctgggggctggcagctcggctatgagggattactgcccctcccagcaaaaggcaagccctgcaccccccaggcacacccctgaccaaagcccaggcatggagtctagacacagaagccccagtggggctggggaaggggcctcctgctctgacggccccagagggagcctggcctgcccctccccaacctgcttctctccccaggagtcaccctccaaggagacattggaggcacatggagcctccatctcagggacaccagaagccaccacgtctgggaagccagagcctgtgtcctccgtgaaaactgagcccaaatcctcagatgacagaaatcccatgttcttagagaagatggatttcaagtcctcaaagcaggccgattccacttccataggaaaggaggatcctgggtcctcacggaaggcagatcccatgtttacaggaaaggcagagcctgaaatcttgggaaagggggatcctgtggctcctggaaggatggatcccatgactgtaagaaaggaagatcttggatccctgggaaaagtagatcctttgtgctccagcaagacgtatacagtgtcaccgaggaaggaggatcctgggtctttgagaaaggtggatcctgtgtcctcagacaaagtggaccctgtattcccaagaaaggaggagcccaggtattcaggaaaagagcatcctgtgtcctcagaaaaggtcgctcctacatctgcagaaaaggtagatcttgtattgtcgggaaagagagatcctgggccctcgggaaaggcagatcccatgcccttggaaagcatggattctgcgtccacaggaaagacagagccggggctcctgggcaagctgattccaggctcatcaggcaagaatgggcctgtatcctctgggaccggggctcctgggtccttgggaaggctggatcccacatgcttggggatggcagatcccgcatctgtgggaaatgtagaaactgtgcctgccacaaaagaggactcccggttcctgggaaagatggaccctgcctcctcaggagaggggcgtcctgtgtctggccacacggatactacggcttcagcaaagacagatctcacatctttgaaaaatgtggatcccatgtcttcaggcaaggtggatccagtttctctgggaaagatggaccccatgtgctcaggaaagccagagctcttgtctcctggacaggcagagcgtgtgtctgtgggaaaggcaggaactgtatccccaggaaaagaggacccggtgtcctccagaagggaggaccccatatctgctggaagtagaaagacatcatctgaaaaagtgaatcctgagtcttcaggaaagacaaaccctgtgtcttcaggtccaggcgatcccaggtccttggggacagcaggtcccccatctgcagtaaaggctgagccagcgacggggggaaaaggagatcccctgtcctcggagaaggcaggtctggtggcctctggaaaggcggctcccacagcctcagggaaggccgagcccctcgcggtgggcaaggaggaccctgtgagcaagggaaaggcagacgctggcccctctggacaaggggactctgtgtctataggtaaagtggtctcaactccaggaaaaacagtcccggtgccctcggggaaggtggatcccgtgtccctgggaaaagcagaagctatcccagagggaaaagtgggttctctgcctctagagaaggggagtcctgttaccaccacaaaggcggatcccagggcctcggggaaagcacagccgcagtctggtggcaaagcagaaacaaagctccctgggcaagagggcgctgcagcaccaggggaagcaggggctgtgtgtttgaaaaaggagacaccacaggcctcagagaaggtggatcctggatcctgcagaaaagcagagccccttgcctcagggaagggagagcctgtgtccctggggaaagccgactctgcaccttccagaaaaacggagtccccatccttggggaaggtggtccccctgagtctggagaagaccaagccgtcctcctcctccaggcagttagaccgcaaagccctcggctcagcccggtctcccgagggtgccaggggcagtgaaggccgcgtggagccgaaggccgagcccgtgtccagcaccgaggcctccagtctcggccagaaagacctggaagccgctggggccgagagaagcccctgcccagaggccgcagcgcccccgccggggccgcggactcgcgacaacttcaccaaggcgccgtcgtgggaggcgagcgccccgccgccgccgcgcgaggacgcgggcactcaggcgggcgcgcaggcctgcgtctcagtggccgtgagccccatgtctccgcaggacggcgctgggggctcggccttcagcttccaggcggcgccgcgcgcgcccagcccgccctcgcgccgagatgcgggcctgcaggtgtcgctgggcgccgccgagacgcgctccgtggccactgggcccatgacacctcaagccgccgcgccgcccgccttccccgaagtgcgggtgcggcccggctcagcgctggcggccgctgtagcgcccccggagccggctgagcccgtgcgagacgtgagctgggacgagaagggcatgacgtgggaggtatacggcgccgccatggaggtggaggtgctgggcatggccatccagaagcatctggagcgacagatcgaggagcacggccgccaaggggcgcccgcgccgccgcccgccgcccgtgccggccccggccgttcgggctcggtgcgcaccgcgcccccagatggcgccgccaagcgtccgcccggcctgttccgcgcgctgctgcagagtgtgcgccggccgcggtgctgctcgcgggcgggacccacggccgagtgatctgcccccattttgtacgcccgagtttccgaccttctcaggctcccttcttgatcacaggcccctagaaggggtcccctctgcgtgccacaggcctccgaggggttgtgcagcctctagggctgttgcgtccccgtctttccagcccctcccatcacaaatacagaagaaccccttctaccaagctccctcgtggccacgaggccacgaacccggccagccctgacgccccactgtcccctcacagccctcagctctactcccggtcacactgggcgaccacgggggcctgctcagcaccctcacctcccaccccctgagagctggggcaggctcctgagatgtctagactggtgcgttgtggtctccggtggggccagatccccagaacagggagagactgcatacaagtctgagtggcagaagcttcaagtgggtgaggatcggtgtgtgagacccgcgagtgggcacgtctctgaatgtgaggtctcgggcagcacgtgaggtagaacgagtgtgagcgtctccacgcagtggctggccccgtggccggggcgtctcttgcatgctgttggtggtccttccccagttcctatctcccacccgcctggttccagccccatcccctctcccactgagtcacaggtttgagattcccagagaggccaaagacagctacaggaagtaccctgggggctcagctgagagagagtcacagaaaggccagagggtctcaggaaggtctggaggtcacagctgggctcacagaagctcttgggccctggcatcctgggtgaccggtgttcttgggtattggggacaggacagagagctcattctataaccacagttgtcttttaaaggccaccctctccagccccttgtcccccctgtgctgtgagcccaagtcccttgtgaccactcagtgtcccgtccccacccctccagccgcagtttttggctacaaactgtcacagtatacattggtaataaaatatttcccc

SEQ ID NO: 265 - DNA, 2436 bp, Artificial
  cDNA Sequence
gggcagatggacactgctgaagacccggcctggctccagctgcttcaaaaggattccagccccccaggaccccgacccacagccttcttctgcccacaggatgggagcctgggggctggcagctcggctatgagggattactgcccctcccagcaaaaggcaagccctgcaccccccaggcacacccctgaccaaagcccaggcatggagtctagacacagaagccccagtggggctggggaaggggcctcctgctctgacggccccagagggagcctggcctgcccctccccaacctgcttctctccccaggagtcaccctccaaggagacattggaggcacatggagcctccatctcagggacaccagaagccaccacgtctgggaagccagagcctgtgtcctccgtgaaaactgagcccaaatcctcagatgacagaaatcccatgttcttagagaagatggatttcaagtcctcaaagcaggccgattccacttccataggaaaggaggatcctgggtcctcacggaaggcagatcccatgtttacaggaaaggcagagcctgaaatcttgggaaagggggatcctgtggctcctggaaggatggatcccatgactgtaagaaaggaagatcttggatccctgggaaaagtagatcctttgtgctccagcaagacgtatacagtgtcaccgaggaaggaggatcctgggtctttgagaaaggtggatcctgtgtcctcagacaaagtggaccctgtattcccaagaaaggaggagcccaggtattcaggaaaagagcatcctgtgtcctcagaaaaggtcgctcctacatctgcagaaaaggtagatcttgtattgtcgggaaagagagatcctgggccctcgggaaaggcagatcccatgcccttggaaagcatggattctgcgtccacaggaaagacagagccggggctcctgggcaagctgattccaggctcatcaggcaagaatgggcctgtatcctctgggaccggggctcctgggtccttgggaaggctggatcccacatgcttggggatggcagatcccgcatctgtgggaaatgtagaaactgtgcctgccacaaaagaggactcccggttcctgggaaagatggaccctgcctcctcaggagaggggcgtcctgtgtctggccacacggatactacggcttcagcaaagacagatctcacatctttgaaaaatgtggatcccatgtcttcaggcaaggtggatccagtttctctgggaaagatggaccccatgtgctcaggaaagccagagctcttgtctcctggacaggcagagcgtgtgtctgtgggaaaggcaggaactgtatccccaggaaaagaggacccggtgtcctccagaagggaggaccccatatctgctggaagtagaaagacatcatctgaaaaagtgaatcctgagtcttcaggaaagacaaaccctgtgtcttcaggtccaggcgatcccaggtccttggggacagcaggtcccccatctgcagtaaaggctgagccagcgacggggggaaaaggagatcccctgtcctcggagaaggcaggtctggtggcctctggaaaggcggctcccacagcctcagggaaggccgagcccctcgcggtgggcaaggaggaccctgtgagcaagggaaaggcagacgctggcccctctggacaaggggactctgtgtctataggtaaagtggtctcaactccaggaaaaacagtcccggtgccctcggggaaggtggatcccgtgtccctgggaaaagcagaagctatcccagagggaaaagtgggttctctgcctctagagaaggggagtcctgttaccaccacaaaggcggatcccagggcctcggggaaagcacagccgcagtctggtggcaaagcagaaacaaagctccctgggcaagagggcgctgcagcaccaggggaagcaggggctgtgtgtttgaaaaaggagacaccacaggcctcagagaaggtggatcctggatcctgcagaaaagcagagccccttgcctcagggaagggagagcctgtgtccctggggaaagccgactctgcaccttccagaaaaacggagtccccatccttggggaaggtggtccccctgagtctggagaagaccaagccgtcctcctcctccaggcagttagaccgcaaagccctcggctcagcccggtctcccgagggtgccaggggcagtgaaggccgcgtggagccgaaggccgagcccgtatggcgccgccaagcgtccgcccggcctgttccgcgcgctgctgcagagtgtgcgccggccgcggtgctgctcgcgggcgggacccacggccgagtgatctgcccccattttgtacgcccgagtttccgaccttctcaggctcccttcttgatcacaggcccctag

SEQ ID NO: 266 - DNA, 3990 bp, Artificial
  cDNA Sequence
gcctccgtggcgaaggggacacaggtccctgcggatgtgatggcccagctatggctgtcctgcttcctccttcctgccctcgtggtgtctgtggcagccaacgtggccccgaagttcctagccaacatgacgtcagtgatcctgcctgaggacctgcctgtgggtgcccaggccttctggttggtagcggaagaccaggacaatgaccctctgacctatgggatgagcggccccaatgcctacttcttcgctgtcactccgaaaactggggaagtgaagctggccagcgctctggactacgagacactctacacattcaaagtcaccatctccgtgagcgacccctacatccaggtgcagagggagatgctggtgattgtggaagatagaaacgacaacgcacccgttttccagaacaccgctttctccaccagcatcaacgagaccctgcccgtgggcagtgtggtgttctccgtgctggccgtggataaagacatggggtctgcaggcatggtcgtgtactccatagagaaggtcatccctagcactggggacagcgagcatctcttccggatcctggccaatggctccatagtcctcaatggcagcctcagctacaacaacaagagcgctttctaccagctggagctgaaggcctgtgacttgggcggcatgtaccacaacaccttcaccatccagtgctccctgcctgtcttcctgtccatctccgtggtggaccagcctgaccttgacccccagtttgtcagggagttttactcggcctctgtggctgaggatgcagccaagggaacctcggtgctgacggtggaggctgtggatggcgacaaaggcatcaatgaccctgtgatctacagcatctcctactccacgcggcccggctggtttgacatcggggcagatggggtgatcagggtcaacggctccctggaccgtgagcagctgctggaggcggatgaggaggtgcagctgcaggtcacggccaccgagacacacctcaacatctacgggcaggaggccaaggtgagcatctgggtgacagtgagagtgatggacgtcaatgaccacaaacctgagttttacaactgcagcctcccagcctgcaccttcacccccgaagaggcccaagtgaacttcactggctacgtggacgagcatgcctccccccgcatccccatcgatgacctcaccatggtggtctacgacccggacaaggcaggcggcagcaatggcaccttcctgttgtcgctggggggccccgatgcagaagccttcagcgtctccccggagcgggcagtgggctcagcctccgttcaggtgctggtgagagtatccgcgctggtggactacgagaggcagacggcgatggcggtgcaggttgtggccacagactccgtcagccagaacttctccgtcgccatggtgaccatccaccttagagacattaatgaccacaggcccacgtttccccagagcttgtacgtcctcacggtgccagagcacagcgccaccggctctgtggtcaccgacagcatccacgccacggacccagacacgggcgcgtggggccaaattacctacagcctgctcccaggaaatggggcagacctcttccaagtggatcccgtctcagggacggtgacggtgaggaacggtgagctgctggaccgggagagccaggccgtgtactacctgacgctgcaggccacagacggcgggaacctgtcctcctccaccacactgcagatccacctgctggacatcaacgacaatgcacccgtggttagcggctcctacaacatcttcgtccaggaggaggagggcaatgtctccgtgaccatccaggcccacgacaatgatgagccgggcaccaacaacagccgtctgctcttcaacctgctgcctggcccctacagccacaacttctccttggaccctgacacagggctcctcagaaacctggggcccctggacagagaggccatcgaccccgccctggagggccgcattgtgctgacagtgcttgtgtctgactgcggcgagcctgtcctcggcaccaaagtcaatgtcaccatcactgtggaggacatcaatgataacctgcccatcttcaatcagtccagctacaactttacggtgaaggaggaggatccaggagtgctagtgggcgtggtgaaggcctgggacgcggaccagacggaagccaacaaccgcatcagcttcagcctgtcggggagtggtgccaactacttcatgatccgaggcttggtgctgggggctgggtgggctgagggctacctccggctgcccccggacgtgagcctggattacgagacacagcccgtcttcaacttgacagtgagtgctgagaacccagacccccaggggggtgagaccatagtagacgtctgcgtgaatgtgaaagacgtgaacgacaatccccccaccctggatgtagcctcactccggggcatccgtgtggctgagaatggctcacagcacggccaggtggctgtggtggttgcctcggatgtggacaccagtgcccagctggagatacagcttgtgaacattctctgcaccaaggccggggtcgatgtgggcagcctatgctggggctggttctcagtggcggccaacggctctgtgtacatcaaccagagcaaagccatcgactacgaggcctgtgacctggtcacgctggttgtgcgggcctgtgacctagccacggaccccggcttccaggcctacagcaacaatggaagcctcctcattaccattgaggacgtgaatgacaatgcaccctattttctgcctgagaataagacttttgtgatcatccctgaactcgtgctgcccaaccgggaggtggcttctgtccgggccagagacgatgattcagggaacaatggcgtcatcctgttctccatcctccgagtagacttcatctctaaggacggggccaccatccctttccagggtgtcttctcgatcttcacctcctccgaggccgacgtgttcgctgggagcattcagccggtgaccagcctcgactccactctccaaggcacctaccaagtgacagtccaggccagggacagaccttccttgggtcctttcctggaagccaccaccaccctgaatctcttcaccgtggaccagagttaccgctcgcggctgcagttctccacaccgaaggaggaggtgggcgccaacagacaggcgattaatgcggctcttacccaggcaaccaggactacagtatacattgtggacattcaggacatagattctgcagctcgggcccgacctcactcctacctcgatgcctactttgtcttccccaatgggtcagccctgacccttgatgagctgagtgtgatgatccggaatgatcaggactcgctgacgcagctgctgcagctggggctggtggtgctgggctcccaggagagccaggagtcagacctgtcgaaacagctcatcagtgtcatcataggattgggagtggctttgctgctggtccttgtgatcatgaccatggccttcgtgtgtgtgcggaagagctacaaccggaagcttcaagctatgaaggctgccaaggaggccaggaagacagcagcaggggtgatgccctcagcccctgccatcccagggactaacatgtacaacactgagcgagccaaccccatgctgaacctccccaacaaagacctgggcttggagtacctctctccctccaatgacctggactctgtcagcgtcaactccctggacgacaactctgtggatgtggacaagaacagtcaggaaatcaaggcaagatgggggatgaattggccaccacacacaccaccagagccagatccagagcccctgagcgtggtcctgttaggacggcaggcaggcgcaagtggacagctggaggggccatcctacaccaacgctggcctggacaccacggacctgtga

SEQ ID NO: 267 - DNA, 3636 bp, Artificial
  cDNA Sequence
atggatccgccggcgggagccgctcgccgcctgctctgccccgcgctgctgctgctgctgctgctgctgccgccgccgctcctgccgccgccgccgccgcccgcgaacgccaggctcgccgccgccgccgaccccccaggcgggcccctggggcacggagcggagcgcatcctggcggtgcccgtgcgcactgacgcccagggccgcttggtgtcccacgtggtgtcggcagctacgtccagagcaggggtacgagcccgcagggccgccccggtccggaccccgagcttccccggaggcaacgaggaggagcctggcagtcacctcttctacaatgtcacggtctttggccgagacctgcacctgcggctgcggcccaacgcccgcctcgtggcgcccggggccactatggagtggcagggcgagaagggcaccacccgcgtggagcccctgctcgggagctgtctctacgtcggagacgtggccggcctagccgaagcctcctctgtggcgctcagcaactgcgatgggctggctggtctgatccggatggaggaggaggagttcttcatcgaacccttggagaaggggctggcggcgcaggaggctgagcaaggccgtgtgcatgtggtgtatcgccggccacccacgtcccctcctctcggggggccacaggccctggacacaggggcctccctggacagcctggacagcctcagccgcgccctgggcgtcctagaggagcacgccaacagctcgaggcggagggcacgcaggcatgctgcggacgatgactacaacatcgaggtcctgctgggcgtggatgactctgtggtgcagttccacgggaaggagcacgtacagaagtacctgctgacactcatgaacattgtcaatgaaatctaccatgacgagtccttgggtgcccacatcaacgtggtcctggtgcggatcatcctcctgagctatggaaagtccatgagcctcatcgagatcgggaacccctctcagagcctggagaatgtctgccgctgggcctacctccagcagaagccagacacgggccacgatgaataccacgatcacgccatcttcctcacacggcaggactttgggccttccggcatgcaaggctatgctcctgtcaccggcatgtgccatccggtccgcagctgcaccctgaaccatgaggacggcttctcctcagcgtttgtggtggcccatgagactggccacgtgctgggcatggagcacgacgggcagggcaaccgctgtggcgacgaggtgcggctgggcagcatcatggcgcccctggtgcaggccgccttccaccgcttccactggtcccgctgcagccagcaggagctgagccgctacctgcactcctatgactgcctgctggatgaccccttcgcccacgactggccggcgctgccccagctcccgggactgcactactccatgaacgagcaatgccgctttgacttcggcctgggctacatgatgtgcacggcgttccggacctttgacccctgcaagcagctgtggtgcagccatcctgacaacccctacttttgcaagaccaagaaggggccccccttggacgggactatgtgtgcacctggcaagcattgttttaaaggacactgcatctggctgacacctgacatcctcaaacgggacggcagctggggcgcttggagtccgtttggctcctgctcacgtacctgtggcacgggcgtgaagttcaggacccgccagtgtgacaacccacacccggccaacgggggccgcacctgctcgggccttgcctacgacttccagctctgcagccgccaggactgccccgactccctggctgacttccgcgaggagcagtgccgccagtgggacctgtacttcgagcacggcgacgcccagcaccactggctgccccacgagcaccgggatgccaaggagagatgccacctgtactgcgagtccagggagaccggggaggtggtgtccatgaagcgcatggtgcatgacgggacgcgctgctcctacaaggacgccttcagcctctgtgtgcgcggggactgcaggaaggtgggctgtgacggtgtgatcggctccagcaagcaggaagacaagtgtggcgtgtgcggaggggacaacagccactgcaaagtggtcaagggcacgttcacacggtcacccaagaagcatggttacatcaagatgtttgagatccctgcaggagccagacacctgctcattcaggaggtagacgccaccagccaccatctggccgtcaagaacctggagacaggcaagttcatcttaaatgaagagaatgacgtggatgccagttccaaaaccttcattgccatgggcgtggagtgggagtacagagacgaggacggccgggagacgctgcagaccatgggccccctccacggcaccatcaccgttctggtcatcccggtgggagacacccgggtctcactgacgtacaaatacatgatccatgaggactcactgaatgtcgacgacaacaacgtcctggaagaggactctgtggtctacgagtgggccctgaagaagtggtctccgtgctccaagccctgtggcggagggtcccagttcaccaagtatggctgccgccggaggctggaccacaagatggtacaccgtggcttctgtgccgccctctcgaagcccaaagccatccgcagagcgtgcaacccacaggaatgctcccagccagtgtgggtcacaggcgaatgggagccatgtagccagacctgtgggcggacaggcatgcaggtgcgctccgtgcgctgcattcagccgctacacgacaacaccacccgctccgtgcacgccaagcactgcaatgacgcccggcccgagagccgccgggcctgcagccgcgagctctgccctggtcgttggcgagccgggccctggtcccagtgctcagtaacctgtggcaacggcacccaggagcggccagtgctctgccgcaccgcggacgacagcttcggcatctgccaggaggagcgtcctgagacagcgaggacctgcaggcttggcccctgtccccgaaacatctcagatccctccaagaagagctacgtagttcagtggctgtcccgcccggaccccgactcgcccatccggaagatctcgtcaaagggccactgccaaggcgacaagtcaatattctgtaggatggaagtcttgtcccgctattgctccatcccaggctacaacaagctgtgctgcaagtcctgtaacctgtacaacaacctcaccaacgtggagggcaggatagagccaccgcctgggaagcacaacgacattgacgtgttcatgcctaccctcccagtgcccactgtagccatggaggtgcggccatcaccaagcacccccctggaggtccctctcaatgcctccagcaccaatgccacagaggatcacccagaaaccaatgccgtagatgaaccctacaaaatccatggcctggaagatgaagtccagccacccaacctaatccctcgacgaccgagcccctatgaaaagaccagaaaccaaagaatccaagagctcattgatgagatgcggaagaaagagatgctcggaaagttctaa

SEQ ID NO: 268 - DNA, 1701 bp, Artificial
  cDNA Sequence
atggatccgccggcgggagccgctcgccgcctgctctgccccgcgctgctgctgctgctgctgctgctgccgccgccgctcctgccgccgccgccgccgcccgcgaacgccaggctcgccgccgccgccgaccccccaggcgggcccctggggcacggagcggagcgcatcctggcggtgcccgtgcgcactgacgcccagggccgcttggtgtcccacgtggtgtcggcagctacgtccagagcaggggtacgagcccgcagggccgccccggtccggaccccgagcttccccggaggcaacgaggaggagcctggcagtcacctcttctacaatgtcacggtctttggccgagacctgcacctgcggctgcggcccaacgcccgcctcgtggcgcccggggccactatggagtggcagggcgagaagggcaccacccgcgtggagcccctgctcgggagctgtctctacgtcggagacgtggccggcctagccgaagcctcctctgtggcgctcagcaactgcgatgggctggctggtctgatccggatggaggaggaggagttcttcatcgaacccttggagaaggggctggcggcgcaggaggctgagcaaggccgtgtgcatgtggtgtatcgccggccacccacgtcccctcctctcggggggccacaggccctggacacaggggcctccctggacagcctggacagcctcagccgcgccctgggcgtcctagaggagcacgccaacagctcgaggcggagggcacgcaggcatgctgcggacgatgactacaacatcgaggtcctgctgggcgtggatgactctgtggtgcagttccacgggaaggagcacgtacagaagtacctgctgacactcatgaacattgtcaatgaaatctaccatgacgagtccttgggtgcccacatcaacgtggtcctggtgcggatcatcctcctgagctatggaaagtccatgagcctcatcgagatcgggaacccctctcagagcctggagaatgtctgccgctgggcctacctccagcagaagccagacacgggccacgatgaataccacgatcacgccatcttcctcacacggcaggactttgggccttccggcatgcaaggctatgctcctgtcaccggcatgtgccatccggtccgcagctgcaccctgaaccatgaggacggcttctcctcagcgtttgtggtggcccatgagactggccacgtgctgggcatggagcacgacgggcagggcaaccgctgtggcgacgaggtgcggctgggcagcatcatggcgcccctggtgcaggccgccttccaccgcttccactggtcccgctgcagccagcaggagctgagccgctacctgcactcctatgactgcctgctggatgaccccttcgcccacgactggccggcgctgccccagctcccgggactgcactactccatgaacgagcaatgccgctttgacttcggcctgggctacatgatgtgcacggcgttccggacctttgacccctgcaagcagctgtggtgcagccatcctgacaacccctacttttgcaagaccaagaaggggccccccttggacgggactatgtgtgcacctggcaagttcaggccgggcgcggtggctcatgcctgttatcccagcactttgggaggccaaggtaggtggatcgcctga

SEQ ID NO: 269 - DNA, 681 bp, Artificial
  cDNA Sequence
atgggccagaatatttctcttcctgtgtataaaggggagattcaggcctggaacctgggcatggccgtggatgcgtggaatgaggaaggaaaggcggtctgggggagcagcaagctggtgtgtactaagccgatcccttgccagcccacacacttctggaacaatgagaacggcaacaagtacaggaaggcgtatttctccaaattcccaggtatcagggctcatggcgactgctgcagcatcaacccgaagaccgggggcgtcatcatgctcggctggaggcccgatcctgcactgaggggccccctgtgtgaatgtgtgccctctcctgtctccacagtggactcctttgaggaggtggaggacagcctgtatgtcccccagtataacaagtacggggaagagagggtgatcgtcttcctgaagacagcctctgggcacgccttccagcctgacttggtgaagaggatctgtgacgccatccgcgtgggcttgtctgtgcggcatgtgcccagcctcatcctggaaaccaagggcatcgcgtacacgctcagtggcaataaagtggaagttgccgtcaaacagatcatcgctcgaaaagccatggagcaacgaggtgctttctcgaaccccgaggccctgcatctgtactgggacatccctgagctgaatggcttctga

SEQ ID NO: 270 - DNA, 1407 bp, Artificial
  cDNA Sequence
atggcggcggaaggctggatttggcgttggggctggggccggcggtgcctgggaaggcctgggcttctcggccccggccctggccccactacacctctctttcttcttttgttgttggggtctgtgactgcggatataactgacggcaacagtgaacatctcaagcgggagcattcgctcattaagccctaccaaggggtcggttccagctctatgcccctctgggacttccagggcagcactatgctcacgagccagtacgtacgtctgacccctgacgagcgcagcaaagagggctctatctggaaccaccagccgtgcttcctcaaagactgggaaatgcacgtccacttcaaagtccacggcacagggaagaagaacctccatggagacggcatcgccttgtggtacacccgggaccgcctcgtgccagggcctgtgtttggaagcaaagataacttccacggcttagccatcttcctggacacctaccccaatgatgagaccactgagcgcgtgttcccgtacatctcggtgatggtgaacaatggctccctgtcctacgaccacagcaaggatgggcgctggaccgagctggcgggctgcacggctgacttccgcaaccgcgatcacgacaccttcctggctgtgcgctactcccggggccgtctgacggtgatgaccgacctggaggacaagaacgagtggaagaactgcattgacatcacgggagtgcgcctgcccaccggctactacttcggggcctccgccggcaccggcgacctgtctgacaatcatgacatcatctccatgaagctgttccagctgatggtggagcacacgcccgacgaggagagcatcgactggaccaagatcgagcccagcgtcaacttcctcaagtcgcccaaagacaacgtggacgaccccacggggaacttccgcagcgggcccctgacggggtggcgggtgttcctgctgctgctgtgcgctctcctgggcatcgttgtctgcgccgtggtgggggccgtggtgttccagaagcggcaggagcggaacaagcgcttctactgagtggcgcctccggcggggcctgtccctgggcccaggagccaatgtgaacttttttttttaccgggattataaaagaacaacaagatgaccttatttcttaactgtttcaaataaatgattaaagtattttcatacattttgcttcttgcccagcagggacaggtggcagagccgaggcttagggtctggcaccccccacagctggagacggaggctctcctggggctggtgtctcaggagcaggggtctgtgtctacagatgggctgtggcccctgcaggcagctgttgaacactggagggtcccccggaccacactggggtgggctcctgaggac

SEQ ID NO: 271 - DNA, 2373 bp, Artificial
  cDNA Sequence
ggtagtgagcggtgtttcaggatgtgagggcccgcaggagccgagtcaggctctctccactgcctgcccgccaccgtgcaagctctggccggcgctgcccacagtccccatggtgggcagcccccgcggcggggacccctgatcggcagcggcatgccagggaagcccaagcacctgggcgtccccaacgggcgcatggttctggctgtgtcagatggagagctgagcagcacgacggggccccagggccagggcgagggccgcggcagctctctcagcatccacagcctccccagtggtcccagcagccccttcccaaccgaggagcagcctgtggccagctgggccctgtccttcgagcggctgttgcaggacccgctgggcctggcttacttcactgagttcctgaagaaggagttcagcgcggaaaacgtgactttctggaaggcctgcgagcgcttccagcagatcccggccagcgatacccagcagctagctcaggaggcccgcaacatctaccaggagttcctgtccagccaggcgctgagcccagtgaacatcgaccgtcaggcctggcttggcgaggaggtgctggccgagccccggccggacatgtttcgggcacagcagcttcagatcttcaacttgatgaagttcgacagctatgcgcgcttcgtcaagtccccgctgtaccgcgagtgcctgctagccgaagccgagggacgccctctgcgggaacctggctcctcgcgcctcggcagccctgacgccacgaggaagaagccgaagctgaagcccgggaagtcgctgccgctgggtgtggaggagttggggcagctgccacccgttgagggtcctgggggccgccctctccgcaagtccttccgccgggagctgggcgggactgcaaacgccgccttgcgccgagagtctcagggctccctcaactcctccgccagcctggaccttggcttcctagccttcgtcagcagcaaatctgagagccaccggaagagccttgggagcacggagggtgaaagtgaaagccggccagggaagtactgctgtgtgtacctgcccgatggcacagcctccttggccctggccagacctggcctcaccatccgagacatgctggcagggatctgtgagaaacgaggcctctctctacctgacatcaaggtctacctggtgggcaatgaacagaaggccctggtcctggatcaggactgcaccgtgctggcggatcaggaagtgcggctggaaaacaggatcaccttcgagctggagctgacggcgctggagcgcgtggtacgaatctcagccaagcccaccaagcggctgcaggaggcgctgcagcccattctggagaagcacggcttgagcccgctagaggtggtgctgcaccggccaggcgagaaacagcctctggatctggggaagctagtgagctcggtggcggcccagagactggttttggacactcttccaggtgtgaagatctccaaagcccgtgacaaatctccctgccgcagccagggctgcccacctagaactcaggataaggccacccatccccctccagcgtcccccagttctctggtgaaggtgcccagtagtgccactggaaagcggcagacctgtgacatcgaaggcctggtggagctgctgaaccgggtgcagagcagcggggcccacgaccagaggggccttctgaggaaagaggacctggtacttccagaatttctgcagctgcccgcccaagggcccagctccgagcccaccacagaccaaatcagcagcccagcccatcgggggatccttgaactccaccaccgactcagccctctgacagctacccaacagtccaggacagctgcatggcacccggcgggccgagcatgccatgggtccgctctgcatgccctgtctgtgccatgagtgtccctggccccttcctgccatgggcaggcccgcaggaagagccggtaggggtggaaaggggactcagatgagacacaccccacagctgccaccgccttgtccctcaacaagctcacccccaatcccttgcagccaggccacaatgggggaggtgagtccagccccttggaacaggcttgcccaacatggagggatggcgttggcagtgccagcctccccagcctgtgccaagcttcaacaggggcaagaggaggggccggcccctcctcaggaagctggtatgagtaaggccttgagggtgcaggcaggcagccctgtaccccacccacatagactatactgtacatacagattttgcagtaggcttggggcagctgggtttgtccttgatgtatgatactgttattataataattattattattctgc

SEQ ID NO: 272 - DNA, 1042 bp, Artificial
  cDNA Sequence
ctccggccggcaccctaggccggcccgccgccagctgtcgccgacatggaacccttggccagcaacatccaggtcctgctgcaggcggccgagttcctggagcgccgtgagagagaggccgagcatggttatgcgtccctgtgcccgcatcgcagtccaggccccatccacaggaggaagaagcgacccccccaggctcctggcgcgcaggacagcgggcggtcagtgcacaatgaactggagaagcgcaggagggcccagttgaagcggtgcctggagcggctgaagcagcagatgcccctgggggccgactgtgcccggtacaccacgctgagcctgctgcgccgtgccaggatgcacatccagaagctggaggatcaggagcagcgggcccgacagctcaaggagaggctgcgcagcaagcagcagagcctgcagcggcagctggagcagctccgggggctggcaggggcggccgagcgggagcggctgcgggcggacagtctggactcctcaggcctctcctctgagcgctcagactcagaccaagaggagctggaggtggatgtggagagcctggtgtttgggggtgaggccgagctgctgcggggcttcgtcgccggccaggagcacagctactcgcacggcggcggcgcctggctatgatgttcctcacccagggcgggcctctgccctctactcgtgccaggcccacttgccaggcaggagccctccccaagccttcagggctgctcggagtcacctgttggaatggactaaaaggacccttgtgtgggaacaggtgctccccaaacaccctgctgctggctgccaggcaggccctctggaagggaaggggcaggactcatcaggacctccctggacccctgcagggcaggcagcttgggcccgagcccaagcatttggctctgctgcccccaaggggacaggaagcctcttgggcctcttcccttcctggacaaggccccctgcctttgcctcacataaactgtacagtattttcattaaaagcctctttcat

SEQ ID NO: 273 - DNA, 2201 bp, Artificial
  cDNA Sequence
atggaacccttggccagcaacatccaggtcctgctgcaggcggccgagttcctggagcgccgtgagagagaggccgagcatggttatgcgtccctgtgcccgcatcgcagtccaggccccatccacaggaggaagaagcgacccccccaggctcctggcgcgcaggacagcgggcggtcagtgcacaatgaactggagaagcgcaggagggcccagttgaagcggtgcctggagcggctgaagcagcagatgcccctgggggccgactgtgcccggtacaccacgctgagcctgctgcgccgtgccaggatgcacatccagaagctggaggatcaggagcagcgggcccgacagctcaaggagaggctgcgcagcaagcagcagagcctgcagcggcagctggagcagctccgggggctggcaggggcggccgagcgggagcggctgcgggcggacagtctggactcctcaggcctctcctctgagcgctcagactcagaccaagtcttgcctaatgaaaacgggggaactcccaaccacagacccactggcagaggaaataatatcagttcccatcactgacactgttggccgtgccaggcagtgcacttaattctcacaacttgaggctgttctgtctccacttcacggatggtagaaatgaggctgagtgacgtgactcgcctgaggtccaaaaacagtgaagccaagattcaaaccagagccttccgactccagagctggggccaactgaattcaacaagtatttattgagtgtctattatgtgctagatactgagacacatcagagaacaaaaccaaaagccctgcccttgtcgggcttacagtctagcacttaccgccagttaacctgcaggctacctggagccccgggcaagtcaccgcacctctgtgcctcggtcctcagctgcccaatgggagaataagcagacctggctcagacatgaatcatgtgcttggtgtactgcagatgccaaactgcatccccacaacccaccacgtagacagcagacagggctggaagttgatttttaatgataaagtacaatgaagggagggcagaggggctaagcctagctgtctggggtgctgtggtggtggtagactggctacacaaactgttgctgctgctgctgcttcttggtggccgccttgctggcgaggtccttggccttctctgtagctgccagtgccgtctcctttgccttctccttggcttccttggctgtctcaacaagtgttttggaaggggcctcgcctgtcgcgaacggcaggtggctgcctttagaagatgcctgaaagaccaacctaatttccctcccccatgacaccaatctcctctgggccaggctccactaaaaaggtggtattcaccctcctcccacccccagtacagacaaggagtcccagctcagagcagggcaatgactaacccagactccacgcccgctaggctgaatgagcctctccctatgaggaatatccacatacccagaaactcaccttgcagcttagccaagatatattcaaaacccttcatagtcttggtcacgttgcttttgaaccgggcaagaccaaattcctggcatgagatgagaatgggaaggatactgagttgcccactgaccccagcccagccccaacaccgaaagcactgggtcccagagccccagcagccccaacaacactgctcacctggacagctctggagacaccaaataagctagaggagacccaggcttcccggcggatttcagtccagccactgttgtcagagttcacacagtaaacacatcgttcctccaccacctatgcagaggccaaccacaatcgtggaacagtctttcattttgccaacttgcacataaatctgactccctgtcacttttcatgaggcgaagcaatacaatgaaaatccattccttcccctgactgcacctccaagtggcactgacagaacaagaagccataaataaggtcgttttgctctcgaaaacctctcttctgactcttaaactagaaggcaaaaggtctctctcttgagatcaacaaagggccttccagcccatcctgctcctggattttgttttgtgcatctagacgcatgcagtgttttagccgccttccaccagctgcagctctggagcttcctgacagtccaaataaaaacatttgcccgg

SEQ ID NO: 274 - DNA, 1227 bp, Artificial
  cDNA Sequence
gcgcgcggccggacaactcatggcggcggcggcggcggcggcagctgcttgggcgcggtgcggtggtgactgagctacgagcctggcggcgggtgtgcgccgagccccggcccggcccggccctcgcgtgcctcccaggctccgcacccctgatgctgcgcgggtgctgagcccgcttcggccgggacgatggtgaagtatttcctgggccagagcgtgctccggagttcctgggaccaagtgttcgccgccttctggcagcggtacccgaatccctatagcaaacatgtcttgacggaagacatagtacaccgggaggtgacccctgaccagaaactgctgtcccggcgactcctgaccaagaccaacaggatgccacgctgggccgagcgactatttcctgccaatgttgctcactcggtgtacgtcctggaggactctattgtggacccacagaatcagaccatgactaccttcacctggaacatcaaccacgcccggctgatggtggtggaggaacgatgtgtttactgtgtgaactctgacaacagtggctggactgaaatccgccgggaagcctgggtctcctctagcttatttggtgtctccagagctgtccaggaatttggtcttgcccggttcaaaagcaacgtgaccaagactatgaagggttttgaatatatcttggctaagctgcaaggcgaggccccttccaaaacacttgttgagacagccaaggaagccaaggagaaggcaaaggagacggcactggcagctacagagaaggccaaggacctcgccagcaaggcggccaccaagaagcagcagcagcagcaacagtttgtgtagccagtctaccaccaccacagcaccccagacagctaggcttagcccctctgccctcccttcattgtactttatcattaaaaatcaacttccagccctgtctgctgtctacgtggtgggttgtggggatgcagtttggcatctgcagtacaccaagcacatgattcatgtctgagccaggtctgcttattctcccattgggcagctgaggaccgaggcacagaggtgcggtgacttgcccggggctccaggtagcctgcaggttaactggcggtaagtgctagactgtaagcccgacaagggcagggcttttggttttgttctctgatgtgtctcagtatctagcacataatagacactcaataaatacttgttgaattc

SEQ ID NO: 275 - DNA, 717 bp, Artificial
  cDNA Sequence
atggcggccgccgaggtcgtgaactgcatcatggaggtgtcctgtggccaggcggaaagcagcgagaagccgaacgtcgagggcatgacgtccaaagattactactttgactcctacgcccacttcggcaactccatgtttcacaaccgccacctctttaaagacaaggtggtgctggatgtgggctcggacacaagcatcctctgcatgttcgccgccaaggccgggcgcaaggtcatcggcatcgagtgttccagtagctctgattatgcggtgaagattgtcaaagccaacaagttagaccacttggtgaccatcaccaaggggaaggtggaggagatagagctcccggtggaaaaggaggtagacatctacaccgtcaaggtggaagacctgaccttcacctccccgttctgcctgcaagtgaagcagaatgactacgtgcacacccaggtggcctacttcaacatcgagtttacgcactgccacaagaggaccggagggaccggcttctccaccatacccgagtccctgtacacgcactggaagcagacggtgttctacatggaggactacctgaccttgaagacgggcgaggagatcttcggcaccatcggcatgcggcccaacgccaagaactgggaccgggacttcaccatcaacctagatttcaggggccatctgtgcgacctgtcctgctccacagactacaggatg

SEQ ID NO: 276 - DNA, 1564 bp, Artificial
  cDNA Sequence
gcgggagtcgcggcgctgcgggtaggagccgggttgcgggagaccccaggttcggttgggattcccagccagaacggagcttaagccgggcaggcgagcgaatgacggagtagcgagctgcacggcggcgtgctgcgctgttgaggacgctgtcccgcgcgctcccaggccgccccgaggcttggggtcttcgaaggataatcggcgcccggggccgaacagcgggggcacacggggcgctgccgaagtgcaaggccacggccagagctcgagcccgacgcgctgtctggagtcgtaggttggcgccgtttggggtcggggtctgaggcttgggcgctgcctgggccgagcggagatcggggtttgcctcccgtccccgctcaggaccctgacgtggctgaagcggccccgggagcatgagcgggcagcgcgtggacgtcaaggtggtgatgctgggcaaggagtacgtgggcaagactagcctggtggagcgctacgtgcacgaccgctttctggtggggccttatcagaacaccatcggggccgccttcgtggccaaggtgatgtcggtcggagaccggactgtgacattaggtatttgggacacagcaggctctgagcgctatgaggccatgagtagaatctactatcggggtgccaaggctgccatcgtctgctatgacctcacagacagcagcagctttgagcgagcaaagttctgggtgaaggaactgcgcagcctagaggagggctgccaaatctacttatgtggcaccaagagtgacctgctggaagaagaccggaggcgtcgacgtgtggacttccacgacgtccaggactatgcagacaatatcaaagctcagctctttgaaacatccagcaagacaggccagagtgtggacgagctcttccagaaagtggcagaggattacgtcagtgtggctgccttccaggtgatgacagaggacaagggcgtggatctgggccagaagccaaacccctacttctacagctgttgtcatcactgagtcagcactcacctggcctgggggaattaaaggaattccccgtaagggctggacccagctcctttctgggcttgggtagtcaaatgtctgagctaccccaggtcctcatgtcagcagagtggcgcctgcctgtgctggcccatggaacggagacagcattgggctgactgtgggcatgaggagggataaggctgatttggaccccaggcttctgccctggacagcacttgtgtctgcagattatttaagtggcttttgatctgtaaataaaatcagtgcactgtgaatcacacccagcccctttccctgctgtgtggattaggtgtcaagacacctagttctttctggggccacccggctggcctcactgcttatattaaggctcctcccaactctcattttcctttggaaaacaagacttttttccccatggttaccgctgagatactggggctgtagtagtataaaagctcacagttccttctgagtgctgaaaagagtgcatgagttgcttcgaaataaaagggtcaagcatt

SEQ ID NO: 277 - DNA, 4218 bp, Artificial
  cDNA Sequence
gccgagacctcagttcccggcggctcttgcggggcacaggtgagccctggctgcgcgcgcggcccctcctccccggcgcctcccagatgggggctccggaggtggcgcccaggctctgagctaccctaggtctgcagactagcgggcattggccagagacatggcccagccactggccttcatcctcgatgtccctgagaccccaggggaccagggccagggccccagcccctatgatgaaagcgaagtgcacgactccttccagcagctcatccaggagcagagccagtgcacggcccaggaggggctggagctgcagcagagagagcgggaggtgacaggaagtagccagcagacactctggcggcccgagggcacccagagcacggccacactccgcatcctggccagcatgcccagccgcaccattggccgcagccgaggtgccatcatctcccagtactacaaccgcacggtgcagcttcggtgcaggagcagccggcccctgctcgggaactttgtccgctccgcctggcccagcctccgcctgtacgacctggagctggaccccacggccctggaggaggaggagaagcagagcctcctggtgaaggagctccagagcctggcagtggcacagcgggaccacatgcttcgcgggatgcccttaagcctggctgagaaacgcagcctgcgagagaagagcaggaccccgagggggaagtggaggggccagccgggcagcggcggggtctgctcctgctgtggccggctcagatatgcctgcgtgctggccttgcacagcctgggcctggcgctgctctccgccctgcaggccctgatgccgtggcgctacgccctgaagcgcatcgggggccagttcggctccagcgtgctctcctacttcctctttctcaagaccctgctggctttcaatgccctcctgctgctgctgctggtggccttcatcatgggccctcaggtcgccttcccacccgccctgccgggccctgcccccgtctgcacaggcctggagctcctcacaggcgcgggttgcttcacccacaccgtcatgtactacggccactacagtaacgccacgctgaaccagccgtgtggcagccccctggatggcagccagtgcacacccagggtgggtggcctgccctacaacatgcccctggcctacctctccactgtgggcgtgagcttctttatcacctgcatcaccctggtgtacagcatggctcactctttcggggagagctaccgggtgggcagcacctctggcatccacgccatcaccgtcttctgctcctgggactacaaggtgacgcagaagcgggcctcccgcctccagcaggacaatattcgcacccggctgaaggagggtgaggacaaaatcttcttaatcaacaagcttcactccatctacgagaggaaggagagggaggagaggagcagggttgggacaaccgaggaggctgcggcaccccctgccctgctcacagatgaacaggatgcctagggggacggcgatgggcctcacgggcccgcccagcaccctgagaccacactgttgcctcccagtgaccctgctgggacaccaggacaaggaagacagtttcgcctctcgaaagccgcagctgcgcctaggctggagctggaagggtgggtgaatccggcttgggcatccccaatgaactctgccctgcctgggactctatttattctgattaaaggggttttgcaaatgggcttgtcccttggggctctgtgtctgtgaccacacccggggcctgcttcccgctgccctggggccacctccaggcgcaggtctgggtcctgggaacctcagctggagtgggggcgccctctgctggccaagccccagatggcaggggctggaccgcgccagggcttgattcgcttgctgcctttgaccagcctgaactcgcgcccaggaggggcttacacctgcacaagtgagccgagcaggcacggattgtgaccagagcgatgcgtcaaccattgggtgatgctgtagcatctactggagcaggagacaaatttagagagggacttggaggggagacatatcagttgcaaatgagttgtggggacagttgcctcccaggcataggtaaccagcacctgtgcttggaggcgaacagggcttggtgaggtggggctggccccctgcttctggctgccagcagctggctggggggtggtgatcctgggtctgactgggctgagtttgaggagcccgtgggataccgaaaaccgtaggctgtggggggtgggcacagggattcggggaccagcccgtcatgaccccgtgctccaggtctgcagggaccagcccatgacagcccagggctccaggtctgcggggaccagcccatcacagcccagggctccaggcctgcggggaccagcccgtcagcctcagttctccaggcctgcggggaccagcccgtcatgaccccagtgctccaggtctgtggggaccagcccgtcagcctgtgctccaggcctgcaggaaccagcccgtcagcctcagtgctccaggcctgcggggaccagcccgtcagcctgtgctccaggcctgcggggaccagcccgtcatgaccccagtgctccaggtctgtggggaccagcccgtcagcctgtgctccaggcctgcgggaaccagcccgtcatgaccccagtgctccaggcctgcggggaccagcccgtcatgaccccagtgctccaggtctgtggggaccagcccgtcacggcgcagggttccaggcttgtggggaccagcctgtcacagcccagggctccaggcctgcaggagctgcgcttgggattgggggaatgaacccaggtggggaaatggtcaaagagcgatgggcccagaaaagggtcagacccagatggagatgccactggctgctagcagacccccacgctgggtctagcccacccaatcccatggggatgctcctgtgctctgcagacatctgggtgctgccacaggggcccgacagagttggcatctgggtggatctgagccaagtggtgcttctgggcctcagcaagtagctggtgctgattctgggcagccaactgtggcagcatcttcaggtgcgagtgctgctgggtgaagctgcgtgggcagtccagaaagtgacgtgacagtccacagggaccgacgtagggtttccagcccctatctgtgcagatgctgtcctccaaaccatcacggtccctctctggctggggacgtgcgcctgccactgctggcttgccagcatgatcattggttgtgacctgttgagcccatcttgccagcctcacaaaggacagtactagctgcttatgacaggaaagtggaagaacttggcctggatatttctggagaattaccgtgtgtgctagtcagtctttcgtgtcaaccaggccaggctgtggggcccagtgatctcatcgagaggggccgaggtgttgctgtgatcgtgtgctgctggaatgtggtgaacacctacagtcgatttcacctaaagatcatccttgagaatgtgggtgggcctcatcctatcagctgaaagctttaagagcaaaacccgaggtgtcccagagagggaattctgccttgagacggcggcttcccactcccactggatgtccagcccgcggccccacggctgggtgagcccgtcctctcctcgtttctgtctccggacccaccgtgtggccccagaccctccagtgaggacctcccgtatttcttcagagcagcccttgcgtgctggaggcctgggcttcagtgtgtccctgggtgccctggggcatgttctgtgacctcccagctcctcgcctcatggggccgctgtatcaagtgacacagtttgtgtgctgcgtaccatgcctggcacccatttgaggtgttgcaaggaggccatgtttgctcgatgagagcagcctaagatctacaaactgttgttcgagtggatgggaacttgatgctattttcaggctgaatgacaagactccgcgatgcttctcggcctgggctgcacaacggaatctaccagggaggttttaaaaacactggtacttgctggaggtggtggcgcctgtctgtaattgcagctgctccagaggctgaggcggaggattgcttgagcccaagagtttcggtttatttgctttttcagagtcttg

SEQ ID NO: 278 - DNA, 936 bp, Artificial
  cDNA Sequence
atgggaagtttcaacaccagttttgaagatggcttcattttggtgggattctcagattggccgcaactggagcccatcctgtttgtctttatttttattttctactccctaactctctttggcaacaccatcatcatcgctctctcctggctagaccttcggctgcacacacctatgtacttctttctctctcatctgtccctcctggacctctgcttcaccaccagcaccgtgccccagctcctgatcaacctttgcggggtggaccgcaccatcacccgtggagggtgtgtggctcagctcttcatctacctagccctgggctccacagagtgtgtgctcctggtggtgatggcctttgaccgctatgctgctgtctgtcgtccactccactacatggccatcatgcacccccatctctgccagaccctggctatcgcctcctggggtgcgggtttcgtgaactctctgatccagacaggtctcgcaatggccatgcctctctgtggccatcgactgaatcacttcttctgtgagatgcctgtatttctgaagttggcttgtgcggacacagaaggaacagaggccaagatgtttgtggcccgagtcatagtcgtggctgttcctgcagcacttattctaggctcctatgtgcacattgctcatgcagtgctgagggtgaagtcaacggctgggcgcagaaaggcttttgggacttgtgggtcccacctcctagtagttttccttttttatggctcagccatctacacatatctccaatccatccacaattattctgagcgtgagggaaaatttgttgcccttttttatactataattacccccattctcaatcctctcatttatacactaagaaacaaggacgtgaagggggctctgtggaaagtactatggaggggcagggactcagggtag

SEQ ID NO: 279 - DNA, 975 bp, Artificial
  cDNA Sequence
ggaggggcctgtgaaaaaatggttaatgtgaagaaaagtaaattctatgaagctgatgtgcttcgacaagaagtagaaaatcattataagctctcttcacctgaagattccgatcgtttctggaagttctttgaagaacttgatcctgaaaagccagctgatctttctgcaagcctcggacttcagttaggtggtccttatgatatccttgctggaaaacataaaattaagaaaaattcaacaggcctgaatgttagccttcattggaggttttaccatgatcctcctgagttccagaccgtcattattggagataataaaactcagtaccacatggggtatttcagggattcttctgatgaacttcctgcatatgttggtataaatgaagcaaagaaaaagtgtacaattgttccaaatggagataatgtatttgtggcagtcaaattatttttgatgaaaaaacttaaagaagtaacgcataaaaagaaaactaatctcttgaaaaacatagatgaaaaactcgcagaagcagccagagaaatggggtcctcactggaacagacaaccacgaagatgaaagataagaaagttgtgacgaaggcctttcatggtgcaggcttggctgttccagcagataaaaatgatgttgggtacagagagctccctgaaacagatgctgacgtcaacagaatttgcaagacaatagttgaggctgcaagtgaggagagactgaaagcttttgttcccattcaggaaatgatgactttcgtgcagtttgctagtgatgaatgtaattgtgggaaggggcgtgagttgggaatggagctcttttgctgtggctcacattattttcataaagttgctgctcagcatttacctcttgcatataatctgttgaagaggaatctggaaattattgaggatcatttggcaaacagaagtaaagagaacatagagcaacttgctgcatga

SEQ ID NO: 280 - DNA, 2259 bp, Artificial
  cDNA Sequence
gcgctgggagccgggcggtcgggcggcggcggcggcggcggcggcggcggcggcggcggcgggcggcgccccggtccgcggcgccgaggctcgcaccgggagctgcccatgggccgggcccggagttccggcgcgccgggagccggcagacatgccacagacgctgagtgcctccgacatggtcaccccaggcagcctcagcccaccccccaccgagcccacagatggcgaacaggctgggcagcccctcctggatggagcgccatcctcagcctccctggaaacactgatccagcacctggtgcccacagccgactactaccccgagaaagcctacatcttcaccttcctgctgagctctcgcctcttcatcgagccccgggagctcctggcccgggtctgccacctgtgcatcgagcagcagcagctggacaagccggtgctggacaaggcccgggtccggaagttcggccccaaactgctgcagctgttggccgagtggaccgagaccttcccaagggacttccaggaagagtcgactatcgggcaccttaaggacgtcgtgggccgcatcgccccctgtgacgaggcataccggaagaggatgcatcagctcctacaggctctgcaccagaagctggcggctctgcgccaggggccagaaggtctggtgggtgccgacaagcccatctcctacaggaccaagccaccagcctccatccacagggagctccttggtgtctgcagcgacccctacacactggcccagcagctgacccacgtggaactggagcggctgcggcacatcgggcctgaggagtttgtccaggcctttgtgaacaaggaccctctggccagcacaaagccctgcttcagtgacaagaccagcaacctggaggcttatgtgaaatggttcaacaggctgtgctacctggtggcaactgagatctgcatgccagccaagaagaagcagagggcccaggtgattgagttcttcatcgacgtggcccgcgagtgcttcaacatcggcaacttcaactccctcatggccatcatctccggcatgaacatgagccctgtctccaggctgaagaagacctgggccaaagtgaggacggccaagtttttcatcctcgagcaccagatggacccaacggggaatttctgcaactacaggacagccctgcgcggggcggcccaccgctccctgacggcccacagcagccgagagaagattgtcattcctttcttcagcctgctcatcaaagacatctacttcctgaatgagggctgcgccaaccgccttcccaatggacacgtcaactttgagaaattcctggagctggccaagcaggtgggggagttcatcacctggaaacaagtggagtgtcccttcgagcaagacgccagcatcacccactacctgtacaccgcccccatcttcagtgaggatggtctttatttggcttcttacgaaagtgagagcccagagaaccaaacagaaaaagaaagatggaaagctctaagagatcttctattttggggaagacatgaaagcgctgagctgagggacgaggaagagctggagcccgcagaagccgtccacagccctgcctcagtggcccagtgggcagaggccagggagtgcctcactattttgcaaatgccgaccctgtggcctgctgcccgccccccccccccccacagtggccatacgggcacaggagaccttttatgggactttggccctggcaggacccagggcctccagacgtgcgggcggcacatgccttggggacatcctgccttcaggaccgtggggcctggtcagtctgtccatcctcggcaaggacacaacactgccccagagggtgggaccactgcaagctcgagaccttgcttggtgacatgtgccactttggccaccacccacagtctgtcaccacgtggcttgggaacttctggagccacagcaggcatcacggtgcgacgtgagatgcctgcgccagccccgagcccactggcagccactgccattccacccatggtccctcaccctgccctgccgacgagcttgtctctgcagccccaggtacccccttcctggatgctgctggccccaggagatagctttccggtgacagctgtggaacgcgtcaacaggacaaactggacacatggagttacagtgtgtacacggcagtcccgccacccagcccccttgtaaactctagtcactataaacacacccgtacgcct

SEQ ID NO: 281 - DNA, 72 bp, Artificial
  cDNA Sequence
atggggtttctccacgttggtcaggctggtcttgaactcctgacctcaggtgatccacccacctcagcctcc

SEQ ID NO: 282 - DNA, 1741 bp, Artificial
  cDNA Sequence
aagatgttccagtcaggattcaatccttgatacacagcaaagcattcctatggtaaaaaggccccataactgtaattcacatggagaagatgccacacaaaattctgagttaattaaaactcaaagaatgtttgtaggaaagaagatctatgaatgtaatcagtgcagcaaaaccttcagtcagagctcatcccttcttaagcaccagaggattcatactggggagaaaccctataagtgtaatgtatgtgggaaacacttcattgaacgatcctcccttactgtacatcaaagaattcatactggagagaaaccctataaatgtaatgaatgtgggaaagcctttagtcagagcatgaatcttactgtccatcaacgaactcacaccggagagaaaccctatcagtgtaaagagtgtggcaaagccttccataagaattcatctcttattcagcatgaaaggattcatactggagagaaaccctacaaatgtaatgaatgtggtaaagcttttacccaaagcatgaatttgacagttcatcagagaactcatacaggagaaaaaccctatgaatgtaatgaatgtggaaaagccttcagtcaaagcatgcatcttattgtacatcagagaagccatactggagaaaaaccctatgagtgtagtcaatgtggaaaagcctttagtaagagctcaactcttaccctacatcagcgaaatcacactggagaaaaaccttacaaatgtaacaaatgcgggaaatcctttagccaaagtacatatcttatagaacatcagagacttcattctggagtaaaaccttttgaatgtaacgagtgtggaaaagctttcagtaagaattcatctctaactcaacatcggagaattcacactggagagaaaccttatgagtgtatggtgtgtggaaaacatttcactggacgatcatcccttaccgtgcatcaggtcattcacactggagagaaaccttatgagtgcaatgaatgtggaaaggcattcagccagagtgcttaccttattgaacatcaaagaattcatactggtgagaaaccctatgaatgtgatcagtgtggaaaagccttcattaagaattcatcccttacagtgcatcagagaactcatacaggagagaaaccctatcagtgtaatgaatgcggaaaagccttcagccggagtacaaaccttacacgacatcaaagaactcatacgtgaggaatgttttcactggcccttacctcatgattaactcttcagtaataatcatatgagacatacaatgtagaaacctaataaatgtaatgattgtgggaatctttcagttgaagtacaatatgtcatatcagataataccactgcagagaatccatctaaaagtagagaaatcttgattcagaatgtataatttcctttatatcagaaggtttaaatagctaatataaacaatgaagagtcatgctgaagataagttctgttatatcataccgcacattctcctttggctatcagagactttacactggagagaaaaatgtgagagtgtttaactggacagcccagagacctggtatgtagtcctaatctgccactgccttggacaacttgcctacttccaccaggttatggttctttatttggtaaatgaatgattttggagttagaaatcttgtaggagctctgttagctctaaaatgctacaactctataaatataatgaatgctggg

SEQ ID NO: 283 - DNA, 69 bp, Artificial
  cDNA Sequence
gggtttcaccatgttggccaggctggtctcgaactcctgacctcaggtgatccacccacctcagcctcc

SEQ ID NO: 284 - DNA, 2300 bp, Artificial
  cDNA Sequence
attgtgttctgactgcgatgtggcgcttgcgatctctcgccgccggcagaggctcctcgaagagcgacacggggctgaccaggcacggtggtcaaagccgcagagggagagcgggagcggtcgtgaggtcgtctggggagaagggcggaggcaaagccgaggagcaggtgtgtggacccttctagcctgaggagtcctgcaggtgtgaagctccacacctgcctccatagcactttgcctgtccctaagagggctcatcggagaagaaagaatggctgtcagccacctgccaaccatggtccaggaatcggtgaccttcaaggatgtggctatactgttcacccaggaagagtgggggcagctgagccccgcccagagggccctgtacagggacgtgatgctggagaactacagcaacctggtctcactgggactcttaggacccaaaccagatacgttttcccagctagaaaaaagggaagtgtggatgccagaggacacccctggaggcttctgtcttgactggatgactatgcctgccagtaagaaatctactgtcaaggcagagattcctgaagaagaattggatcaatggacaataaaggaaagattcagtagcagtagtcactggaagtgtgctagcctgctggagtggcaatgtggaggccaggagatcagtttgcagcgagtggtactcactcaccccaacaccccatcacaggaatgtgatgaatccgggagcactatgagctcatctcttcacagtgatcaaagtcagggatttcaacctagcaaaaatgcctttgagtgtagtgagtgtggaaaagtcttctctaagagttcaactcttaataaacatcagaaaattcataatgaaaaaaatgcaaatcagaaaattcatattaaggagaaaagatatgaatgtagagaatgtgggaaagcctttcaccagagtacgcaccttatccatcaccaaagaattcacactggcgagaaaccctatgaatgtaaggaatgtggcaaggccttctcagtgagctcctcacttacgtaccatcagaaaattcatactggagagaagccttttgaatgcaacttatgtggaaaagcttttatccgaaatatacaccttgcccatcatcatagaatacatactggagagaaaccttttaaatgtaacatttgtgaaaaagcctttgtgtgcagggcacaccttaccaaacaccagaatatccacagtggagagaaaccctataaatgcaatgaatgtggaaaagcctttaatcagagtacaagtttccttcagcatcagagaattcacactggagagaaaccctttgaatgtaatgaatgtgggaaggccttcagggtgaactcttcccttactgaacatcagagaattcatactggagagaaaccttataaatgtaatgaatgtgggaaagctttcagggataattcatcctttgcacgacatcggaaaattcacactggagagaaaccttacagatgtggcttgtgtgagaaagcctttcgggaccaatcagcactagcccaacatcagagaattcatactggggaaaaaccttatacatgtaacatatgtgaaaaagccttcagtgaccattcagcccttacccaacataagagaattcatactagggaaaaaccttacaaatgtaaaatctgtgagaaagcctttatccgaagcactcacctgactcaacatcagaggattcacacaggagagaaaccctataaatgtaataaatgtgggaaagcttttaaccagactgcaaacctcattcagcatcagagacatcatattggagagaagtgatatgaatgcagtttgtatggaagacctttgagactgagtagatgaattattgaatgtgagataatccgttctagagaataactatgaaagcttgcatcaagatagtcactttatttactgagggtcaggtttcacagtgtcatggggtttgggcatttaagaatggcaaacactcggctgggcacagtggctcacgtctgtaatctttgggagcactttgggaggccgaggtgggcggatcacgaggtcaggagatcgagaccatcctggctaacagggtgaaaccccatcgctactaaaaatataaaaaattacccgggcatggtggtgggcgcctgtagtcccagctactcgggaggctgaggcaggagaatggcatgaacccgggaggcagaggttgcagtgagccgagatcgtgccactgcactccagcctgggcgacagagcaagactcagtctc

SEQ ID NO: 285 - DNA, 3294 bp, Artificial
  cDNA Sequence
atgcagctggatgggctgcaggccctctgctgggggtccttgttcaggacacagcttgtaccagtatatgtggcggtcctgccctctccccagccctgcatacctcccacctgcacagcattcacggaattctcaggcccactcgcaaaacaccacagcttccagcctttccaggtggctgctccagctggccccaggtccccaccccaacccttccatctcccatctgtgtcccaggtccatgccacacaccttctgtgccccgtccgtgtcctgggccccccttaccctccctctcttgagttactgacctccatccacagcccagctgtccttcctgccccacagataccccagatcagctatgcctccacagccccggagctcagcgactccacacgctatgacttcttctcccgggtggtgccacccgactcctaccaggcgcaggccatggtggacatcgtgagggcactgggatggaactatgtgtccacgctggcctccgagggcaactatggcgaaagtggggttgaggccttcgttcagatctcccgagaggctggtgagctgggggctccgaggcaccaaggagtctacatagtgtgggcccggggccctcagttggggcagaagcagaaagatggggggcccaggtccatgctgggccgaggttgcctggctggtgctccatgtgggcgggacctctttgttttggacgactcagccctgcctcaggcttggcggagggtgcaggccagacttcacccctgcagacccttcagccagcctacacagtcctctgcagcggtggccaggtggtctatcaagattcccagggaaccaaagccaggagagttcagcaaggtgatcaggagactcatggagacgcccaacgcccggggcatcatcatctttgccaatgaggatgacatcagccctgctcctaccaggcgggtcctggaggcagctcgccaggccaacctgaccggccacttcctgtgggtcggctcagacagctggggagccaagacctcacccatcttgagcctggaggacgtggccgttggggccatcaccatcctgcccaaaagggcctccatcgacggatttgaccagtacttcatgactcgatccctggagaacaaccgcaggaacatctggttcgccgagttctgggaagagaattttaactgcaaactgaccagctcaggtacccagtcagacgattccacccgcaaatgcacaggtgagagctgcccagggtggacaggcgaggaacgcatcggccgggactccacctacgagcaggagggcaaggtgcagtttgtgattgatgcggtgtacgccattgcccacgccctccacagcatgcaccaggcgctctgccctgggcacacaggcctgtgcccggcgatggaacccactgatgggcggatgcttctgcagtacattcgatgtccgcttcaatggctgaatcgcatcccattgtgtgaatggccccgtcgtgttcgtccattcttctgtcagtggacgctcgggttgctttcatcttgtggctatgtgaataacgctgctgtgaacgtggctgtacaagcatttcttgccaccctgctttctagtctctcgagtatctacccgggagtggaactgctgggtcatgtgtttaatcttttgaggaggctccacactgttttctgcagcggctgcagccttttcccacccaccgtgcacaagggcagcgcaggaacccctgtgatgttcaacgagaacggagatgcgcccgggcggtacgacatcttccagtaccaggcgaccaatggcagtgccagcagtggcgggtaccaggcagtgggccagtgggcagagaccctcagactggatgtgagtgtgcagaccgagccccaggtgggcatgggcccaggatcccggaggcagacgccccagcctgtgttttgtgcgtcccaggtggaggccctgcagtggtctggcgacccccacgaggtgccctcgtctctgtgcagcctgccctgcgggccgggggagcggaagaagatggtgaagggcgtcccctgctgttggcactgcgaggcctgtgacgggtaccgcttccaggtggacgagttcacatgcgaggcctgtcctggggacatgaggcccacgcccaaccacacgggctgccgccccacacctgtggtgcgcctgagctggtcctccccctgggcagccccgccgctcctcctggccgtgctgggcatcgtggccactaccacggtggtggccaccttcgtgcggtacaacaacacgcccatcgtccgggcctcgggccgagagctcagctacgtcctcctcaccggcatcttcctcatctacgccatcaccttcctcatggtggctgagcctggggccgcggtctgtgccgcccgcaggctcttcctgggcctgggcacgaccctcagctactctgccctgctcaccaagaccaaccgtatctaccgcatctttgagcagggcaagcgctcggtcacaccccctcccttcatcagccccacctcacagctggtcatcaccttcagcctcacctccctgcaggtggctgcgtcgggcctggggtcatctgtggtttgcctgcgtgggaccttaccacaccctctcttctttggagaaagaccctgggtttttcttgtggacccctcacttctactcttggatcatgtggtatgggtgaacctcacctccttaggctccagctggcactgtgatgggtctcggaacgctccgaggtgggaggagaggccaggagctgcttctcaggctcttacctttttctatggcccaggtgaggggcggggagactggcctcatgtgaaggtcatggtcgtggtgtaccagagcagtcttgtgtactacatgaagcaggcgcaggctggacgtgtgaagacagagctgctgaaggtggcacatcaccaggtggccaagtctgtccctgaagagtcccaaatcgtggtccttcatcttgtcacagctgggtatgtcgacatggccattaggactacaagagcaagcctgcacttaatgccgctgacgctagttcctggagccgcggctgaggtgaatgagactcaagtggctgcacgccttggtcctggctcaacggtaggcacataccaagtagtggtagttctcatgcgttcattacagatagacaaaaccaccaaccaactcagcttagaaacgtgcttctcagggattcaagggtttctcgccagtgtgaattctttggtgatggataag

SEQ ID NO: 286 - DNA, 6122 bp, Artificial
  cDNA Sequence
cggaggcccgggcaggccggctgagctaactccccagagccgaagtggaaggcgcgccccgagcgccttctccccaggaccccggtgtccctccccgcgccccgagcccgcgctctccttcccccgccctcagagcgctccccgcccctctgtctccccgcagcccgctagacgagccgatggcgcggccccggagagcccgggagccgctgctcgtggcgctgctgccgctggcgtggctggcgcaggcgggcctggcgcgcgcggcgggctctgtgcgcctggcgggcggcctgacgctgggcggcctgttcccggtgcacgcgcggggcgcggcgggccgggcgtgcgggcagctgaagaaggagcagggcgtgcaccggctggaggccatgctgtacgcgctggaccgcgtcaacgccgaccccgagctgctgcccggcgtgcgcctgggcgcgcggctgctggacacctgctcgcgggacacctacgcgctggagcaggcgctgagcttcgtgcaggcgctgatccgcggccgcggcgacggcgacgaggtgggcgtgcgctgcccgggaggcgtccctccgctgcgccccgcgccccccgagcgcgtcgtggccgtcgtgggcgcctcggccagctccgtctccatcatggtcgccaacgtgctgcgcctgtttgcgataccccagatcagctatgcctccacagccccggagctcagcgactccacacgctatgacttcttctcccgggtggtgccacccgactcctaccaggcgcaggccatggtggacatcgtgagggcactgggatggaactatgtgtccacgctggcctccgagggcaactatggcgaaagtggggttgaggccttcgttcagatctcccgagaggctgggggggtctgtattgcccagtctatcaagattcccagggaaccaaagccaggagagttcagcaaggtgatcaggagactcatggagacgcccaacgcccggggcatcatcatctttgccaatgaggatgacatcaggcgggtcctggaggcagctcgccaggccaacctgaccggccacttcctgtgggtcggctcagacagctggggagccaagacctcacccatcttgagcctggaggacgtggccgttggggccatcaccatcctgcccaaaagggcctccatcgacggatttgaccagtacttcatgactcgatccctggagaacaaccgcaggaacatctggttcgccgagttctgggaagagaattttaactgcaaactgaccagctcaggtacccagtcagacgattccacccgcaaatgcacaggcgaggaacgcatcggccgggactccacctacgagcaggagggcaaggtgcagtttgtgattgatgcggtgtacgccattgcccacgccctccacagcatgcaccaggcgctctgccctgggcacacaggcctgtgcccggcgatggaacccactgatgggcggatgcttctgcagtacattcgagctgtccgcttcaatggcagcgcaggaacccctgtgatgttcaacgagaacggagatgcgcccgggcggtacgacatcttccagtaccaggcgaccaatggcagtgccagcagtggcgggtaccaggcagtgggccagtgggcagagaccctcagactggatgtggaggccctgcagtggtctggcgacccccacgaggtgccctcgtctctgtgcagcctgccctgcgggccgggggagcggaagaagatggtgaagggcgtcccctgctgttggcactgcgaggcctgtgacgggtaccgcttccaggtggacgagttcacatgcgaggcctgtcctggggacatgaggcccacgcccaaccacacgggctgccgccccacacctgtggtgcgcctgagctggtcctccccctgggcagccccgccgctcctcctggccgtgctgggcatcgtggccactaccacggtggtggccaccttcgtgcggtacaacaacacgcccatcgtccgggcctcgggccgagagctcagctacgtcctcctcaccggcatcttcctcatctacgccatcaccttcctcatggtggctgagcctggggccgcggtctgtgccgcccgcaggctcttcctgggcctgggcacgaccctcagctactctgccctgctcaccaagaccaaccgtatctaccgcatctttgagcagggcaagcgctcggtcacaccccctcccttcatcagccccacctcacagctggtcatcaccttcagcctcacctccctgcaggtggtggggatgatagcatggctgggggcccggcccccacacagcgtgattgactatgaggaacagcggacggtggaccccgagcaggccagaggggtgctcaagtgcgacatgtcggatctgtctctcatcggctgcctgggctacagcctcctgctcatggtcacgtgcacagtgtacgccatcaaggcccgtggcgtgcccgagaccttcaacgaggccaagcccatcggcttcaccatgtacaccacctgcatcatctggctggcattcgtgcccatcttctttggcactgcccagtcagctgaaaagatctacatccagacaaccacgctaaccgtgtccttgagcctgagtgcctcggtgtccctcggcatgctctacgtacccaaaacctacgtcatcctcttccatccagagcagaatgtgcagaagcgaaagcggagcctcaaggccacctccacggtggcagccccacccaagggcgaggatgcagaggcccacaagtagcagggcaggtgggaacgggactgcttgctgcctctcctttcttcctcttgcctcgaggtggaagctgtatagagcccgggtccacggtgaacagtcagtggcagggagtttgccaagaccatgctccgcgtcggtggggctggccttgagaaggaactggacccagctctaccccgattccagcatgtgagcttcatgcttcctcaccacagaccagactcgcttcccatggtgggaaacagccaccgagaaggttctagctctagaaagggactaaacttattctctcatccgaagtccaaagaggatgatgaagccctgggctttgcctggtttgcgggagatttcctcccctcagtcaacccccataacctggggattgggcagtgtggaagaacgtgtagaccccagaatgaaacatggggttggagtggaggaggagctgtctcagcaagaggagacctggggctgtgcatctggatggaggcactcaggcctgggtaggattcctctggcacggagggagagaccctgggtgagacccctgtgagcatgggaagggcctgcagtgggcgcgggagtgagctgaggaactggggtgcgcccccatgagattcccaatgccatgggctttcccccatccccccgggattgggcaaggtcagacttagagtacagctgttttcctcccctctgtgtactcccttaaatcaccccaaccttggccaggcatggtggctcacacctgtaatcccagcactttgggaggccgaggcaggtggatcacctgaggtccggagttcgagaccagcctggccaatgtggtgaaaccctgtctctactaaaaatacaaaaattagccaggtgtgatggtgggtgcctgtaatcccagttacttgggaggctgaggcaggagaatcgcttgaacctgggaggtggaggttgcagtgagctgtgattgtgccactgtactccagcctgggtgacagagcgagactctgtctcaaaaaaacaaaacaaaaaaacaccaaaaaaacccccaaacctgaagaaattcagatacacgtgtgtaatgttagtgatgtgagaacaaggagcaggggtgcatttgtgttgtgttcgggttggggatgggtttaggagctccaggttgggagcagtgacagagagtcatggccgtggtgagggtgaatcccaagtggatggctcaggacgggtatggaaacccttcattcctcataggtactgggaagtccatttgcaagctgagcgccaggcctggggaggaagaggcttgggctgcagatgcacgcacatttgtttttcactgatagtttttacaaaaagcttggtttaagttatggagttttatgtccctgggagtagaatttacatttgttaaattgaccactgtttaagatcagtatacattctctagtctgtgatgtctggagctagttttgagggtgaaccacactttatccaacatacaaactttcccatgcagcttctctggtgcgcagttggttttgaccgtgggactaggtgcttctgcaggttttaagtaattaacttaaaagcttctcctctgagaaacatttctgttgcgctactgactctccttctccacatttgttgtgttcctagggcttctctatagtgcacattaggacgtttcatttgttgctgaatgctttccagaattatttattccatagggtttctctcctgtgcagctctctcatgggtaatggggcgtgttttcttgccaaaggcggttccaccctcgtgattgtatagggctcttctcctgtatgaactctgagatcagtgagctctgatctccaagggaaagttttcctgcatttgctgttttctcatgtctctcccagtgtgaattctttggcttctagctgaaaacttttccacagttttacattcatgtggttttctccactgtgaactctgtgattcagaatcagaagcagttcttagtagaggcatttctacactgattgcactgaggatttctccccagtgtgaagtttctggcatagagtcctggcttcccgcagacgactttcacactctgccatgttcatgcctgtgggcctctctggcaggaactctgatgcaccgcgaggcccatgtactcctgtggctttctcacattcggtctacttgcagggtatctccacagcatgcaccattctgggtacagggggacatcctctgttactgaagatgttgtcatatttagtaccttcacaaggtttctctccttccagaattttctgatgtacacaaataactgacttccacaagagggcttttccacactcggtgtgtgcatacagtttctgcctgtgatcatttctttatgttattattttattttttcgagatagggtcttgctcaatttcttaggctggagtgcagtggcacgatcatagctcactgaagtttcgacctgggctcaagcaatcctcccgcttcagcctcctgagtagctggtgcgcacgaccatacccagctaatgttttattttttgtagagacgaggtctcactatgttgcccaggctggtctcgaacttctgagctcgagcgatcctcctgcctccacctcccaaagtgttcggattacaaacgtgagccatcgcacctagcctctttgatcatttctgtggtgttcagtggaggttgacagctccctaaagattttcctgtttttttgcatgcatgggtttgaattctttgaggtccaatttatttggacccctgaataaagttttgtgggttttcttctatgtgtggaatttataaggcattcttccagtgtggtttctcttatgtcgagtgagagctgacctgcaccgaaggttttgtcccatttgttgcccttgaattatttgtatgaattatatgttccagtgaaaatggagttctgggttggaggcttattccatgtttacacaattaaaattgcagtgttcctctctgggatgagagctctaaagcagagtaagattacgttctgatgtaagctttaaccacctatttataaggtctcacctgtggtccactgtgttgagacttctacagaagagcttctgtatagtaaccattttcttaggctgtctcacttgtgtgaatcttctgacacatttattatagctttgtcccatttcttatcctttttgctctttagaaatttccctttaatttattacattcattgcttactgtaaagagtccaggtaactgactttattcagttacttcctgttcaataaatttaacttttccc

SEQ ID NO: 287 - DNA, 2377 bp, Artificial
  cDNA Sequence
ggtcccggggcgccgtccgcgagcggcctggactgccggagacccgcgggagggagcgcctcgccagacccaccgtgtccacactctgctctccctgggcaggaagactgaggaggaagggatggctgtggatctgctgtctgctcaggagcctgtgacattcagggatgtggccgtgttcttcagccaggacgagtggttgcacctggactctgcccagagggccttgtaccgggaggtgatgctggagaactacagcagcctggtctcactggggattccattttcaatgccaaagttgattcatcagttgcagcaaggagaagatccctgcatggtggaaagagaagtcccttcagatacccgtctaggtttcaagacttggcttgaaacagaagcattgcctcatagacaggacatttttatagaagaaacatctcagggaatggtaaagaaagaatccattaaggatggtcactgggacattaactttgaagaagctgtggaatttgagagcgagatagaagaagagcaagagaagaaacctcttagacaaatgatagattcgcatgagaaaaccatcagtgaagatggaaaccatacaagtcttgaattggggaaaagcttatttacaaatacagctcttgtcacacaacagagtgttcctatagaaaggatacccaatatgtattatacatttgggaaagattttaaacagaattttgatctcatgaaatgcttccagatttacccaggaggaaaacctcacatctgtaatgaatgtgggaagagcttcaagcagaatctgcatcttattgaacatcagagaattcatacaggtgagaaaccctacaaatgtaatgagtgtgaaaaaaccttcagccacagatcatcccttctttctcatcagagaattcatactggagagaaaccttacaagtgtaatgaatgtgagaaggcatttagcaacagttcaacccttatcaaacatctgagagtgcatactggagagaaaccgtatcgatgtagggaatgtggtaaagcctttagccagtgttcaaccctcactgtacatcagagaattcatactggagagaaactctataaatgcggcgaatgtgagaaggccttcaactgtagagcaaaacttcacaggcatcaaagaatccatacaggtgagaaaccctataaatgtagtgagtgtgggaagggatacagccagtttacatctctagctgaacatcagaggtttcatactggagaacaactgtatacatgcttggaatgtgggagaaccttcacacgtattgtaacccttatcgaacatcagcgaattcacactggacaaaaaccttatcagtgcaacgaatgtgagaaagccttcaaccagtattcatcctttaatgaacatcggaaaattcatactggggaaaaactttatacatgtgaggaatgtgggaaagcctttggttgcaaatctaacctttataggcatcagagaattcatactggagagaaaccgtatcagtgtaatcagtgtggaaaggccttcagccagtattcatttttaaccgaacatgagaggatccacactggagagaaactgtataaatgtatggaatgtgggaaagcctacagttacagatcaaacctttgtagacacaaaaaagttcacacgaaagagaaactctataagtggaaggaatatgggaaacctttcatctgcagctcctcacttacccagtatcagagattttttaaaggagataaagcctatgaggtttagttcatctctcaaataatccaagacttctcactggggaataagggaataataaatagggtacaaactcctaatagatttgtcttttttacttctcctgaaggaaatatgttagttgccactaagtcatgataaaattgatcagtgagactatgaagagcactgacttgttaaattttaaaagaaccataaattctaaggtatctaaaaacctatgagtatttaattcatagaaaaaatgtaaaaggtctttttaaaaatcatgaaaaatagttgaatatacattttgtttctctcataagaccatattccctttaaaagagtaagcttcaatatgtgaattttcttttaaaaacagtcactgagttaataatgtaaataagtgtgtggccttctttaaaatagctggctaacataggaggcacttcttttcataaagagaagctaaacataaaaaggaattttaaatttaactcttcacatggaaataataaagctctttatatgagctgtcccaccagcaacttatatatgtaaacatacatatatacacatatgcatgtgtgtgtgtaaacataaaagtcctttattatt

SEQ ID NO: 288 - DNA, 912 bp, Artificial
  cDNA Sequence
ctctaccggtgagggtttgcggggaagatggagtatcccgcgccggccacggtgcaggccgcggacggcggagcggccgggccttacagcagctcggagttgctggagggccaggagccggacggggtgcgctttgaccgcgagagggcgcgccgcctgtgggaagccgtgtccggtgcccagccggtgggtagagaggaagtggagcacatgatccagaagaaccaatgtctcttcaccaacacccagtgtaaggtttgctgcgccttgcttatttctgagtcccagaagctggcacattaccagagcaaaaaacatgccaacaaagtgaagagatacctagcaatccatggaatggagacattaaagggggaaacgaagaagctagactcagatcagaagagcagcagaagcaaagacaagaaccagtgctgccccatctgtaacatgaccttttcctcccctgtcgtggcccagtcgcactacctggggaagacccacgcaaagaacttaaagctgaagcagcagtccactaaggtggaagccttgcaccagaatagagagatgatagacccagacaagttctgcagcctctgccatgcaactttcaacgaccctgtcatggctcaacaacattatgtgggcaagaaacacagaaaacaggagaccaagctcaaactaatggcacgctatgggcggctggcggaccctgctgtcactgactttccagctggaaagggctacccctgcaaaacatgtaagatagtgctgaactccatagaacagtaccaagctcatgtcagcggcttcaaacacaagaaccagtcaccaaaaacagtggcatcatccctgggccagattccaatgcaaaggcaacccattcagaaagactcaaccaccttggaagactag

SEQ ID NO: 289 - DNA, 2513 bp, Artificial
  cDNA Sequence
cggacgcgcgcgcccctccccctccccccgcgctcccaacgtgtggcggctcgcgacccccggcaacccggagaaggtctacagagcggcctgcgccagcgaacaaaaggatgccacggagaaagaaaaaagttaaagaagtctccgaatctcggaacctggagaagaaggatgtggaaactaccagttctgtcagtgtgaagaggaagcgtagacttgaggatgcattcattgtgatatccgatagtgatggagaggaaccaaaggaggaaaatgggttgcagaaaacgaagacaaaacagtcgaatagagcaaagtgtttggccaaaagaaaaatcgcacagatgacagaagaagaacagtttgctctggctctcaaaatgagtgagcaggaagctagggaggtgaacagccaggaggaggaagaagaggagctcttgaggaaagccattgctgaaagcctgaatagttgccggccttctgatgcttccgctaccagatctcgacctctggccactggaccgtcttcccagtcccatcaagagaaaaccacagactctgggctcactgaaggcatgtctccctgcatatggcagctggtacctccatcactgtttaaaggctcacatatcagtcagggaaacgaggctgaggaaagagaggagccttgggaccacactgaaaaaactgaagaggagccggtctctggcagctcaggaagctgggaccagtcaagccagccagtgtttgagaatgtgaacgttaaatcttttgacagatgtactggccactcggctgagcacacacagtgtgggaagccacaggaaagtactgggaggggttctgcttttctcaaagctgtccagggtagcggggacacatctaggcactgtctacctaccctagcagatgccaaaggtctccaggacactgggggcactgtgaactatttctggggtattccattctgccctgatggagtagaccctaaccagtataccaaggtcattctctgccagttggaggtttatcaaaagagcctgaaaatggctcagaggcagctccttaataaaaaaggttttggggaaccagtgttacctagacctccttctctgatccagaatgaatgtggccaaggagagcaggctagtgagaaaaatgaatgcatctcagaagatatgggagatgaagacaaagaggagaggcaggagtctagggcatctgactggcactcaaaaaccaaggatttccaggaaagctcaattaaaagcttgaaagagaaacttttgttggaggaagaaccaacaaccagtcatggtcagtcttcccaagggattgttgaagaaacttctgaagagggaaactctgtacctgcttcacaaagtgttgctgctttgaccagtaagagaagcttagtccttatgccagagagttctgcagaagaaatcactgtttgtcctgagacccagctaagttcctctgaaacttttgaccttgaaagagaagtctctccaggtagcagagatatcttggatggagtcagaataataatggcagataaggaggttggtaacaaggaagatgctgagaaggaagtagctatttctaccttctcatccagtaaccaggtatcctgcccgctatgtgaccaatgctttccacccacaaagattgaacgacatgccatgtactgcaatggtctgatggaggaagatacagtattgactcggagacaaaaagaggccaagaccaagagtgacagtgggacagctgcccagacttctctagacattgacaagaatgagaagtgttacctctgtaaatccctggtcccatttagagagtatcagtgtcatgtggactcctgtctccagcttgcaaaggctgaccaaggagatggacctgaagggagtggaagagcatgttcaactgtggaggggaagtggcagcagaggctgaagaacccaaaggaaaaaggccacagtgaaggccgactccttagtttcttggaacagtctgagcacaagacttcagatgcagacatcaagtcttcagaaacaggagccttcagggtgccttcaccagggatggaagaggcaggctgcagcagagagatgcagagttctttcacacgtcgtgacttaaatgaatctcccgtcaagtcttttgtttccatttcagaagccacagattgcttagtggactttaaaaagcaagttactgtccagccaggtagtcggacacggaccaaagctggcagaggaagaaggagaaaattctgaatttctagggtccaaaagttgacaaaaccattagtaggaggggtgggccatgttcattaagccatagtggtccctagttcattgttgagcaagttttagccctgcagttttcaccaccagcacctacccagcattctggtttttatgttttttatgatctatgcagacaactgtgtattctgttttataacagtttgtttgaatttacttacagttaaaaaatttaaatat

SEQ ID NO: 290 - DNA, 1293 bp, Artificial
  cDNA Sequence
atgcttccgctaccagatctcgacctctggccactggaccgtcttcccagtcccatcaagagaaaaccacagactctgggctcactgaaggcatgtctcccttcttcccaagggattgttgaagaaacttctgaagagggaaactctgtacctgcttcacaaagtgttgctgctttgaccagtaagagaagcttagtccttatgccagagagttctgcagaagaaatcactgtttgtcctgagacccagctaagttcctctgaaacttttgaccttgaaagagaagtctctccaggtagcagagatatcttggatggagtcagaataataatggcagataaggaggttggtaacaaggaagatgctgagaaggaagtagctatttctaccttctcatccagtaaccaggtatcctgcccgctatgtgaccaatgctttccacccacaaagattgaacgacatgccatgtactgcaatggtctgatggaggaagatacagtattgactcggagacaaaaagaggccaagaccaagagtgacagtgggacagctgcccagacttctctagacattgacaagaatgagaagtgttacctctgtaaatccctggtcccatttagagagtatcagtgtcatgtggactcctgtctccagcttgcaaaggctgaccaaggagatggacctgaagggagtggaagagcatgttcaactgtggaggggaagtggcagcagaggctgaagaacccaaaggaaaaaggccacagtgaaggccgactccttagtttcttggaacagtctgagcacaagacttcagatgcagacatcaagtcttcagaaacaggagccttcagggtgccttcaccagggatggaagaggcaggctgcagcagagagatgcagagttctttcacacgtcgtgacttaaatgaatctcccgtcaagtcttttgtttccatttcagaagccacagattgcttagtggactttaaaaagcaagttactgtccagccaggtagtcggacacggaccaaagctggcagaggaagaaggagaaaattctgaatttctagggtccaaaagttgacaaaaccattagtaggaggggtgggccatgttcattaagccatagtggtccctagttcattgttgagcaagttttagccctgcagttttcaccaccagcacctacccagcattctggtttttatgttttttatgatctatgcagacaactgtgtattctgttttataacagtttgtttgaatttacttacagttaaaaaatttaaatat

SEQ ID NO: 291 - DNA, 1517 bp, Artificial
  cDNA Sequence
actgtgacctgttgctgaggtgatctgatgatataggtcttgcctttcattttaactgccattctggcaactgaacgttggcagtaaacgcagcttagttgtctcagaggactcacaatgggatgtgcttatagttgttgcctcgaagtgtgttgtggcgaggatgaaatagtgtatcctaggatgccaggggaatccaccgtctgccaccgcgagcgtgagaagccaatcacctatcactggtatcactggcatcccggccatatataccctagagttgcatcaatggaagattacgatgaggacctggtgcaggaagcttcatctgaagatgtcctgggcgttcatatggtggacaaagacacagagagagacattgagatgaaacggcaactacggcgactacgggagctccacctatacagcacatggaagaagtaccaagaggcgatgaagacatccttgggagttccacaatgtgagcgtgacgaaggctccttgggcaagccattgtgtccacccgagatactctcggagacgttgccaggctctgtgaagaaaagggtatgctttccatcagaagatcatctagaggagtttatagcagaacatctccctgaagcatccaatcagagtctcctcactgttgcccatgcagacacaggcatccaaaccaacggtgacctggaagacctggaggagcatgggccagggcagacagtctctgaggaagccacagaagttcacatgatggagggggacccagacacactggccgaacttctgatcagggatgtacttcaggagctgtccagttacaacggcgaggaggaggacccagaggaggtgaagacatccttgggagttccacaacgtggtgacctggaagacctggaggagcatgtgccagggcagacagtctctgaggaagccacaggggttcacatgatgcaggtggacccagccacgccggcaaagagtgacctggaagacctggaggagcatgtgccagggcagacagtctctgaggaagccacaggggttcacatgatgcaggtggacccagccacactggcaaagcgtacgtattctgggatcatctctttgtttaggtgtgaaatcttagtgttgtaaaggtagtgctgcttcacctgcttttgctcaagggccactctggtttgagctttctgccagaaatgagatttgggaattttggtttaaaaactactaagagtcacaccgggcacagtggctcacgcctgtaatcccagcaccttgagaggcggagacgggcggatcagcagaggtcaggagtttgagaccagcctgactgacattgagaaaccccaccgctcctaaaaatacaaaattacctgggtgtggtgtcacatgcctgcaatcccagctactcaggaggccaaggcaggagaatcacttgaaccgaggtggtagaggttgaggtgagccaaggttgtgccattgcactccagcctgggcaacgagcgaaactccgtctc

SEQ ID NO: 292 - DNA, 840 bp, Artificial
  cDNA Sequence
aaagagaatgagacaggagttggcgagttcctcttgctcagcatcaccagtgactcagagaagcagcaggccctcttctggctcttcctgtgtatgcacttagtcactgaggctggaaacacacccatcatcctgggcatcggctccaaccctcgcctgcacacccccacgtacttcttcacccatctctcctttgtcaacatctgcttcatcaccaacctgatccccaagctcctggtcaaccattgcctgactcagatgtacttcctcatctcctttgccaacgtggacacctttctgctggccatcatggcactggaccactatgtggccatctgcagcgccctgcggtactgctccatcatcacccccggctctgtcaggggctggcccctcatctccctggtccacacggtcatcatgagcagactggccttctgctcctccgcccagatttcacacttctactgtgacgcctacctgctcatgaagattgcctgctcacatacaaatcagcatgtgttcctgggggccgtggtcctgttcctggctccctgtgcgctcatcttggtctcctacatccgcattgctgcagccatcctccggattccctctcctacaagaaggcgcaaggcatgttccatatgtagctcccacctgtctctggtcaccctgttctatggaactgtcctggggatctgcatagacccccagactccttctcagcccgacaccatagcaaccatcatgtacactgtggtgacctctatgctaaaccccttcatctacagtctgatgaacaaggaggtccaggaggccgtgagaaggctcttcagtagg

SEQ ID NO: 293 - DNA, 852 bp, Artificial
  cDNA Sequence
aaagagaatgagacaggagttggcgagttcctcttgctcagcatcaccagtgactcagagaagcagcaggccctcttctggctcttcctgtgtatgcacttagtcactgaggctggaaacacacccatcatcctgggcatcggctccaaccctcgcctgcacacccccacgtacttcttcacccatctctcctttgtcaacatctgcttcatcaccaacctgatccccaagctcctggtcaaccattgcctgactcagatgtacttcctcatctcctttgccaacgtggacacctttctgctggccatcatggcactggaccactatgtggccatctgcagcgccctgcggtactgctccatcatcacccccggctctgtcaggggctggcccctcatctccctggtccacacggtcatcatgagcagactggccttctgctcctccgcccagatttcacacttctactgtgacgcctacctgctcatgaagattgcctgctcaatacatgtcaatcagcatgtgttcctgggggccgtggtcctgttcctggctccctgtgcgctcatcttggtctcctacatccgcattgctgcagccatcctccggattccctctcctacaagaaggcgcaaggcatgttccatatgtagctcccacctgtctctggtcaccctgttctatggaactgtcctggggatctatccagactccttctcagcccaggacaccatagcaaccatcatgtacactgtggtgacctctatgctaaaccccttcatctacagtctgatgaacaaggaggtccaggaggccgtgagaaggctcttcagtaggggctcacactcatca

SEQ ID NO: 294 - DNA, 834 bp, Artificial
  cDNA Sequence
aatgagacaggagttggcgagttcctcttgctcagcatcaccagtgactcagagaagcagcaggccctcttctggctcttcctgtgtatgcacttagtcactgaggctggaaacacacccatcatcctgggcatcggctccaaccctcgcctgcacacccccacgtacttcttcacccatctctcctttgtcaacatctgcttcatcaccaacctgatccccaagctcctggtcaaccattgcctgactcagatgtacttcctcatctcctttgccaacgtggacacctttctgctggccatcatggcactggaccactatgtggccatctgcagcgccctgcggtactgctccatcatcacccccggctctgtcaggggctggcccctcatctccctggtccacacggtcatcatgagcagactggccttctgctcctccgcccagatttcacacttctactgtgacgcctacctgctcatgaagattgcctgctcacatacatgtcagcatgtgttcctgggggccgtggtcctgttcctggctccctgtgcgctcatcttggtctcctacatccgcattgctgcagccatcctccggattccctctcctacaagaaggcgcaaggcatgttccatatgtagctcccacctgtctctggtcaccctgttctatggaactgtcctggggatctgcatagacccagactccttctcagcccaggacaccatagcaaccatcatgtacactgtggtgacctctatgctaaaccccttcatctacagtctgatgaacaaggaggtccaggaggccgtgagaaggctcttcagtagg

SEQ ID NO: 295 - DNA, 1779 bp, Artificial
  cDNA Sequence
atgatggaggagcgtgccaacctgatgcacatgatgaaactcagcatcaaggtgttgctccagtcggctctgagcctgggccgcagcctggatgcggaccatgcccccttgcagcagttctttgtagtgatggagcactgcctcaaacatgggctgaaagttaagaagagttttattggccaaaataaatcattctttggtcctttggagctggtggagaaactttgtccagaagcatcagatatagcgactagtgtcagaaatcttccagaattaaagacagctgtgggaagaggccgagcgtggctttatcttgcactcatgcaaaagaaactggcagattatctgaaagtgcttatagacaataaacatctcttaagcgagttctatgagcctgaggctttaatgatggaggaagaagggatggtgattgttggtctgctggtgggactcaatgttctcgatgccaatctctgcttgaaaggagaagacttggattctcaggttggagtaatagatttttccctctaccttaaggatgtgcaggatcttgatggtggcaaggagcatgaaagaattactgatgtccttgatcaaaaaaattatgtggaagaacttaaccggcacttgagctgcacagttggggatcttcaaaccaagatagatggcttggaaaagactaactcaaagcttcaagaagagctttcagctgcaacagaccgaatttgctcacttcaagaagaacagcagcagttaagagaacaaaatgaattaattcgagaaagaagtgaaaagagtgtagagataacaaaacaggataccaaagttgagctggagacttacaagcaaactcggcaaggtctggatgaaatgtacagtgatgtgtggaagcagctaaaagaggagaagaaagtccggttgagaggaaacaaaaggcatgaaccattgatacacatggaaacttggattgatctccaagacattattctgagaaaaagtcagtctcaaggttatataatgtataattacattgagattacattctcaaaaagccaaagccatattgttgcaggacagatgagtggttgccaggggctgagcaaaagtcatcctttccttacaaagatttgcttcatttgcactcttgctggtgtcgcatccaggttgcagcactcggagcgggcgaggcagggggctgaggagcggagccacaagctgcagcaggagctgggcgggaggatcggcgccctgcagctgcagctctcccagctgcacgagcaatgctcaagcctggagaaagaattgaaatcagaaaaagagcaaagacaggctcttcagcgcgaattacagcacgagaaagacacttcctctctactcaggatggagctgcaacaagtggaaggactgaaaaaggagttgcgggagcttcaggacgagaaggcagagctgcagaagatctgcgaggagcaggaacaagccctccaggaaatgggcctgcacctcagccagtccaagctgaagatggaagatataaaagaagtgaaccaggcactgaagggccacgcctggctgaaagatgacgaagcgacacactgtaggcagtgtgagaaggagttctccatttcccggagaaagcaccactgccggaactgtggccacatcttctgcaacacctgctccagcaacgagctggccctgccctcctaccccaagccggtgcgagtgtgcgacagctgccacaccctgctcctgcagcgctgctcctccacggcctcctga

SEQ ID NO: 296 - DNA, 939 bp, Artificial
  cDNA Sequence
atggatggagagaatcactcagtggtatctgagtttttgtttctgggactcactcattcatgggagatccagctcctcctcctagtgttttcctctgtgctctatgtggcaagcattactggaaacatcctcattgtgttttctgtgaccactgaccctcacttacactcccccatgtactttctactggccagtctctccttcattgacttaggagcctgctctgtcacttctcccaagatgatttatgacctgttcagaaagcgcaaagtcatctcctttggaggctgcatcgctcaaatcttcttcatccacgtcgttggtggtgtggagatggtgctgctcatagccatggcctttgacagatatgtggccctatgtaagcccctccactatctgaccattatgagcccaagaatgtgcctttcatttctggctgttgcctggacccttggtgtcagtcactccctgttccaactggcatttcttgttaatttagccttctgtggccctaatgtgttggacagcttctactgtgaccttcctcggcttctcagactagcctgtaccgacacctacagattgcagttcatggtcactgttaacagtgggtttatctgtgtgggtactttcttcatacttctaatctcctacgtcttcatcctgtttactgtttggaaacattcctcaggtggttcatccaaggccctttccactctttcagctcacagcacagtggtccttttgttctttggtccacccatgtttgtgtatacacggccacaccctaattcacagatggacaagtttctggctatttttgatgcagttctcactccttttctgaatccagttgtctatacattcaggaataaggagatgaaggcagcaataaagagagtatgcaaacagctagtgatttacaagaggatctcataa

SEQ ID NO: 297 - DNA, 2236 bp, Artificial
  cDNA Sequence
tttcgtcttagccacgcagaagtcgcgtgtctaggtgagtcgcggtgggtcctcgcttgcagttcagcgaccacgtttgtttcgacgccggaccgcgtaagagacgatgatgttgggcacggaaggtggagagggattcgtggtgaaggtccggggcttgccctggtcttgctcggccgatgaagtgcagaggtttttttctgactgcaaaattcaaaatggggctcaaggtattcgtttcatctacaccagagaaggcagaccaagtggcgaggcttttgttgaacttgaatcagaagatgaagtcaaattggccctgaaaaaagacagagaaactatgggacacagatatgttgaagtattcaagtcaaacaacgttgaaatggattgggtgttgaagcatactggtccaaatagtcctgacacggccaatgatggctttgtacggcttagaggacttccctttggatgtagcaaggaagaaattgttcagttcttctcagggttggaaatcgtgccaaatgggataacattgccggtggacttccaggggaggagtacgggggaggccttcgtgcagtttgcttcacaggaaatagctgaaaaggctctaaagaaacacaaggaaagaatagggcacaggtatattgaaatctttaagagcagtagagctgaagttagaactcattatgatccaccacgaaagcttatggccatgcagcggccaggtccttatgacagacctggggctggtagagggtataacagcattggcagaggagctggctttgagaggatgaggcgtggtgcttatggtggaggctatggaggctatgatgattacaatggctataatgatggctatggatttgggtcagatagatttggaagagacctcaattactgtttttcaggaatgtctgatcacagatacggggatggtggctctactttccagagcacaacaggacactgtgtacacatgcggggattaccttacagagctactgagaatgacatttataattttttttcaccgctcaaccctgtgagagtacacattgaaattggtcctgatggcagagtaactggtgaagcagatgtcgagttcgcaactcatgaagatgctgtggcagctatgtcaaaagacaaagcaaatatgcaacacagatatgtagaactcttcttgaattctacagcaggagcaagcggtggtgcttacgaacacagatatgtagaactcttcttgaattctacagcaggagcaagcggtggtgcttatggtagccaaatgatgggaggcatgggcttgtcaaaccagtccagctacgggggcccagccagccagcagctgagtgggggttacggaggcggctacggtggccagagcagcatgagtggatacgaccaagttttacaggaaaactccagtgattttcaatcaaacattgcataggtaaccaaggagcagtgaacagcagctactacagtagtggaagccgtgcatctatgggcgtgaacggaatgggagggttgtctagcatgtccagtatgagtggtggatggggaatgtaattgatcgatcctgatcactgactcttggtcaaccttttttttttttttttttttttctttaagaaaacttcagtttaacagtttctgcaatacaagcttgtgatttatgcttactctaagtggaaatcaggattgttatgaagacttaaggcccagtatttttgaatacaatactcatctaggatgtaacagtgaagctgagtaaactataactgttaaacttaagttccagcttttctcaagttagttataggatgtacttaagcagtaagcgtatttaggtaaaagcagttgaattatgttaaatgttgccctttgccacgttaaattgaacactgttttggatgcatgttgaaagacatgcttttatttttttgtaaaacaatataggagctgtgtctactattaaaagtgaaacattttggcatgtttgttaattctagtttcatttaataacctgtaaggcacgtaagtttaagctttttttttttttaagttaatgggaaaaatttgagacgcaataccaatacttaggattttggtcttggtgtttgtatgaaattctgaggccttgatttaaatctttcattgtattgtgatttccttttaggtatattgcgctaagtgaaacttgtcaaataaatcctccttttaaaaactg

SEQ ID NO: 298 - DNA, 942 bp, Artificial
  cDNA Sequence
atggattgggtgttgaagcatactggtccaaatagtcctgacacggccaatgatggctttgtacggcttagaggacttccctttggatgtagcaaggaagaaattgttcagttcttctcagggttggaaatcgtgccaaatgggataacattgccggtggacttccaggggaggagtacgggggaggccttcgtgcagtttgcttcacaggaaatagctgaaaaggctctaaagaaacacaaggaaagaatagggcacaggtatattgaaatctttaagagcagtagagctgaagttagaactcattatgatccaccacgaaagcttatggccatgcagcggccaggtccttatgacagacctggggctggtagagggtataacagcattggcagaggagctggctttgagaggatgaggcgtggtgcttatggtggaggctatggaggctatgatgattacaatggctataatgatggctatggatttgggtcagatagatttggaagaggaatgtctgatcacagatacggggatggtggctctactttccagagcacaacaggacactgtgtacacatgcggggattaccttacagagctactgagaatgacatttataattttttttcaccgctcaaccctgtgagagtacacattgaaattggtcctgatggcagagtaactggtgaagcagatgtcgagttcgcaactcatgaagatgctgtggcagctatgtcaaaagacaaagcaaatatgcaacacagatatgtagaactcttcttgaattctacagcaggagcaagcggtggtgcttacggtagccaaatgctaggaggcatggcaaaccagtccagctacgggggcccagccagccagcagctgagtgggggttacggaggcggctacggtggccagagcagcatgagtggatacggtaaa

SEQ ID NO: 299 - DNA, 1220 bp, Artificial
  cDNA Sequence
ccgtagtcaacgtgcgcctcccctcccggctcccagccgggcgcgccccgggctcgagtctctgcctgcccagtggcagccccgcccttcctctcccagtgggccctcggcgcccagctccgcgtcctgtgaggtccagtggccgcccaggcgcgaccagatctgggtgcgcggagagcgcgcatggcggctgtgggaccgcggaccggccccggaaccggcgccgaggctctagcgctggcggcagagctgcagggcgaggcgacgtgctccatctgcctagagctctttcgtgagccggtgtccgtcgagtgcggccacagcttctgccgcgcctgcatagggcgctgctgggagcgcccgggcgcggggtctgttggggccgccacccgcgcgccccccttcccactgccctgtccgcagtgccgcgagcccgcgcgccccagtcagctgcggcccaaccggcagctggcggcagtggccacgctcctgcggcgcttcagcctgcccgcggctgccccgggagagcacgggtctcaggcggccgcggcccgggcagcggctgcccgctgcgggcagcatggcgaacccttcaagctctactgccaggacgacggacgcgccatctgcgtggtgtgcgaccgcgcccgcgagcaccgcgagcacgccgtgctgccgctggacgaggcggtgcaggaggccaaggagctcttggagtccaggctgagggtcttgaagaaggaactggaggactgtgaggtgttccggtccacggaaaagaaggagagcaaggagctgctggtgagccaggcacccgcaggccccccgtgggacattacagaggcctgagaactcagcaccagggctcggtgtgtgtggtgttggagtgtgtgctatggaaccgcagaatcgatttcagaaagataatagagtccatattatatagggtgtccacataattgttgtacaaaccagagctttttaaagtgaaaagcagtgctaaaataattattgcaaaacaactggcttaaactggagctgtcccagcgaatcaggacgctcagtcactctgatattacgtaacataccagttagggcctgcggaagcatcttgtaatggaacacattactatttctgcagagaaacatggatattcaataagtgggaatattaatacaataaagagcctcatggcatgttttgtcaacaaaacagtagt

SEQ ID NO: 300 - DNA, 2802 bp, Artificial
  cDNA Sequence
agcggccgccttgctcctctaggtcccaggcgctctgcggagctttcgctgcccggtgagcggcgccgggcttgaggtcgcccagacgtcggaggagccgggtcacgaggctggagcttcctgcttgcagagtgcggcggggaggcgcggcccgggaacgcgggatcctggggagatctgccttctggagactgcgccgtcctcccgggagagccagaaagaggacatggctgctgggcagcgggaagcgaggccccaggtgtcactgacattcgaggacgtggctgtgctctttacctgggatgagtggagaaagctggctccttctcagagaaacttgtaccgggatgtgatgctggagaactataggaacctggtctcactgggactctcatttaccaaaccaaaagtcatctccctgttgcagcaaggagaagatccctgggaggtggagaaagacagttctggtgtctcctctctaggatgtaagagcacacctaaaatgacaaagtcaactcaaactcaggattcatttcaggagcagataaggaaaagattgaaaagggatgaaccctggaacttcatatcagaaagatcctgcatatatgaagagaaattaaagaaacagcaggacaaaaatgaaaatttacaaataatttcagttgcccatacaaaaatccttactgtagatagaagccataaaaatgttgaatttggccaaaacttctacctgaaatcagtcttcattaagcaacagagatttgctaaagaaaaaactccatcaaaatgtgaaatacaaagaaatagtttcaagcagaattcaaatttacttaaccaatcaaaaatcaaaacagcagagaaacgctataaatgcagtacatgtgaaaaagccttcattcacaattcatcccttcgtaaacatcagaaaaaccacactggagaaaaattatttaaatgtaaagaatgtttaaaagctttcagccaaagttctgctcttattcaacatcaaagaactcatacaggagagaaaccctatatatgtaaagaatgtgggaaagccttcagccatagtgcatccctttgtaagcatttaaggacccatactgtggagaaatgctatagatgtaaagaatgtggtaaatccttcagtcgaaggtctgggctttttatacatcaaaaaatccatgctcaagaaaatccccataaatacaatccaggcaggaaggcatccagttacagcacttccctttctggaagtcagaaaattcatctcagaaagaagtcctacttatgtaatgaatgtggcaacacctttaagtctagctcatcccttcgttatcatcagagaattcacactggagagaagccttttaaatgtagtgaatgtgggagagccttcagccagagtgcctctcttattcaacatgaaagaattcacaccggagaaaagccctatagatgcaatgaatgtgggaaaggctttacttctatttcacgacttaatagacaccgaataattcatactggagagaaattgtataattgtaatgaatgtggtaaagccttaagctcccactcaacacttattattcatgagcgaattcatactggagaaaaaccatgtaaatgtaaagtatgtggaaaagccttcagacagagttccgctctcattcaacatcagagaatgcatactggagaaagaccctataagtgtaacgaatgtgacaaaacattcaggtgtaactcatcgcttagtaatcaccagagaattcatactggagagaaaccatatcgatgtttagaatgtgggatgtcttttggccaaagtgcagctcttatacaacatcagaggattcatacaggagaaaaaccctttaaatgtaatacatgtggaaaaacttttagacaaagctcatcacttattgcacatcaaagaattcatactggagagaaaccctatgaatgtaatgcatgtgggaaactctttagccagaggtcatcccttactaatcattataaaattcacattgaagaggactccttaaaagccgatttgcatgtgtgaaagccttaaaccaaaactcatcagagaatacatgcttgagagtgatttattaaatataatgaatatgagaaaactcttagttctcatcagatactaagttttaagaataaactttagctatgtaataacttatgggaaaagcttttatacttgtcactcactttttaaaatatcccgagacagttcactgttgcagacattgaaattggccatttgtaagataaaaggtatgtttataaaatctctttatataatatatgctatctatgacatgcaaaaaagaaaagtctgggtgctgaggtgctgaatttttcattagaaaaacatttgtataaactactattatataaatataagcatatttattacagcaaacattttaatagcaaacaaaacaattgatcttaaaaatatatgcaatatatacttacctggcagggaagattaccatgatcacgaaggtggttttcccagggcaaggcttatccattgcactccagatgtgctgaccccttcaatttcccaaaatgtggaaaactcaactgcataatttatggtagtgggggactacattcgcactttctcctgaaatatatatatatatgcagtattagagcaaaggaccaataagagataaaaactaactgaactacctcttagtgcctggaatttaccttttcctgacttactgtcaaacttcgtgcatggcttttattaaaaaagaaaaaatctgttct

SEQ ID NO: 301 - DNA, 1635 bp, Artificial
  cDNA Sequence
ggccctgaggacgtggccctctatgtgggcctcatcgccgtggccgtctgcctggtcctgctgctgcttgtcctcatcctcgtttattgccggaagaaggaggggctggactcagatgtggctgactcgtccattctcacctcaggcttccagcccgtcagcatcaagcccagcaaagcagacaacccccatctgctcaccatccagccggacctcagcaccaccaccaccacctaccagggcagtctctgtccccggcaggatgggcccagccccaagttccagctcaccaatgggcacctgctcagccccctgggtggcggccgccacacactgcaccacagctctcccacctctgaggccgaggagttcgtctcccgcctctccacccagaactacttccgctccctgccccgaggcaccagcaacatgacctatgggaccttcaacttcctcgggggccggctgatgatccctaatacaggaatcagcctcctcatccccccagatgccataccccgagggaagatctatgagatctacctcacgctgcacaagccggaagacgtgaggttgcccctagctggctgtcagaccctgctgagtcccatcgttagctgtggaccccctggcgtcctgctcacccggccagtcatcctggctatggaccactgtggggagcccagccctgacagctggagcctgcgcctcaaaaagcagtcgtgcgagggcagctgggaggatgtgctgcacctgggcgaggaggcgccctcccacctctactactgccagctggaggccagtgcctgctacgtcttcaccgagcagctgggccgctttgccctggtgggagaggccctcagcgtggctgccgccaagcgcctcaagctgcttctgtttgcgccggtggcctgcacctccctcgagtacaacatccgggtctactgcctgcatgacacccacgatgcactcaaggaggtggtgcagctggagaagcagctggggggacagctgatccaggagccacgggtcctgcacttcaaggacagttaccacaacctgcgcctatccatccacgatgtgcccagctccctgtggaagagtaagctccttgtcagctaccaggagatccccttttatcacatctggaatggcacgcagcggtacttgcactgcaccttcaccctggagcgtgtcagccccagcactagtgacctggcctgcaagctgtgggtgtggcaggtggagggcgacgggcagagcttcagcatcaacttcaacatcaccaaggacacaaggtttgctgagctgctggctctggagagtgaagcgggggtcccagccctggtgggccccagtgccttcaagatccccttcctcattcggcagaagataatttccagcctggacccaccctgtaggcggggtgccgactggcggactctggcccagaaactccacctggacagccatctcagcttctttgcctccaagcccagccccacagccatgatcctcaacctgtgggaggcgcggcacttccccaacggcaacctcagccagctggctgcagcagtggctggactgggccagccagacgctggcctcttcacagtgtcggaggctgagtgctga

SEQ ID NO: 302 - DNA, 1146 bp, Artificial
  cDNA Sequence
gcaggtgcccagcagagtgccaccgtggccaacccagtgcctggtgccaacccggacctgcttccccacttcctggtggagcccgaggatgtgtacatcgtcaagaacaagccagtgctgcttgtgtgcaaggccgtgcccgccacgcagatcttcttcaagtgcaacggggagtgggtgcgccaggtggaccacgtgatcgagcgcagcacagacgggagcagtgggctgcccaccatggaggtccgcattaatgtctcaaggcagcaggtcgagaaggtgttcgggctggaggaatactggtgccagtgcgtggcatggagctcctcgggcaccaccaagagtcagaaggcctacatccgcatagcctatttgcgcaagaacttcgagcaggagccgctggccaaggaggtgtccctggagcagggcatcgtgctgccctgccgtccaccggagggcatccctccagccgaggtggagtggctccggaacgaggacctggtggacccgtccctggaccccaatgtatacatcacgcgggagcacagcctggtggtgcgacaggcccgccttgctgacacggccaactacacctgcgtggccaagaacatcgtggcacgtcgccgcagcgcctccgctgctgtcatcgtctacgtggacggcagctggagcccgtggagcaagtggtcggcctgtgggctggactgcacccactggcggagccgtgagtgctctgacccagcaccccgcaacggaggggaggagtgccagggcactgacctggacacccgcaactgtaccagtgacctctgtgtacacactgcttctggccctgaggacgtggccctctatgtgggcctcatcgccgtggccgtctgcctggtcctgctgctgcttgtcctcatcctcgtttattgccggaagaaggaggggctggactcagatgtggctgactcgtccattctcacctcaggcttccagcccgtcagcatcaagcccagcaaagcagacaacccccatctgctcaccatccagccggacctcagcaccaccaccaccacctaccagggcagtctctgtccccggcaggatgggcccagccccaagttccagctcaccaatgggcacctgctcagccccctgggt

SEQ ID NO: 303 - DNA, 1792 bp, Artificial
  cDNA Sequence
atgcggcattccaaaagaactcactgtcctgattgggatagcagagaaagctggggacatgaaagctatcgtggaagtcacaagcggaagaggagatctcatagtagcacacaagagaacaggcattgtaaaccacatcaccagtttaaagaatctgattgtcattatttagaagcaaggtccttgaatgagcgagattatcgggaccggagatacgttgacgaatacaggaatgactactgtgaaggatatgttcctagacattatcacagagacattgaaagcgggtatcgaatccactgcagtaaatcttcagtccgcagcaggagaagcagtcctaaaaggaagcgcaatagacactgttcaagtcatcagtcacgttcgaagagccaccgaaggaaaagatccaggagtatagaggatgatgaggagggtcacctgatctgtcaaagtggagacgttctaagagcaagatatgaaatcgtggacactttgggtgaaggagcctttggcaaagttgtagagtgcattgatcatggcatggatggcatgcatgtagcagtgaaaatcgtaaaaaatgtaggccgttaccgtgaagcagctcgttcagaaatccaagtattagagcacttaaatagtactgatcccaatagtgtcttccgatgtgtccagatgctagaatggtttgatcatcatggtcatgtttgtattgtgtttgaactactgggacttagtacttacgatttcattaaagaaaacagctttctgccatttcaaattgaccacatcaggcagatggcgtatcagatctgccagtcaataaattttttacatcataataaattaacccatacagatctgaagcctgaaaatattttgtttgtgaagtctgactatgtagtcaaatataattctaaaatgaaacgtgatgaacgcacactgaaaaacacagatatcaaagttgttgactttggaagtgcaacgtatgatgatgaacatcacagtactttggtgtctacccggcactacagagctcccgaggtcattttggctttaggttggtctcagccttgtgatgtttggagcataggttgcattcttattgaatattaccttggtttcacagtctttcagactcatgatagtaaagagcacctggcaatgatggaacgaatattaggacccataccacaacacatgattcagaaaacaagaaaacgcaagtattttcaccataaccagctagattgggatgaacacagttctgctggtagatatgttaggagacgctgcaaaccgttgaaggaatttatgctttgtcatgatgaagaacatgagaaactgtttgacctggttcgaagaatgttagaatatgatccaactcaaagaattaccttggatgaagcattgcagcatcctttctttgacttattaaaaaagaaatgaaatgggaatcagtggtcttactatatacttctctagaagagattacttaagactgtgtcagtcaactaaacattctaatatttttgtaaacattaaattattttgtacagttaagtgtaaatattgtatgttttgtatcaatagcataattaacttgttaagcaagtatggtcttgataatgcattagaaaaattaaaattaatttttctttttgaaattaccatttttaaatacctttgaaatatcctttgtgtccagtgataaatgtgattgatcttgccttttgtacatggaggtcacctctgaagtgattttttttgagtaaaaggaaatcttgactacttt

SEQ ID NO: 304 - DNA, 3065 bp, Artificial
  cDNA Sequence
gggtgcctcatattgccagacaagagctcagacctgaggagagtgactagcttctctgtgtcccaggtggccaccttccactgtggaagctcatggactccattgggtcttcagggttgcggcagggggaagaaaccctgagttgctctgaggagggcttgcccgggccctcagacagctcagagctggtgcaggagtgcctgcagcagttcaaggtgacaagggcacagctacagcagatccaagccagcctcttgggttccatggagcaggcgctgaggggacaggccagccctgcccctgcggtccggatgctgcctacatacgtggggtccaccccacatggcactgagcaaggagacttcgtggtgctggagctgggggccacaggggcctcactgcgtgttttgtgggtgactctaactggcattgaggggcatagggtggagcccagaagccaggagtttgtgatcccccaagaggtgatgctgggtgctggccagcagctctttgactttgctgcccactgcctgtctgagttcctggatgcgcagcctgtgaacaaacagggtctgcagcttggcttcagcttctctttcccttgtcaccagacgggcttggacaggagcaccctcatttcctggaccaaaggttttaggtgcagtggtgtggaaggccaggatgtggtccagctgctgagagatgccattcggaggcagggggcctacaacatcgacgtggttgctgtggtgaacgacacagtgggcaccatgatgggctgtgagccgggggtcaggccgtgtgaggttgggctagttgtagacacgggcaccaacgcgtgttacatggaggaggcacggcatgtggcagtgctggacgaagaccggggccgcgtctgcgtcagcgtcgagtggggctccttcagcgatgatggggcgctgggaccagtgctgaccaccttcgaccataccctggaccatgagtccctgaatcctggtgctcagaggtttgagaagatgatcggaggcctgtacctgggtgagctggtgcggctggtgctggctcacttggcccggtgtggggtcctctttggtggctgcacctcccctgccctgctgagccaaggcagcatcctcctggaacacgtggctgagatggaggacccctctactggggcagcccgtgtccatgctatcctgcaggacttgggcctgagccctggggcttcggatgttgagcttgtgcagcacgtctgtgcggccgtgtgcacgcgggctgcccagctctgtgctgccgccctggccgctgttctctcctgcctccagcacagccgggagcaacaaacactccaggttgctgtggccaccggaggccgagtgtgtgagcggcaccccaggttctgcagcgtcctgcaggggacagtgatgctcctggccccggaatgcgatgtctccttaatcccctctgtggatggtggtggccggggagtggcgatggtgactgccgtggctgcccgtctggctgcccaccggcgcctgctggaggagaccctggccccattccggttgaaccatgatcaactggctgcggttcaggcacagatgcggaaggccatggccaaggggctccgaggggaggcctcctcccttcgcatgctgcccactttcgtccgggccacccctgacggcagcgagcgaggggatttcctggccctggacctcgggggcacgaacttccgtgtcctcctggtacgtgtgaccacaggcgtgcagatcaccagcgagatctactccattcccgagactgtggcccagggttctgggcagcagctctttgaccacatcgtggactgcatcgtggacttccagcagaagcagggcctgagcgggcagagcctcccactgggttttaccttctccttcccatgtaggcagcttggcctagaccagggcatcctcctgaactggaccaagggtttcaaggcatcagactgcgagggccaagatgtcgtgagtctgttgcgggaagccatcactcgcagacaggcagtggagctgaatgtggttgccattgtcaatgacacggtggggaccatgatgtcctgtggctatgaggacccccgttgcgagataggcctcattgtcggaaccggcaccaatgcctgctacatggaggagctccggaatgtggcgggcgtgcctggggactcaggccgcatgtgcatcaacatggagtggggcgcctttggggacgatggctctctggccatgctcagcacccgctttgatgcaagtgtggaccaggcgtccatcaaccccggcaagcagaggtttgaaaagatgatcagcggcatgtacctgggggagatcgtccgccacatccttttacatttaaccagccttggcgttctcttccggggccagcagatccagcgccttcagaccagggacatcttcaagaccaagttcctctctgagatcgaaagtgacagcctggccctgcggcaggtccgagccatcctagaggatctggggctacccctgacctcagatgacgccctgatggtgctagaggtgtgccaggctgtgtcccagagggctgcccagctctgtggggcgggtgtagctgccgtggtggagaagatccgggagaaccggggcctggaagagctggcagtgtctgtgggggtggatggaacgctctacaagctgcacccgcgcttctccagcctggtggcggccacagtgcgggagctggcccctcgctgtgtggtcacgttcctgcagtcagaggatgggtccggcaaaggtgcggccctggtcaccgctgttgcctgccgccttgcgcagttgactcgtgtctgaggaaacctccaggctgaggaggtctccgccgcagccttgctggagccgggtcggggtctgcctgtttcccagccaggcccagccacccaggactcctgggacatcccatgtgtgacccctctgcggccatttggccttgctccctggctttccctgagagaagtagcactcaggttagcaatatatatatataatttattt

SEQ ID NO: 305 - DNA, 543 bp, Artificial
  cDNA Sequence
atgccgtcatcagtcccgaagacctccatagagtcccttgggtctccatcatccctgagctcctcccaggcatcagagcctctgtgtcccctgaagcacccttcacaccggccacctgcgagcaccctatcaccaaacctgaccagctccacagaatccttggggtatctgtcatccctcagctcctctcagccaccagagcctttgcgtcccctggaatgtccttcacacaagccatgtgggcgttcccttccccgacgacggaatcctggctgggtgtcctggtccgactccatgcaggctgattccgaaactgacgccataatatgcccaatgtgcaaggcccctgagcgctcctgtccacacacctggtgggtgccttctagccctcgagtgatccgaggcgttggtcgctgcagtgatcccaacctgggcctctcctggaggcaggaggctgctagagcctggtgccactgcacctcctcacagtacccattcaagcaccctaatcttcccacccacctaccaaaggcttctttctag

SEQ ID NO: 306 - DNA, 498 bp, Artificial
  cDNA Sequence
atggctaaaggtgaccccaagaaaccaaagggcaagatgtctgcttatgtcttctttgtgcagacatgcagagaagaatgtaaaaagaaaaaccctgtcaattttgcagaattttccaagaagtgctctgaaaggtggaagacaatgtccgggaaagagaagtctaaatttgatgaaatggcaaagacggataaagtgcactgtgatcgggaaatgaagggaccagctaagggaggcaagaagaagaaggatcctagtgcccccaaaaggccaccatctggattcttcctgttctcttcggaaatccgccccaagatcaaatccacaaaccctggcatctctattggagatgtggcaaaaaagctgggtgagatgtggaataacttaaatgacagtgaaaagcagccttacatcactaagacggcaaagctgaaggagaagtacgagaaggatgttgctgattctaagtcgaaagggaagtttgatggctcaaagcgt

SEQ ID NO: 307 - DNA, 4171 bp, Artificial
  cDNA Sequence
ggcacgtgacggtcgggccgcctccgcctctctctttactgcggcgcggggcaaggtgtgcgggcgggaaggggcacgggcacccccgcggtccccgggaggctagagatcatggaagggaagtggttgctgtgtatgttactggtgcttggaactgctattgttgaggctcatgatggacatgatgatgatgtgattgatattgaggatgaccttgacgatgtcattgaagaggtagaagactcaaaaccagataccactgctcctccttcatctcccaaggttacttacaaagctccagttccaacaggggaagtatattttgctgattcttttgacagaggaactctgtcagggtggattttatccaaagccaagaaagacgataccgatgatgaaattgccaaatatgatggaaagtgggaggtagaggaaatgaaggagtcaaagcttccaggtgataaaggacttgtgttgatgtctcgggccaagcatcatgccatctctgctaaactgaacaagcccttcctgtttgacaccaagcctctcattgttcagtatgaggttaatttccaaaatggaatagaatgtggtggtgcctatgtgaaactgctttctaaaacaccagaactcaacctggatcagttccatgacaagaccccttatacgattatgtttggtccagataaatgtggagaggactataaactgcacttcatcttccgacacaaaaaccccaaaacgggtatctatgaagaaaaacatgctaagaggccagatgcagatctgaagacctattttactgataagaaaacacatctttacacactaatcttgaatccagataatagttttgaaatactggttgaccaatctgtggtgaatagtggaaatctgctcaatgacatgactcctcctgtaaatccttcacgtgaaattgaggacccagaagaccggaagcccgaggattgggatgaaagaccaaaaatcccagatccagaagctgtcaagccagatgactgggatgaagatgcccctgctaagattccagatgaagaggccacaaaacccgaaggctggttagatgatgagcctgagtacgtacctgatccagacgcagagaaacctgaggattgggatgaagacatggatggagaatgggaggctcctcagattgccaaccctagatgtgagtcagctcctggatgtggtgtctggcagcgacctgtgattgacaaccccaattataaaggcaaatggaagcctcctatgattgacaatcccagttaccagggaatctggaaacccaggaaaataccaaatccagatttctttgaagatctggaacctttcagaatgactccttttagtgctattggtttggagctgtggtccatgacctctgacattttttttgacaactttatcatttgtgctgatcgaagaatagttgatgattgggccaatgatggatggggcctgaagaaagctgctgatggggctgctgagccaggcgttgtggggcagatgatcgaggcagctgaagagcgcccgtggctgtgggtagtctatattctaactgtagcccttcctgtgttcctggttatcctcttctgctgttctggaaagaaacagaccagtggtatggagtataagaaaactgatgcacctcaaccggatgtgaaggaagaggaagaagagaaggaagaggaaaaggacaagggagatgaggaggaggaaggagaagagaaacttgaagagaaacagaaaagtgatgctgaagaagatggtggcactgtcagtcaagaggaggaagacagaaaacctaaagcagaggaggatgaaattttgaacagatcaccaagaaacagaaagccacgaagagagtgaaacaatcttaagagcttgatctgtgatttcttctccctcctcccctgcaagagtggtcctaggagaggacctggcacaccttaggttgacattcagaaaacttcaagacatcaccatcagcaggctccagttgaacactagtctgtgtaactttaaacatctagcagtaaatacttgcagttgtgatataaaggaccctgtttctgtagaaaagaaaacatttaacataatggttgtgaaatgtaacatgaagcaaactaacttttttttttttaacatctttgtttttaaaatagaatgatagaactttgccagtctttaagatcttggcttaatttaatgtattaatctgtttgtgcaaacataataccaccatttaaaaatgttagggagatgagttgcagtttttataatagattttttttaaagtttggtattgtaaaacattcacacctctgtccctcaaaattgataattacgtttaaagtgcagtcatttgtggttagaatcttgttttgtttgcttccattattgagttcctcctaaggaaattgaggagagggactgaatagaagcccaaattcatataaaagttgcgtttaagttgtattaaaaatagatatataagaaaaaattctttcacttgatgtttgttagaccagaaagtgtgtgtgttctgtagctcagttcccagacagctttttaggtagtggaggaggtggcttcatgtggcacttgggcatttatattccacttgggagggtcaggctgtggccttctggagcaggtggcttgttaaggaatgctagcagggcatggcacgtgagctccggaatagatgtcttcatcacttcttccactgtgtgttgacactgttttccttacctatttcctcagatccccagctttctcctctgctatgcattttcttcacagtgcagcttgcagtccgttgctgaaaatgattataagccctgcataatgttaagctttattgtgattacgtgtatgtttcttctttcttttaagcagacccatacctttccagggtcaaagtacagaatagaatacattgatacaaagtacagaaaaatactttgatttttatccatttcttttactctgtgtaaagacttgagaagtctaattcacaggcaaaccaatacagaattgactgcagttgaacagactagaagtatttgtgggaggagtgacatgaagcatgagttatctgattttttttgtagctgctatatattttaagccttcatttgcaattcatgtaacagttgtgtcataaattacacaataaagcagtcctgttcaaatttttttttaacgtggcttgtagaatttttaaaaaagtgatcttaggtttgttttttcatgcgggatgcagatgggtgctatcagagcctctcccacaccactatagtgtaataatgttattattactctacactgaaacgtattcagagttagatattattttagcttcagttgttctttagaggctttcaaatgtaccgatgatactgtttcttgcactgaatatataaacactccacagtgtttatattgggaagatattgggaaggaaatatatttgtaaaagatgaaggctgtatctatttttttttctttttaaagtttgttcacttaaattcttttgaggatgggatgtatttttcttgctgttcagtgctttttccttttcatctgttgttctgtggtcacagtgaccttagctacatagcagactttcccaaatgtattgattacaaataaacagttgttacttagcaagacctgaaaatatgtctgcaggtttctccttgaagcaaatgtgtgggatcattgcatttccagaaatctgcctccttcaccctccgttgacagtatatgtcatgcctcactttcttctagctgagctttaaatcattagagcttaaattgtcagatcgttcattgcctttccagggttatttagtaaagtttgttgaaaacaaaaacgccttttcttggttcttttttcagttattttgaaggtccagcatcctgattaaatgtctgacacattaatgaatgaccagcagcagctttcagctcttaaaaagacacttatattttgattttacatgctggttacctgttccattgttgtcaaatgcccactctccatcagatgtgttcctccattttcttatccacaaagtactcctcacttttcaatttgtcatgttactaaatggtgttacattaaagccctgtgttaagtgtc

SEQ ID NO: 308 - DNA, 1993 bp, Artificial
  cDNA Sequence
gctcagttgcctgaggacagcagtgcagttgacatggatattctctttcctctggacagtgttattggtacagagctgtgccccagccccattccccagatcatccatttcgtcctctttgttgtgttcagcctggtgatcctgattatcttacgcctctacattcccagggagccgtcctcagtgcctcccagagaggaggacagcgagaatgatcaagctgaagtgggggaatggctcaggatcggaaataaatatatcactttgaaagattacagaattctcttgaaagaactggagaaccttgagatctacactttcctgtcgaaaaagtgcctgaagaagctctctagggagggcagctcccatcaccttccacgccaagtccgcccagggccagtgtacaaaccagcacctgctaggaaccaccggccacgtggggggcgtgggaaagcttctcccaccagcttccatgtgtccccacgggctcccctggctcctctggcctccatgccgtcatcagtcccgaagacctccgtagagtccttggggtctccatcatccctgagctcctccaagccacgagagcctctgtgtcccctgaagcacccttcacaccagccacctgcgagcaccctatcaccaaacccgaccagctccacagaatccttggggtatctgtcatccctgagctcctcccagccaccagagcctttgcgtcccctgaagcacccttcacacaagccacgtgggcgttcccttccccgacgacggaatcctggctgggtgtcctggtccgactccatgcaggctgattccgaaactgacaccataatatgcccaatgtgcaaggcccctgagcgctcctgtccacacacctggtgggtgccttctagccctcgagtgatccgaggcgttggtcgctgcagtgatcccaacctgggcctctcctggaggcaggaggctgctagagcctggtgccactgcacctcctcacagttcccattcaagcaccctaatcttcccacccacctaccaaaggcttccttctagggagaccccacatgcaggcaggtggaggcaggggtcccgctttcctcagcctggatgtgccaacgctgctggacgcataagacaccaaaatcccagacactcccatggacaccgaatatccgacatccacgaacaattgggaatctcctgaggacaacttggaggtgcgtcccctcatctgcgcaccccacagatgctggaaatgcatgttctaatggattgggagagacggagatggggtccaaacctccagtccctggagcccgtaaatctccttgggaggcttggcgcccacagagacctcttccacagcgctgcacacacagatcttccttcctagaggatctgaactcacttagaaaactgccagcacaggagggataacatcagctgtgccccccactggagaacccagagactctgggtcattgtcaacattgcccccagaatgggctctctgctggggaagatgctcaggaattgctgctcttttgcaatgccagtctctcctaacagaactgcagattccacgtgtagacctgcaaacttctgttctctgcagttccctgagtcacagtttacacaatcacaatttttttttttttttttagatggagtctcactctgttgctcaggctggagtgcagtggcaccatcttggctcaccacaacctccgcctcccggattcaagccattctcctgcctcagcctcccgagtaactgggattacaggcttgtgccaccgcacccagctaatttttgtaattttagtcgagagaaggtgtcaccatgttagccaggcttgtcttgaactcctgaccttgagatatctgcccacctcagcctctcaaagtgctgggattataggcttgagccaccacggctggatgaatcataaattgtaaacctgaataaaatgctgcaacctccaatgagagg

SEQ ID NO: 309 - DNA, 597 bp, Artificial
  cDNA Sequence
caggacagctggcacaagcaccacaagaccgggggcaagagaacgcccaacgacgagaagtggaagtatgagctggggcgccctgctgccaatgccaagatcagcccccaccacatccacacagtccgtgtgcagggaagtaacaaaaaatactgtgccctgaggctggatgtggggagtttctactggggctcagagtgttgtaattgcaaaaccagcatcatcgacgctgtcgacaatgtgtccaagaatgaactggtccgtaccgagaccccggtgaggagctgcatcacactcattgacaacacactgtatcagcagtggtacgagtcctactatgtgctgctcctgggccgcaagaaaggggccaaactgattcctgaggaggaagagattttaaacaaaaaagataacattcagaagaagtatgatgaaaggaaaaagaatgccaaaatcagtcttctggggaagcagttccaacagggcaagcttcctgcgtgcatcgcatcaaggccgggacattgtggccaagcagatggctacgtgctagagggcgaggagtcagagttctatcttaggaaaatcaaggcccggaag

SEQ ID NO: 310 - DNA, 2281 bp, Artificial
  cDNA Sequence
gtagcactgcttttttgaggccagtagcaacatccagagatcattcttccatactttactccctcctttttcagacttgtttgtaaagtacagaatctgaatttagcctttatgattgtatatgatccacagaagacctgatttatgaaattttgtactaaaatcatttggaaatgattgtattgtaaactgaggctaaatttttttttaaacctgtttcatgtgttataaaggccagcttgtaaaagaagctgcaacagactttctctgctcatgatttgcactcttagggttttgttagcccttttgtactactttctttttaaattgagaacatggttctttacatataaatctgcttcaaccttaggatgttttcagaccagaggcaacttattcatgaatttttatgaaaactatctactaggacagataagctgaacagtgatgatctgtagacatttatggactgaatgtaatggttgatatatgtacattctgatatttttaaatctttaactttttaaagttaaaaacctacagctgcttaggtccagcttcttaactctttttgagacacttcctgtcctatctccactgtgcctgcctaaatttgttctcaccaagcactgcctgtgcatgcagagaaaatctgtgcatcctcttttatatttttaaaatactgtttaacatttgtgagaattttatgaaaatgcttttgtatgagctgtggctttttcccattgtgaagcattgaatatcacattttggaacatgttatagggtgagtccctggatctttgctcaccagatccaagcactgcttctcggtgtcattgcagtgtgctgcttgtcacccagaatactactatcatgtgaattctttttgtcgtcagtgtcttttccttagtctttttgttgttgttgttgttgttgttttaatcattccttttttaagaagaagtaattttccatttatgaagcagtatgaattagatgtattttcaaaacaggtccctaagacaattcttcagatcatttttaaaatgactaagtcattttagtatgtcaagcaagataaaaattacatcataccgtctattttgcccatagtgccatttagagatgaaaaccagctttaactttgcaaagtgaacatgtacatggtctgctctcatttattcattcttctctcaaaagtcaaatgaatgcagagggagcttggtcaaactgcttttgtttcaactgcaggcaggggagcaaaaggacgccatgtgagcattaggaaaaaaaatactcactcttactaacaatttttatacagaaaatgagtcattttggaaatgattcttatgttttttttttttctccttttagaaaattctccaaaaggttttgatgttgaatcttggtcttggacctgttttttcctttgagggttttttgttttttgttttttctaggatttcattgtgatgttttggttttgttttttgctttttgtttaagttgtgctgacaccaaacacatccagtttataatcagtacattggaaagctggtattgatgtagaaccagtgcataactttttatggggttttgttattggtttttttttgtaaagtgtgaataaaaggtatgtttactcatttttcctgaacactgtgttggtaatgtgcatcatgacaatttccagtgaaggtgagctggagctggttggactaatgagactgaggaagcagcttttcctacgatctgcattatgtaatcacaggtccagagagctttatggaagcgggagaggaggagcacttactcatgttgtatttgttaatggaggatgtcatcttttcatagatgctggaactagagtgcacttgttagatgctaaaggtttgagctttacacaaaatgtcttcatctgtatttgttattgtctacaatatatttgaatttggggcagcatattaagatgtaatggcctgttatgtcttgaaaatacttgttttgcctcttccaggcatactgcattctgtggatcagtttgaacagcttctccaccttatttggacagtgataaattgaaccaagagtgtagatttacaagtgtaaccttcaaaagaggaagaactatttggggtctgtaggtaatgaacagtcacaccaaaatagactatgatgcttttgttaagaaaggtttcatgttttagatattttccgtgtcctaaataattttcaataatctataatccctaaaatgcaataaaaactagtatgtttt

SEQ ID NO: 311 - DNA, 1347 bp, Artificial
  cDNA Sequence
ggggtgaagccatacaaatgtaaacaatgtgagaaaaccttcatttctctcacaaatgtccaaagacacatggtaacacacactggtaacaggcctcataaatgtaagaaatgtgggaagacatttaagtttctctatttacttcaaagacacaaagtaatttacaacggagaaaaaccctgtgaatggaagaaaggtggtaaagccttgagattttgcagttattttcaaaaacataaaagaactcacagtggggaaaaaccttataaatgtcagaaatgtgagaaagcctttggacattctggttaccttcataaccataaaggtgctcatgctgaagagaaaccccgtgaatgtaggaaatgtgggaaacgattcagtttttgtagttactttcaaagacataaagagctctgtgaaaaatcttccatgtgtttaagaaatatggtaaaagactcactctttccagttccattcagaaacataaaagaaataatactggagagaaaccctataaatgtaagaaatgtagcaaagccttcagtcatccccgctccatgtgaagacatcaaagaacacatattggagagaaatcctataactgtaaaaaatgtggcaaagccttcagtcaacacagttcccttagaagacatgaaagaactcatactggagagaaacccaatgaatgtcaaaaatgggataaaggcttcagtcgacattccagttctctatgtaaacatgaaagaactcacactggagaggaaccctttgactgtaaggaatgtggtcaagtcttcagacattccagttctctacgtaaacatgaaagaactcacactggagagaaaccctttgaccgtaagggatgtggtcaagtcttcagacattccaattctctatgtaaacatgaaaaatctcacactggagagaaaccctttgactgtaaggaatgtggtcaagtcttcagacattccagttctctatgtaaacacggaagaactcacactggagagaaaccctttgactgtaagggatgtggtcaagtcttcagacattccagttctctatgtaaacatgaaaaatttcacactggagagaaaccctttgactacttgcaatgtggtgaagtcttcagatattccagttctctatgtaaacatgaaagaactcaaactggagagaaaccctatgactgtaaggcatgtggcaaagcctttagatattccagtcctgtatgtaaacatgaaaaaactcatactctgtagaaatcctgagaatgtaaggatttggggaaaacattcagttaattcagttatctttgaaaacatgaaagaaattatactggag

SEQ ID NO: 312 - DNA, 461 bp, Artificial
  cDNA Sequence
cgcgccccgagcccccgcgccatgaagctcgccgccctcctggggctctgcgtggccctgtcctgcagctccgctgctgctttcttagtgggctcggccaagcctgtggcccagcctgtcgctgcgctggagtcggcggcggaggccggggccgggaccctggccaaccccctcggcaccctcaacccgctgaagctcctgctgagcagcctgggcatccccgtgaaccacctcatagagggctcccagaagtgtgtggctgagctgggtccccaggccgtgggggccgtgaaggccctgaaggccctgctgggggccctgacagtgtttggctgagccgagactggagcatctacacctgaggacaagacgctgcccacccgcgagggctgaaaaccccgccgcggggaggaccgtccatccccttcccccggcccctctcaataaacgtggttaagagc

SEQ ID NO: 313 - DNA, 1689 bp, Artificial
  cDNA Sequence
cttttcttaacaggcatgcccaaagaaaaatacgagccccctgaccctcggaggatgtatacaattatgtcttctgaggaagcagcaaatggaaagaaatcccactgggcagagcttgaaataagtggaaaagtaagaagcttaagcgcatctttgtggtcactaactcacctgacagctttgcatttgagtgacaattccctgtcccgaattccttcagacattgccaagcttcacaatctggtgtatttggacctgtcatctaataaaattcgtagcttacccgcagaactcggaaacatggtatcactcagggagctccatttaaataacaacctgttacgagttctaccttttgagctgggaaaactgtttcagttgcagactttaggcctgaaaggaaatccccttacccaggatatattgaacctttatcaggaaccagatggaacaagacggctgctgaactatttgcttgataatttgtcaggtactgcaaaaagaattacaacagaacaaccacctccaaggtcttggattatgttacaagaaccagataggacaaggccaactgccttgttttctgtcatgtgctataatgttctttgtgataaatatgcgacccggcagttatacggctactgtccatcatgggcgctaaactgggactacaggaaaaaggccattattcaagaaatcttgagctgcaatgctgatatcgtaagtcttcaggaggttgaaacggaacagtattacagtttttttctggtagagctgaaagaacgtggctataatggattcttcagtcctaagtctagagctaggacaatgtcagaacaagaaaggaaacatgttgatggctgtgcaatattcttcaagacagaaaaatttactttggttcagaaacacactgttgaatttaatcagctagccatggcaaattctgaggggtctgaagctatgctgaacagagtcatgacaaaagataacattggggttgcagtactgctagaacttcggaaggaatcgattgaaatgccgtccggaaagccacatcttggaacagaaaaacaacttattcttgtggctaacgcccacatgcattgggaccctgaatactctgatgtgaagttggtacaaactatgatgttcctctcagaagtgaagaacattattgataaagcctctcgcaacctcaaatccagtgttttgggagaatttggaactattccacttgtgttatgtgcagatcttaattctttgccagactctggtgttgtagaatatttgagcacaggtggagtagaaacaaatcacaaagactttaaggagttgaggtataatgaaagtctcacaaacttcagctgtcatgggaagaatggaaccaccaatggaaggatcactcatggtttcaagttacagagtgcctatgagagtggcctgatgccttacacgaattacacatttgatttcaagggtataatagactacattttctattctaaacctcagctgaacaccttaggcatcctgggccctctggaccaccactggctggttgagaataacatcagtggctgcccgcaccccctcatcccctctgaccacttctcactttttgcacaactggagctcttactgcctttcctgccccaagtcaacggcatccaccttcctggcaggaggtag

SEQ ID NO: 314 - DNA, 4767 bp, Artificial
  cDNA Sequence
cccacgcgcagcggccggagatgcagcggggcgccgcgctgtgcctgcgactgtggctctgcctgggactcctggacggcctggtgagtggctactccatgacccccccgaccttgaacatcacggaggagtcacacgtcatcgacaccggtgacagcctgtccatctcctgcaggggacagcaccccctcgagtgggcttggccaggagctcaggaggcgccagccaccggagacaaggacagcgaggacacgggggtggtgcgagactgcgagggcacagacgccaggccctactgcaaggtgttgctgctgcacgaggtacatgccaacgacacaggcagctacgtctgctactacaagtacatcaaggcacgcatcgagggcaccacggccgccagctcctacgtgttcgtgagagactttgagcagccattcatcaacaagcctgacacgctcttggtcaacaggaaggacgccatgtgggtgccctgtctggtgtccatccccggcctcaatgtcacgctgcgctcgcaaagctcggtgctgtggccagacgggcaggaggtggtgtgggatgaccggcggggcatgctcgtgtccacgccactgctgcacgatgccctgtacctgcagtgcgagaccacctggggagaccaggacttcctttccaaccccttcctggtgcacatcacaggcaacgagctctatgacatccagctgttgcccaggaagtcgctggagctgctggtaggggagaagctggtcctgaactgcaccgtgtgggctgagtttaactcaggtgtcacctttgactgggactacccagggaagcaggcagagcggggtaagtgggtgcccgagcgacgctcccagcagacccacacagaactctccagcatcctgaccatccacaacgtcagccagcacgacctgggctcgtatgtgtgcaaggccaacaacggcatccagcgatttcgggagagcaccgaggtcattgtgcatgaaaatcccttcatcagcgtcgagtggctcaaaggacccatcctggaggccacggcaggagacgagctggtgaagctgcccgtgaagctggcagcgtaccccccgcccgagttccagtggtacaaggatggaaaggcactgtccgggcgccacagtccacatgccctggtgctcaaggaggtgacagaggccagcacaggcacctacaccctcgccctgtggaactccgctgctggcctgaggcgcaacatcagcctggagctggtggtgaatgtgcccccccagatacatgagaaggaggcctcctcccccagcatctactcgcgtcacagccgccaggccctcacctgcacggcctacggggtgcccctgcctctcagcatccagtggcactggcggccctggacaccctgcaagatgtttgcccagcgtagtctccggcggcggcagcagcaagacctcatgccacagtgccgtgactggagggcggtgaccacgcaggatgccgtgaaccccatcgagagcctggacacctggaccgagtttgtggagggaaagaataagactgtgagcaagctggtgatccagaatgccaacgtgtctgccatgtacaagtgtgtggtctccaacaaggtgggccaggatgagcggctcatctacttctatgtgaccaccatccccgacggcttcaccatcgaatccaagccatccgaggagctactagagggccagccggtgctcctgagctgccaagccgacagctacaagtacgagcatctgcgctggtaccgcctcaacctgtccacgctgcacgatgcgcacgggaacccgcttctgctcgactgcaagaacgtgcatctgttcgccacccctctggccgccagcctggaggaggtggcacctggggcgcgccacgccacgctcagcctgagtatcccccgcgtcgcgcccgagcacgagggccactatgtgtgcgaagtgcaagaccggcgcagccatgacaagcactgccacaagaagtacctgtcggtgcaggccctggaagcccctcggctcacgcagaacttgaccgacctcctggtgaacgtgagcgactcgctggagatgcagtgcttggtggccggagcgcacgcgcccagcatcgtgtggtacaaagacgagaggctgctggaggaaaagtctggagtcgacttggcggactccaaccagaagctgagcatccagcgcgtgcgcgaggaggatgcgggacgctatctgtgcagcgtgtgcaacgccaagggctgcgtcaactcctccgccagcgtggccgtggaaggctccgaggataagggcagcatggagatcgtgatccttgtcggtaccggcgtcatcgctgtcttcttctgggtcctcctcctcctcatcttctgtaacatgaggaggccggcccacgcagacatcaagacgggctacctgtccatcatcatggaccccggggaggtgcctctggaggagcaatgcgaatacctgtcctacgatgccagccagtgggaattcccccgagagcggctgcacctggggagagtgctcggctacggcgccttcgggaaggtggtggaagcctccgctttcggcatccacaagggcagcagctgtgacaccgtggccgtgaaaatgctgaaagagggcgccacggccagcgagcaccgcgcgctgatgtcggagctcaagatcctcattcacatcggcaaccacctcaacgtggtcaacctcctcggggcgtgcaccaagccgcagggccccctcatggtgatcgtggagttctgcaagtacggcaacctctccaacttcctgcgcgccaagcgggacgccttcagcccctgcgcggagaagtctcccgagcagcgcggacgcttccgcgccatggtggagctcgccaggctggatcggaggcggccggggagcagcgacagggtcctcttcgcgcggttctcgaagaccgagggcggagcgaggcgggcttctccagaccaagaagctgaggacctgtggctgagcccgctgaccatggaagatcttgtctgctacagcttccaggtggccagagggatggagttcctggcttcccgaaagtgcatccacagagacctggctgctcggaacattctgctgtcggaaagcgacgtggtgaagatctgtgactttggccttgcccgggacatctacaaagaccccgactacgtccgcaagggcagtgcccggctgcccctgaagtggatggcccctgaaagcatcttcgacaaggtgtacaccacgcagagtgacgtgtggtcctttggggtgcttctctgggagatcttctctctgggggcctccccgtaccctggggtgcagatcaatgaggagttctgccagcggctgagagacggcacaaggatgagggccccggagctggccactcccgccatacgccgcatcatgctgaactgctggtccggagaccccaaggcgagacctgcattctcggagctggtggagatcctgggggacctgctccagggcaggggcctgcaagaggaagaggaggtctgcatggccccgcgcagctctcagagctcagaagagggcagcttctcgcaggtgtccaccatggccctacacatcgcccaggctgacgctgaggacagcccgccaagcctgcagcgccacagcctggccgccaggtattacaactgggtgtcctttcccgggtgcctggccagaggggctgagacccgtggttcctccaggatgaagacatttgaggaattccccatgaccccaacgacctacaaaggctctgtggacaaccagacagacagtgggatggtgctggcctcggaggagtttgagcagatagagagcaggcatagacaagaaagcggcttcagctgtaaaggacctggccagaatgtggctgtgaccagggcacaccctgactcccaagggaggcggcggcggcctgagcggggggcccgaggaggccaggtgttttacaacagcgagtatggggagctgtcggagccaagcgaggaggaccactgctccccgtctgcccgcgtgactttcttcacagacaacagctactaagcagcatcggacaagacccccagcacttgggggttcaggcccggcagggcgggcagagggctggaggcccaggctgggaactcatctggttgaactctggtggcacaggagtgtcctcttccctctctgcagacttcccagctaggaagagcaggactccaggcccaaggctcccggaattccgtcaccacgactggccagggccacgctccagctgccccggcccctccccctgagattcagatgtcatttagttcagcatccgcaggtgctggtcccggggccagcacttccatgggaatgtctctttggcgacctcctttcatcacactgggtggtggcctggtccctgttttcccacgaggaatctgtgggtctgggagtcacacagtgttggaggttaaggcatacgagagcagaggtctcccaaacgccctttcctcctcaggcacacagctactctccccacgagggctggctggcctcacccacccctgcacagttgaagggaggggctgtgtttccatctcaaagaaggcatttgcagggtcctcttctgggcctgaccaaacagccaactagcccctggggtggccaccagtatgacagtattatacgctggcaacacagaggcagcccgcacacctgcgcctgg

SEQ ID NO: 315 - DNA, 2320 bp, Artificial
  cDNA Sequence
ctgcagcctgcctggaagctgaaggaaaggtgggggcattgtaggacaccttgaacccaggtctcccaacttcacaggactcccttcctccgcccaggagttttaaggaagaggaacttcctggtgggacatattgagtgccaaacgtgtgttcacataaaaaatcaagagatcagggcatgagtctgcatctgaaaactcgagtaaaaaatccggtgtatgctgttaatggaaagaacagaatatgacacttgcatgccgcatattctcacttcgttccttgggggtgtgctgctacctctggtcactggcatcggacttttcttccttctttctactttcctacatctcccaagttttgtattttgagcatgtgttagcattataactgctaaacaggaaagatggcctttaaaaagaaagtgaagtgtaaaagtttgagggtgatgaaataaatgtgcttgaggaagaaaaagcaatctcagtttaatcctatggttgccccaggaggcactaatttatcccttctgcttttcaagtgaggaagctgcagcttggcgtagttctggggggagtatgaagctgccttggtttaggtgatggagcacaggtccacagacatgtgtgggtgcatctgtggcaggggagaaaagagcatgtgtccagactacagcttgttcagagctgggacactgacaatagagcacgcactgcgtgcgtaggtgggtgtgtctccgatcctccagcagtgacagggacgaagccttgccctgtgggatgactcaggccactggccaaatgttatgtctccatgttcaagtccctctccaacttctcctcctgggacagaaacagatggcagcggagcaggagaaggtgggggcagagttccaggcactgagggctttcctggtggagcaggagggtcggctgctaggccgcctggaggaactgtcccgggaggtggcacagaagcagaatgagaacctggcccagctcggggttgagatcacccagctgtccaagctcagcagccagatccaggagacagctcaaaagcctgaccttgactttctccaggaattcaaaagcacgctgagcaggtgtagcaatgtgcctggccccaagccaaccacagtctcttctgagatgaagaataaagtctggaatgtttctctcaagacctttgtcttaaaagggatgctgaagaagttcaaagaggaccttcggggagagctggagaaagaggagaaagtggagctcaccttggatcccgacacggccaacccgcgcctcatcctctctctggatcttaagggcgtgcgcctcggcgagcgggcccaggacctgcccaaccacccctgccgcttcgacaccaacacccgcgtcctggcgtcctgcggcttctcctcgggccggcatcactgggaggtggaggtgggctctaaggacggctgggcctttggcgtggcccgcgagagcgtgcgccgaaagggcctgacgcccttcactcccgaggagggcgtctgggccctgcagctcaacggcggccagtactgggccgtgaccagccccgagcggtcgcccctcagctgcgggcacctgtcgcgcgtgcgggtggccctggacctggaggtgggagccgtgtccttctacgctgtggaggacatgcgccacctctacaccttccgcgtcaacttccaggagcgcgtgttcccgcttttctctgtttgctccacgggcacctacttgcgaatctggccttgaggggcactgctggggagctcctgtctctgggctgccggtgggaggggatgtcgcctccccagagatgcctggtccgtcttgggtctgccctccgtgctcctgacccctgctgcccaagagagcctgctacagacacaaccccgaggcaggagagtgactgtggccaaccgagcaggggaacaggggctttggactcctgagggtgttcccttcctgaggtcacatgtggatttggccagagccttcaggaggtggaggccggtgaggtcaggagcccagctctccagggggcttctgccctgactgggaagggtgcctggctccctaaaacaatgtcaaagccagtcctgctgttctctgttgccagggggcaggtctgggcctgggccaaccacgtttgttatcatggctgctgccttctggacagctgccagctctgccttgagaggttgtgggacctctggatccagctgacctgacaggtcatctactcagggaggagccctgtgctcccagctcagaggacagtctgggccagaactggaaggagaca

SEQ ID NO: 316 - DNA, 2168 bp, Artificial
  cDNA Sequence
aattttagaaggaaaaaatttattcagatgatgtgatagccatgtcactgttaagcctgaacttttctttcctgggtggtgtgaaaggtgcaagaaaacacaagctgcttttaataacactcttgcactgctttctccccaaagctagatatatcaaaacattaaaaaataaaaaagctttttaaggtgtaaggagcaaatggaatagtggataaagccttttcatctgtttagtcattttacacccaagtttctctggagtatttgcctggaagtttctaatcaaaaccattagactttgagtttcacaaactcctcttgaagctcttccagtgaggcctgcacatcggtatgaaacacattctttccaaaagctaccactggtagattttaagaacaagctcaggagcacatcactcaaaataattccaagtatttcactttttcccttcaaataacacttcatgaatctggtccttgaaagactagccaagaaaattagacatttttagcattagtttgctcatacatacatttgctatatttttatggttgtatttttggcaagttttgtttgatgtatttcataatgaacggcgaaattggtgtttgcccattgacatttcagtgtcaatgtattttaagcttcagtgtgttaaaactctgttgaaaattttaacttttgaaatgttcaagtatagattatttttcattgttcttccaaccttggggttgttctgtccacaagttcagcagaatccgtttttctttggcaaccaagaaacttcaatatgtaacagaaaacatggaatggcatttagatcttcaaaaagcagggcaaactggaatggaatgtactgtttctcacagtggtctatgctgacagcaaggctgaagatttccagtaggttatgggtaatcagtgaaagttcatgcttggtggtgacagctgcagtacatcttgaataccagttttcttcaatctttgccaaaaacccaaatttaacacagtttgctgtagtgccattaagatatactcctatacaatttcctccaactcggttcatttgatacagctgcaaaaatactgtctttggtggtcaagtagaaggctcacgaaaacagcacacccacagttttgaaagccttattctgaatgtaagcaaagtacagttttcttcatcagtagattcatctcaaccaacagcaataaaagatgagccgatttttttttttttttgagatggagtcttgctctattgcccaggctggagtgcagtggctcagtctcggcttactgcaagctccgcctcccaggttcatgtcattctcctgcctcagcctcttgcgagctgatgttttttaagatctgaagtttgatatatacagtcattaattcagagttaagactgcagaagtagatgaagaaattctggaattccttaatttatttgtggcagcactcagaatgcaaggtttcacaagtgtctccatttttttctcctttgcaattaaaagggctgtttaatattaagctttcacggcttggaagattcctgtgaatatttcaatactgtccagtcttaaagctgcagagaatcgggctttgcagaacactccactgtttttaatggcatgaatttaacagtgtttggcatggtgtcactgcccaacactttcagataactcaactgaagaagttgaccctatcttctgcaaaataacatgagtatatacttgagaaaagcctcaacatttttttttggctgccatttttagctacctcaaaggagataacagaaaaacaaggagtactgatgatggaagcatctggtccctcttgcagagtgatgaatgattttattggtggcagctgggtggcaggacaatccaggcatccagttatgcctgatccccaataagtgaaatctttgttcattttctttttatacacccgtctgcttcctaaaacctgacaccatttaatggtgcccttggtcaaatctaaatgatcttactttcataattctttgattctagcttgcagagtcaagacgaactctaactcatgggatggacaaactggaagatgtaaaataagtaaggctttctgggccaaaaagcctcttcttacagaaaatcaaattttaaaagaacattgacctcaa

SEQ ID NO: 317 - DNA, 747 bp, Artificial
  cDNA Sequence
atgaaaataaatgacagctcaggggaagacttcatcttagttggcttctcagaatatccccaggctgagttcatcctttctctgtttgtctccgggttctacaccatgacattcacagggaacacagccatcatcttggtctctctgctggactaccggctccgcaccccaatgtacttcttcctccgaaagctctcatttctggacatgtgtttcaccacctgcattgtccttcagatgctggtgaacatctggggagagagtaagaaggtcagctatgtaggctgcatggttcagtattctgtagccttggctcttggctccacagaccttgtcctggttttctgggttagccaactctctctttcactcttcactaaccaccattttgcctctgtgtggccaccgccgtgtggaccatttctttgtgaggtcctgctcattgtcaagctgtcctgcgtggacaccggcccaactgaattgaagatgttaattgctcgtgtgatcatccttgcccttccagtgtgcaccatcctcacctcctatgcctgcattgccagggctgtgctgaggctgcagtctgctgaaggtcagcagaaggcctttgggacttgtgcctcccacctgatggtggtcttgctgttctatggaaccatcatgttcatgtgtcttcagctgaagagtaactactctcagattcagggaaagctgcttcctcttgtttataccattgctgcccccacctag

SEQ ID NO: 318 - DNA, 2694 bp, Artificial
  cDNA Sequence
ctggcgcggggtgggacacccccatgcgggatgaagactacgagggtgacatggaggaggaggtcgaggaggaagaagagggtgtgttctggaccagtggcatgagcaggtccagctgggacaacatggactatgtgtgggaggaggaggacgaggaggaagacctggactactacttgggggacatggaggaggaggacctgaggggggaggatgaggaggacgaggaggaagtgctggaggaggttgaggaagaggatctagaccccgtcaccccactgcccccgcctccagcccctcggaggtgcttcacatgccctcagtgccgaaagagctttcctcggcggagcttccgccccaacctgcagctggccaatatggtccaggtgattcggcagatgcacccaacccctggtcgagggagccgcgtgaccgatcagggcatctgtcccaaacaccaagaagccctgaagctcttctgcgaggtagacgaagaggccatctgtgtggtgtgccgagaatccaggagccacaaacagcacagcgtggtgccattggaggaggtggtgcaggagtacaaggccaaactgcaggggcacgtggaaccactgaggaagcacctggaggcagtgcagaagatgaaagccaaggaggagaggcgagtgacagaactgaagagccagatgaagtcagagctggcagcggtggcctcggagtttgggcgactgacacggtttctggctgaagagcaggcagggctggaacggcgtctcagagagatgcatgaagcccagctggggcgtgcgggagccgcggctagtcgccttgcagaacaggccgcccagctcagccgcctgctggcagaggcccaggagcggagccagcaggggggtctccggctgctccaggacatcaaggagactttcaataggtgtgaagaggtacagctgcagcccccagaggtctggtcccctgacccgtgccaaccccatagccatgacttcctgacagatgccatcgtgaggaaaatgagccggatgttctgtcaggctgcgagagtggacctgacgctggaccctgacacggctcacccggccctgatgctgtcccctgaccgccggggggtccgcctggcagagcggcggcaggaggttgctgaccatcccaagcgcttctcggccgactgctgcgtactgggggcccagggcttccgctccggccggcactactgggaggtagaggtgggcgggcggcggggctgggcggtgggtgctgcccgtgaatcaacccatcataaggaaaaggtgggccctgggggttcctccgtgggcagcggggatgccagctcctcgcgccatcaccatcgccgccgccggctccacctgccccagcagcccctgctccagcgggaagtgtggtgcgtgggcaccaacggcaaacgctatcaggcccagagctccacagaacagacgctgctgagccccagtgagaaaccaaggcgctttggtgtgtacctggactatgaagctgggcgcctgggcttctacaacgcagagactctagcccacgtgcacaccttctcggctgccttcctgggcgagcgtgtctttcctttcttccgggtgctctccaagggcacccgcatcaagctctgcccttgattatcctgccacccgcaggggcccctctgtcagcacttggggggtgggtggtggagggtggcccgtaagtttgagggctcaaaggctcttcccactgcttgttactgtgttgcttcccactcccccttgaccccaggcccctgcttctccctctaggagcctaaagaaccctcctggcctccagctcagccttctctcacctactatgtctgtccaacaggtctgcatgggtccctgataatgagaacagctgcctggtcttctctcccagtctgcctagcccagccctgggactggaatttgagtaggggatgaggggaaattgtaatttcattccttaacttccttttccccacccctgctcttcaacctctttatcagttctgaggctggagggtttgggcaaggcaacatccccattccaattccattttctgatgcagattttagctgagggatttggaagccatttggggaggcaggctgggccaaagggtagagctgggtaataaatgtctattctcctggggaggagggattctaaactttccttccgtcctcaatttctacctccatagaccggccagaatttagcttcacttgagagagatctggaatggtcgccatgattgaaaccacgcaccattacatcatcattacattaattacatcaacataaattatttcttcccccttcccttttccagcactcaaccaaggagcaaagctcatcccaccccacacccctcccaggtctgctcactgccaggctcctctcccctttgttcagtggagctggcttttctcccagcccctttccatgcctttcactccatttggcaagctctgagggggagcctggggacgggtttgggtccccaggaggagagccttgggtataatctatttttctaggagcctcttgccttgtcacttgcagctttcgccctctgctttgatggctgaggtgaactcatgttctttgggaaaagggaaggcgtgctgtggaaataaaatgtttatttgcttctct

SEQ ID NO: 319 - DNA, 1912 bp, Artificial
  cDNA Sequence
ggtgtgcgccatctgcctcgattacttcacggaccccgtgtccatcggctgcgggcacaacttctgccgagtttgtgtaacccagttgtggggtggggaggatgaggaggacagagatgagttagatcgggaggaggaggaggaggacggagaggaggaggaagtggaggctgtgggggctggcgcggggtgggacacccccatgcgggatgaagactacgagggtgacatggaggaggaggtcgaggaggaagaagagggtgtgttctggaccagtggcatgagcaggtccagctgggacaacatggactatgtgtgggaggaggaggacgaggaggaagacctggactactacttgggggacatggaggaggaggacctgaggggggaggatgaggaggacgaggaggaagtgctggaggaggttgaggaagaggatctagaccccgtcaccccactgcccccgcctccagcccctcggaggtgcttcacatgccctcagtgccgaaagagctttcctcggcggagcttccgccccaacctgcagctggccaatatggtccaggtgattcggcagatgcacccaacccctggtcgagggagccgcgtgaccgatcagggcatctgtcccaaacaccaagaagccctgaagctcttctgcgaggtagacgaagaggccatctgtgtggtgtgccgagaatccaggagccacaaacagcacagcgtggtgccattggaggaggtggtgcaggagtacaaggccaaactgcaggggcacgtggaaccactgaggaagcacctggaggcagtgcagaagatgaaagccaaggaggagaggcgagtgacagaactgaagagccagatgaagtcagagctggcagcggtggcctcggagtttgggcgactgacacggtttctggctgaagagcaggcagggctggaacggcgtctcagagagatgcatgaagcccagctggggcgtgcgggagccgcggctagtcgccttgcagaacaggccgcccagctcagccgcctgctggcagaggcccaggagcggagccagcaggggggtctccggctgctccaggtgtgaagaggtacagctgcagcccccagaggtctggtcccctgacccgtgccaaccccatagccatgacttcctgacagatgccatcgtgaggaaaatgagccggatgttctgtcaggctgcgagaggtggacctgacgctggaccctgacacggctcacccggccctgatgctgtcccctgaccgccggggggtccgcctggcagagcggcggcaggaggttgctgaccatcccaagcgcttctcggccgactgctgcgtactgggggcccagggcttccgctccggccggcactactgggagggagcctaaagaaccctcctggcctccagctcagccttctctcacctactatgtctgtccaacaggaccggccagaatttagcttcacttgagagagatctggaatggtcgccatgattgaaaccacgcaccattacatcatcattacattaattacatcaacataaattatttcttcccccttcccttttccagcactcaaccaaggagcaaagctcatcccaccccacacccctcccaggtctgctcactgccaggctcctctcccctttgttcagtggagctggcttttctcccagcccctttccatgcctttcactccatttggcaagctctgagggggagcctggggacgggtttgggtccccaggaggagagccttgggtataatctatttttctaggagcctcttgccttgtcacttgcagctttcgccctctgctttgatggctgaggtgaactcatgttctttgggaaaagggaaggcgtgctgtggaaataaaatgtttatttgcttctc

SEQ ID NO: 320 - DNA, 894 bp, Artificial
  cDNA Sequence
atggctggttatgccactactcccagccccatgcagacccttcaggaggaagcggtgtgtgccatctgcttggattacttcaaggaccccgtgtccatcagctgtgggcacaacttctgccgagggtgtgtgacccagctgtggagtaaggaggacgaggaggaccagaacgaggaggaagatgaatgggaggaggaggaggacgaggaagcggtgggggccatggatggatgggacggctccattcgagaggtgttgtatcgggggaatgctgacgaagagttgttccaagaccaagatgacgatgaactctggctcggtgacagtggtataactaattgggacaacgtagactatatgtgggacgaggaggaagaagaagaagaggaagatcaggactattacctaggaggcttgagacctgacctgagaattgatgtctaccgagaagaagaaatactggaagcatacgatgaggacgaagatgaagagctgtatcctgacatccacccgcctccttccttgccccttccagggcagttcacctgcccccagtgccgaaagagctttacacgtcgcagctttcgtcccaacttgcagctggccaacatggtccagataattcgccagatgtgccccactccttatcggggaaaccggagtaatgatcagggcatgtgctttaaacaccaggaagccctgaaactcttctgtgaggtggacaaagaggccatctgtgtggtgtgccgagaatccaggagccacaaacagcacagcgtgctgcctttggaggaggtggtgcaggagtaccaggaaataaagttggaaacaactctggtgggaatacttcagatagagcaagaaagcattcacagcaaggcctataatcagtaa

SEQ ID NO: 321 - DNA, 1169 bp, Artificial
  cDNA Sequence
ggcggggggcttttctctctctctttcactgcaaggcggcggcaggagaggttgtggtgctagtttctctaagccatccagtgccatcctcgtcgctgcagcgacacacgctctcgccgccgccatgactgagcagatgacccttcgtggcaccctcaagggccacaacggctgggtaacccagatcgctactaccccgcagttcccggacatgatcctctccgcctctcgagataagaccatcatcatgtggaaactgaccagggatgagaccaactatggaattccacagcgtgctctgcggggtcactcccactttgttagtgatgtggttatctcctcagatggccagtttgccctctcaggctcctgggatggaaccctgcgcctctgggatctcacaacgcaagtagctgctcacttagctctggggccttgggaagaatctgggcagaagggcaccaccacgaggcgatttgtgggccataccaaggatgtgctgagtgtggccttctcctctgacaaccggcagattgtctctggatctcgagataaaaccatcaagctatggaataccctgggtgtgtgcaaatacactgtccaggatgagagccactcagagtgggtgtcttgtgtccgcttctcgcccaacagcagcaaccctatcatcgtctcctgtggctgggacaagctggtcaaggtatggaacctggctaactgcaagctgaagaccaaccacattggccacacaggctatctgaacacggtgactgtctctccagatggatccctctgtgcttctggaggcaaggatggccaggccatgttatgggatctcaacgaaggcaaacacctttacacgctagatggtggggacatcatcaacgccctgtgcttcagccctaaccgctactggctgtgtgctgccacaggccccagcatcaagatctgggatttagagggaaagatcattgtagatgaactgaagcaagaagttatcagtaccagcagcaaggcagaaccaccccagtgcacctccctggcctggtctgctgatggccagactctgtttgctggctacacggacaacctggtgcgagtgtggcaggtgaccattggcacacgctagaagtttatggcagagctttacaaataaaaaaaaaactggc

SEQ ID NO: 322 - DNA, 1463 bp, Artificial
  cDNA Sequence
gcatcccggtggggagaagggccaggcagagaaaagtagtcagaaacagagcaacaggtgaggctgaggcaggagattgagctgacactcaagccaaggaagggggaattaggaaacaattagaaaaaaagtaaagacagtgaaaaagtcagagacagctgcctgcacctacacacacattcagagacagagtcccagagggtggcatacacagagggagaaggggagggaacaggtgtggagaggagctgcggaagcagagaaatctcaagtcagagattcagggacacttggtccccgtggcgagccatggaagcagaaaggaggcgccaggctgagaagccaaagaaggggcgagtcggcagcaacctgttgcctgagagacacccggccactgggaccccgaccaccacggtggactcgagtgctccaccctgcagaaggctccctggtgcaggaggggggagatcaaggttctccccgcaaggaggacagaggggccgcccgcactcccggcgccgccaccgcaccaccttcagcccagtgcagttggaacagctggagtcagcctttgggaggaaccagtaccccgacatctgggcccgagagagtcttgcccgggacactggcctcagtgaggcccgaatccaggtctggttccagaaccgcagagctaagcaacggaagcaagagcgctcactgcttcagcctctggcccatctgtctcctgccgccttttccagcttcttgccagagtccactgcttgcccctattcttacgcagcaccaccaccaccagtgacctgcttccctcacccctacagccatgccctcccttcccagccctccacaggaggcgcctttgctttgtcacaccagtctgaggactggtaccctaccttgcacccagcccctgccggccatctgccctgccccccaccccctcccatgctccccctcagccttgagccatccaagtcctggaactgaggtcaaacaagtaccaccaaggtgatccccagcctgcggccctcgtgaaaagacaagaaaatggggtggcttcctttccatctatgggtgaagcagatgcatggtgagggtcagctcagcgattagaaatttaaaaatgggagatcatggtgaattctcactggggtgattagtggaggaagtctggggaggtgagctactggaagagacagggcaagatgcctcggtggagctgcctgctgaagggtgatattgatgaagacagttgctggtgagtggagatgattgaagggctaggaggtgagggccttcattaattgagatcacgattgaagaagatcccagctctttctggctgatttcagtaaggcttctgacttaagagtctacctatacatcccttccccattgcccaccccgccatctcaatcagtcactgacttttgtttattctgtcctagaaataccttttt

SEQ ID NO: 323 - DNA, 1044 bp, Artificial
  cDNA Sequence
cgcagtggctgccgctcctcgagttgggggccccctcggacaccgccaggcagacggcgagtaccgagcgtgggtggccgcggtgtccgtgggccacgctcagctgcggtcagaggcgacatgagcgtccccggggaggacgaagagctggagagcgccaaggacgacgagcgcagctgcggccgcgagtcggacgaagacactgaggatgctagtgaaactgacctggcaaagcatgatgaagaagactatggggaagtgaaggaacagatgtatcaggacaaactggcttctctcgagaggcagttgcaacaactacaagaaggtacattacaggaatatcagaagagaatgaaaaaactaggtcagcagtacaaagagaggatacggaatgctgaactcttcctccagctggaaactgaacaagtgggacgaaattacatgaaagaaaagaaggcagcagtgaaagaatttgaagacaagaaggttgagctgaaagagaacctgattgctgagctagcagaagagaagaaaatgattgaaaacgaaatgctgacaatggaactgaatggagattctatgcaggtgagacctatcatgaccagaaagttgcggaggcgaccaaatgatcccgtccccatcccagacaagaggaggaaacctgctccagcccagctaaactatttgttaacagatgaacagatcatggaggatctgagaacattaaataagcttaagtcacccaagagaccagcatctccatcctctcctgagcacttgcctgcgacacccgcggaatctccagcccagaggtttgaagctcggatagaagatggcaaactgcactatgacaaaagatggtaccacaagagccaggccatctatctggagtcaaaggacaaccagaaactgagctgcgtgatcagttctgtaggagccaatgagatctgggtgaggaagacaagtgacagcaccaagatgaggatctacctgggccagcttcagcgcgggctcttcgtcatccaccggcgctcagctgcttga

SEQ ID NO: 324 - DNA, 1945 bp, Artificial
  cDNA Sequence
agttcctgcgcgggactgccaaggcacgaccacgggccggaaggctgccaggcccagtgggcaagcgaagaaatgaaccaccgcaacgcgggcgcttcggggcggggccgagtgcgaacctgagccccaaatcccgacccaggcaggggcggggcccggagcggggccttggaggcccagcccgcgcggcgacgtctccgcgtggcgtcacggcaccgactgacggccacccaccatggccgcagaccagcgcccgaaggccgacacgctggccctgaggcaacggctcatcagctcttcctgcagactcttttttcccgaggatcctgttaagattgtccgggcccaagggcagtacatgtacgatgaacagggggcagaatacatcgattgcatcagcaatgtggcgcacgttgggcactgccaccctctcgtggtccaagcagcacatgagcagaaccaggtgctcaacaccaacagccggtacctgcatgacaacatcgtggactatgcgcagaggctgtcagagaccctgccggagcagctctgtgtgttctatttcctgaattctgggtcagaagccaatgacctggccctgaggctggctcgccactacacgggacaccaggacgtggtggtattagatcatgcgtatcacggccacctgagctccctgattgacatcagtccctacaagttccgcaacctggatggccagaaggagtgggtccacgtggcacctctcccagacacctaccggggcccctaccgggaggaccaccccaacccagctatggcctatgccaacgaggtgaaacgtgtggtcagcagtgcacaggagaagggcaggaagattgcagccttcttcgctgagtctctgcccagtgtgggagggcagatcattccccctgctggctacttctcccaagtggcagagcacatccgcaaggccggaggggtctttgttgcagatgagatccaggttggctttggccgggtaggcaagcacttctgggccttccagctccagggaaaagacttcgtccctgacatcgtcaccatgggcaagtccattggcaacggccaccctgttgcctgcgtggccgcaacccagcctgtggcgagggcatttgaagccaccggcgttgagtacttcaacacgtttgggggcagcccagtgtcctgcgctgtggggctggccgtcctgaatgtcttggagaaggagcagctccaggatcatgccaccagtgtaggcagcttcctgatgcagctcctcgggcagcaaaaaatcaaacatcccatcgtcggggatgtcaggggtgttgggctcttcattggtgtggatctgatcaaagatgaggccacaaggacaccagcaactgaagaggctgcctacttggtatcaaggctgaaggagaactacgttttgctgagcactgatggccctgggaggaacatcctgaagtttaagcccccaatgtgcttcagcctggacaatgcacggcaggtggtggcaaagctggatgccattctgactgacatggaagagaaggtgagaagttgtgaaacgctgaggctccagccctaagccagccctgctctgcctaagtgtactccagaagaaactcatctcatccaaatacacgctattgagaaggcgagcctgacctccctcttacagataaagtcagctttcagaggctcagggtgggggggcctgcccgaggccataatgctacccaccccctcctcctaaccactggtctgttggaataacccagatgtctgcatcccctcaagtcagtcaatttcctttctgtccactgggggtggaatggggtagggtgggatactttaaagtgctcctgcttaaataaattagaccagaccagtgtatttctaaagaaaatcctgacatgcacacccattaaaaatagtacatttt

SEQ ID NO: 325 - DNA, 2499 bp, Artificial
  cDNA Sequence
cttaggtcctgggcccccactgccaggctgggcccagcttgctcagtcaaggggctgccaggcccccagaaaacacttggagccatcgggtagcgatggtctatgccatggggaacacctccattggtgtggccaagctgcccccattcctatccacccctctccccaccccgtcctgtccatgcgcttccagggccccacggtccccaggaggacgcttcctggccaaagccccaagcctttggtgagaagccaattcccacttgacagaaggcgtccatccattcatctcattggccaaggacaaactctcctctgggacgtctgggactggcatttgtcccccactcaaattatcaaagctttctgctcagtcagttgtgtggggatggtgagggaagaggggtcacatgagggaggaaactgtatccatgcatgcatgataatgcgtggcagagactgcaacagggattgtgtgttcagagatcatatgcatatgtgtagggctggagcgtgtgtgtgtcttgagattgtgtgtgttgcagtcatcatatctatgtgttacagattgtgtatgttagccttgtgtatgtgtgcttgattgaggtggtgtatttgggttgaaattgtgtcatatgtgtgtgctatccatctcgtgtttagaggctgtatatgttagcttgtgtaagaatgtgttttcaaaacagtgtgtgtattgggagtgatgggtatgtgttaggtatgtgatgggttgtagaagcgtgtgtttgagagaattcagagacatttgaaggctgctgtgtgcatgtttgggggtctgaaaagacagttgtgtgcatggatgtgtgcgtggggagaaagaacgtgggtaagatgtcccttcccagccctgagaccactggtcacagttggccacctccaacgggagaccttgtccttggcctagagtcctcccacccttggggggctcctgcctgaggtcctcagaatcccactgcaatggacccaggcagcgccccaggaagccatgctgggcccccgccagggcctatcccaaaagcaggggccagggagggggcgacttgcctgcccctgaagcccttgttcccattggccccagtttgcattctgcaggttttccattttagtgggttctgcttttatttcagagacagacatgtgtcttctctgtccgtttccaataggtaaagccatatcagttagactgcaatactttaaacacgagacaaaacaatccatatgtttagggaacacaatgactatcattactgatgcagacctggctgtggagagcagctaatgtgtggcccagagagcctgtctgtgtggagcacgtagtgcacagaatacgtgagagttgctctggcaggggcagaatcctcacaggatcgcctgggaggtgaggtgtgtgtgacccactggatgggagggcaatgagtgtgcacatacaaatggggcagtgtgcatgcaacacacttaggggaggagtggccccagaattcagcacgcacacaacacacaagggagagaacccccagatgagaaaataggaaggagcaatcatttgtagatgggtgaaaaaagaatgaggttcaagggagcgtgcaccaggtgaggtgagcgtgtgtgctctcagggaagggcccaggatcccatgcctgggaggagctgccagagagaagcaaaaaggcggctgtggatcgccctgggctgggcaccagtgacaggtcaggatctccaaacatggacgtcctcccctccaaatccagaagctcccagaaggtgtccttaactgcaaagctgtgcagggtactcctccagatggaatcaggaagtcgagacaccatcccaggtgtgtgtaagagagagagagagaacagggaggatacagaagtattgcagcccagatcccctatcagggggacagctggtgggcaaagcagccaccccacagccttgtggctagagtacagtggggtagaccctccagccccaatagccctagtacccagctggcagggttgcccacccctgctgtccacctgctccatcctctagggttccacaggcccctgaccgcacagggaggctggggccagcctggtctcccaggcctgaggacatgcctcccaccaaatgtcccctgctccagtcccactcctgtcaccccacgctctgcactggggagaaaacgggaggtgctcgtgctggccctgggtgggagcggggagtcctggtgagaccccggtgagatggaccatcctgcccccgtgggggatcccctttcccacatccgtgctgtgtcattgttgctctgcttcctttcaatgtgtcagtgcctggggggaggggaggagcaccccctcagcccccctgaacctgaccaaaagccatggctgttgctcccccctttgtatgatgcaaatgctgaaatgtacaaaatcaaccatgacaacaaagaaaaagaccttgtacagc

SEQ ID NO: 326 - DNA, 1561 bp, Artificial
  cDNA Sequence
gcggcgccaggactgactgcgccgtggaggctgctgcagtgttgtgagttggaagctggggagctcggcatggcggtccccgctgcagccatggggccctcggcgttgggccagagcggccccggctcgatggccccgtggtgctcagtgagcagcggcccgtcgcgctacgtgcttgggatgcaggagctgttccggggccacagcaagacgcgcgagttcctggcgcacagcgccaaggtgcactcggtggcctggagttgcgacgggcgtcgcctagcctcggggtccttcgacaagacggccagcgtcttcttgctggagaaggaccggttggtcaaagaaaacaattatcggggacatggggatagtgtggaccagctttgttggcatccaagtaatcctgacctatttgttacggcgtccggagataaaaccattcgcatctgggatgtgaggactacaaaatgcattgccactgtgaacactaaaggggagaacattaatatctgctggagtcctgatgggcagaccattgctgtaggcaacaaggatgatgtggtgacctttattgatgccaagacacaccgttccaaagcagaagagcagttcaagttcgaggtcaacgaaatctcctggaacaatgacaataatatgttcttcctgacaaatggcaatggttgtatcaacatcctcagctacccagaactgaagcctgtgcagtccatcaacgcccatccttccaactgcatctgtatcaagtttgaccccatggggaagtactttgccacaggaagtgcagatgctttggtcagcctctgggatgtggatgagttagtgtgtgttcggtgcttttccaggctggattggcctgtaagaaccctcagtttcagccatgatgggaaaatgctggcgtcagcatcggaagatcattttattgacattgctgaagtggagacaggggacaaactatgggaggtacagtgtgagtctccgaccttcacagtggcgtggcaccccaaaaggcctctgctggcatttgcctgtgatgacaaagacggcaaatatgacagcagccgggaagccggaactgtgaagctgtttgggcttcctaatgattcttgagaggaggttgtagggagaggaggccccggcagaggtcttccttcatgtggttagtttggtctgttctctcggagttggtgggcaccctaaatatttgtaagttggtataaattgtaaacgtctctggtcaggctgcgcatttcattcttttgctttgtctgtgtattagctctttccattctttgcccccagcatgagttaactcgcgtggactctgcagtgcgagtagtgaccccaccataccttgtcctctggacctcctgtcttctctgcttctgggtgcatggtagactttgtggcatttgatacaacttggacaatacctagtttggagggaggggaatggaagggcatggaagtttttttaaataattaaaaatatatatatataattttgagaattgagcatttaataaactgacttttgttattatgg

SEQ ID NO: 327 - DNA, 459 bp, Artificial
  cDNA Sequence
atgttccatgagaacttggtgagggttgtggagaggttggctggtgcttctccgtcttcatacagatgtccagacaggggaccagaagtctcaggtctgagctctacctggaagcccctcacgtctgtagccatcaaacctccagataagacgagccctgaagcattttggttgcatcagaaaacagatggaaggccagtcttcacagatgcatatacttcatcctggcttccacccacagaggttgcatctgtgcagaaattcatcccagagcaccaggcaggtgggtgtcaactcctgctgagatttcgctgtatcaggaaactcatgcatctggtgcagatgtcccggagtggctctgacagtccagggctgggcagtggagacactgatgacagccttgagcagagtggttttagtagaaatggcagagacaaaagccaggctagaggagtttaa

SEQ ID NO: 328 - DNA, 1698 bp, Artificial
  cDNA Sequence
ggccgatcccaacgaggctccctggagcccgacgcagagcagcgccctggccgggccaagcaggagccggcatcatggattccttcaaagtagtgctggaggggccagcaccttggggcttccggctgcaagggggcaaggacttcaatgtgcccctctccatttcccggctcactcctgggggcaaagcggcgcaggccggagtggccgtgggtgactgggtgctgagcatcgatggcgagaatgcgggtagcctcacacacatcgaagctcagaacaagatccgggcctgcggggagcgcctcagcctgggcctcagcagggcccagccggttcagagcaaaccgcagaaggcctccgcccccgccgcggaccctccgcggtacacctttgcacccagcgtctccctcaacaagacggcccggccctttggggcgcccccgcccgctgacagcgccccgcagcagaatggacagccgctccgaccgctggtcccagatgccagcaagcagcggctgatggagaacacagaggactggcggccgcggccggggacaggccagtcgcgttccttccgcatccttgcccacctcacaggcaccgagttcatgcaagacccggatgaggagcacctgaagaaatcaagccaggtgcccaggacagaagccccagccccagcctcatctacaccccaggagccctggcctggccctaccgcccccagccctaccagccgcccgccctgggctgtggaccctgcgtttgccgagcgctatgccccggacaaaacgagcacagtgctgacccggcacagccagccggccacgcccacgccgctgcagagccgcacctccattgtgcaggcagctgccggaggggtgccaggagggggcagcaacaacggcaagactcccgtgtgtcaccagtgccacaaggtcatccggggccgctacctggtggcgctgggccacgcgtaccacccggaggagtttgtgtgtagccagtgtgggaaggtcctggaagagggtggcttctttgaggagaagggcgccatcttctgcccaccatgctatgacgtgcgctatgcacccagctgtgccaagtgcaagaagaagattacaggcgagatcatgcacgccctgaagatgacctggcacgtgcactgctttacctgtgctgcctgcaagacgcccatccggaacagggccttctacatggaggagggcgtgccctattgcgagcgagactatgagaagatgtttggcacgaaatgccatggctgtgacttcaagatcgacgctggggaccgcttcctggaggccctgggcttcagctggcatgacacctgcttcgtctgtgcgatatgtcagatcaacctggaaggaaagaccttctactccaagaaggacaggcctctctgcaagagccatgccttctctcatgtgtgagccccttctgcccacagctgccgcggtggcccctagcctgaggggcctggagtcgtggccctgcatttctgggtagggctggcaatggttgccttaaccctggctcctggcccgagcctggggctccctgggccctgccccacccaccttatcctcccaccccactccctccaccaccacagcacaccggtgctggccacaccagccccctttcacctccagtgccacaataaacctgtacccagctgtg

SEQ ID NO: 329 - DNA, 1651 bp, Artificial
  cDNA Sequence
cgacgcagagcagcgccctggccgggccaagcaggagccggcatcatggattccttcaaagtagtgctggaggggccagcaccttggggcttccggctgcaagggggcaaggacttcaatgtgcccctctccatttcccggctcactcctgggggcaaagcggcgcaggccggagtggccgtgggtgactgggtgctgagcatcgatggcgagaatgcgggtagcctcacacacatcgaagctcagaacaagatccgggcctgcggggagcgcctcagcctgggcctcagcagggcccagccggttcagagcaaaccgcagaaggcctccgcccccgccgcggaccctccgcggcctttgcacccagcgtctccctcaacaagacggcccggccctttgcccccgcccgctgacagcgccccgcagcagaatggacagccgctccgaccgctggtcccagatgccagcaagcagcggctgatggagaacacagaggactggcggccgcggccgggggccagtcgcgttccttccgcatccttgcccacctcacaggcaccgagttcagtaatgcaagacccggatgaggagcacctgaagaaatcaagccaggtgcccagaagccccagccccagcctcatctacaccccaggagccctggcctggccctaccgcccccagccctaccagccgcccgccctgggctgtggaccctgcgtttgccgagcgctatgccccggacaaaacgagcacagtgctgaccacagccagccggccacgcccacgccgctgcagagccgcacctccattgtgcaggcagctgccggaggggtgccaggagggggcagcaacaacggcaagactcccgtgtgtcaccagtgccacaaggtcatccggggccgctacctggtggcgctgggccacgcgtaccacccggaggagtttgtgtgtagccagtgtgggaaggtcctggaagagggtggcttctttgaggagaagggcgccatcttctgcccaccatgctatgacgtgcgctatgcacccagctgtgccaagtgcaagaagaagattacaggcgagatcatgcacgccctgaagatgacctggcacgtgcactgctttacctgtgctgcctgcaagacgcccatccggaacagggccttctacatggaggagggcgtgccctattgcgagcgagactatgagaagatgtttggcacgaaatgccatggctgtgacttcaagatcgacgctggggaccgcttcctggaggccctgggcttcagctggcatgacacctgcttcgtctgtgcgatatgtcagatcaacctggaaggaaagaccttctactccaagaaggacaggcctctctgcaagagccatgccttctctcatgtgtgagccccttctgcccacagctgccgcggtggcccctagcctgaggggcctggagtcgtggccctgcatttctgggtagggctggcaatggttgccttaaccctggctcctggcccgagcctggggctccctgggccctgccccacccaccttatcctcccaccccactccctccaccaccacagcacaccggtgctggccacaccagccccctttcacctccagtgccacaataaacctgtacccagctgtg

SEQ ID NO: 330 - DNA, 1567 bp, Artificial
  cDNA Sequence
cgacgcagagcagcgccctggccgggccaagcaggagccggcatcatggattccttcaaagtagtgctggaggggccagcaccttggggcttccggctgcaagggggcaaggacttcaatgtgcccctctccatttcccggctcactcctgggggcaaagcggcgcaggccggagtggccgtgggtgactgggtgctgagcatcgatggcgagaatgcgggtagcctcacacacatcgaagctcagaacaagatccgggcctgcggggagcgcctcagcctgggcctcagcagggcccagccggttcagagcaaaccgcagaaggtgcagacccctgacaaacagccgctccgaccgctggtcccagatgccagcaagcagcggctgatggagaacacagaggactggcggccgcggccggggacaggccagtcgcgttccttccgcatccttgcccacctcacaggcaccgagttcatgcaagacccggatgaggagcacctgaagaaatcaagccaggtgcccaggacagaagccccagccccagcctcatctacaccccaggagccctggcctggccctaccgcccccagccctaccagccgcccgccctgggctgtggaccctgcgtttgccgagcgctatgccccggacaaaacgagcacagtgctgacccggcacagccagccggccacgcccacgccgctgcagagccgcacctccattgtgcaggcagctgccggaggggtgccaggagggggcagcaacaacggcaagactcccgtgtgtcaccagtgccacaaggtcatccggggccgctacctggtggcgctgggccacgcgtaccacccggaggagtttgtgtgtagccagtgtgggaaggtcctggaagagggtggcttctttgaggagaagggcgccatcttctgcccaccatgctatgacgtgcgctatgcacccagctgtgccaagtgcaagaagaagattacaggcgagatcatgcacgccctgaagatgacctggcacgtgcactgctttacctgtgctgcctgcaagacgcccatccggaacagggccttctacatggaggagggcgtgccctattgcgagcgagactatgagaagatgtttggcacgaaatgccatggctgtgacttcaagatcgacgctggggaccgcttcctggaggccctgggcttcagctggcatgacacctgcttcgtctgtgcgatatgtcagatcaacctggaaggaaagaccttctactccaagaaggacaggcctctctgcaagagccatgccttctctcatgtgtgagccccttctgcccacagctgccgcggtggcccctagcctgaggggcctggagtcgtggccctgcatttctgggtagggctggcaatggttgccttaaccctggctcctggcccgagcctggggctccctgggccctgccccacccaccttatcctcccaccccactccctccaccaccacagcacaccggtgctggccacaccagccccctttcacctccagtgccacaataaacctgtacccagctgtg

SEQ ID NO: 331 - DNA, 754 bp, Artificial
  cDNA Sequence
agaacactggcggccgatcccaacgaggctccctggagcccgacgcagagcagcgccctggccgggccaagcaggagccggcatcatggattccttcaaagtagtgctggaggggccagcaccttggggcttccggctgcaagggggcaaggacttcaatgtgcccctctccatttcccggctcactcctgggggcaaagcggcgcaggccggagtggccgtgggtgactgggtgctgagcatcgatggcgagaatgcgggtagcctcacacacatcgaagctcagaacaagatccgggcctgcggggagcgcctcagcctgggcctcagcagggcccagccggttcagagcaaaccgcagaaggcctccgcccccgccgcggaccctccgcggtacacctttgcacccagcgtctccctcaacaagacggcccggccctttggggcgcccccgcccgctgacagcgccccgcagcagaatggacagccgctccgaccgctggtcccagatgccagcaagcagcggctgatggagaacacagaggactggcggccgcggccggggacaggccagtcgcgttccttccgcatccttgcccacctcacaggcaccgagttcatgcaagacccggatgaggagcacctgaagaaatcaagggaaaagtatgtcctggagctgcagagcccacgctacacccgcctccgggactggcaccaccagcgctctgcccacgtgctcaacgtgcagtcgtag

SEQ ID NO: 332 - DNA, 462 bp, Artificial
  cDNA Sequence
atggattccttcaaagtagtgctggaggggccagcaccttggggcttccggctgcaagggggcaaggacttcaatgtgcccctctccatttcccggctcactcctgggggcaaagcggcgcaggccggagtggccgtgggtgactgggtgctgagcatcgatggcgagaatgcgggtagcctcacacacatcgaagctcagaacaagatccgggcctgcggggagcgcctcagcctgggcctcagcagggcccagccggttcagagcaaaccgcagaaggcctccgcccccgccgcggaccctccgcggtacacctttgcacccagcgtctccctcaacaagacggcccggccctttggggcgcccccgcccgctgacagcgccccgcagcagaatgggtgcagacccctgacaaacagccgctccgaccgctggtcccagatgccagcaagcagcggctga

SEQ ID NO: 333 - DNA, 1723 bp, Artificial
  cDNA Sequence
atgactcggggagccagactgcgatcagacgcgcgtgcccagctgaaccagctgtctctagacggagggacgggaagtggccagaaggggaagtgtgaggagttcccgtccagcctgtcatcagtctccccaggtcttgaagcggcggccctgctcctggccgtgaccatggaccctctggagacccctatcaaggatggcatcctctaccagcagcatgtcaagtttggcaagaagtgctggcggaaggtgtgggctctgctgtatgcaggaggcccatcaggcgtggcacggctggagagctgggaggtccgggatggtggcctgggagcagcgggtgacaggtcggcagggcctggccggcgaggggagcgacgggtcatccgcctggctgactgtgtgtccgtgctgccggctgacggcgagagctgcccccgggacaccggtgccttcctgctcaccaccaccgagcgaagccatctactggctgctcagcaccgccaggcctggatgggccccatctgccagctggccttcccggggacaggggaggcctcctcaggatccacagatgcccagtctcccaagaggggcctggtccccatggaggaaaactccatctactcctcctggcaggaagtgggcgagtttcccgtggtggtgcagaggactgaggccgccacccgctgccagctgaaggggccggccctgctggtgctgggcccagacgccatccagctgagggaggccaagggcacccaggccctctacagctggccctaccacttcctgcgcaagttcggctccgacaagggcgtgttctcctttgaggccggccgtcgctgccactcgggtgagggcctctttgccttcagcaccccctgtgcccctgacctgtgcagggctgtggccggggccatcgcccgccagcgggagcggctgccagagctgaccaggccccagccctgccccctgccacgggccacctctctgccctccctggacacccccggagagcttcgggagatgccaccaggacctgagccacccacgtccaggaaaatgcacctggccgagcccggaccccagagcctgccgctactgctaggcccggagcccaacgatctggcgtccgggctctacgcttcagtgtgcaagcgtgccagtgggcccccaggcaatgagcacctctatgagaacctgtgtgtgctggaggccagccccacgctgcacggtggggaacctgagccgcacgagggccccggcagccgcagccccacaaccagtcccatctaccacaacggccaggacttgagctggcccggcccggccaacgacagtaccctggaggcccagtaccggcggctgctggagctggatcaggtggagggcacaggccgccctgaccctcaggcaggtttcaaggccaagctggtgaccctgctgagtcgtgagcggaggaagggcccagccccttgtgaccggccctgaacgcccagcagagtggtggccagaggggagaggtgctccccctgggacaggagggtgggctggtgggcaaacattgggcccatgcagacacacgcctgtgtccaccctggcctgcaggaacaaggcaggccgcctgtggaggacctcagccctgccctgccctcctcatgaatagtgtgcagactcacagataataaagctcagagcagctcccggcaggggcactcacggc

SEQ ID NO: 334 - DNA, 1789 bp, Artificial
  cDNA Sequence
atgggccccatctgccagctggccttcccggggacaggggaggcctcctcaggatccacagatgcccagtctcccaagaggggcctggtccccatggaggaaaactccatctactcctcctggcaggaagtgggcgagtttcccgtggtggtgcagaggactgaggccgccacccgctgccagctgaaggggccggccctgctggtgctgggcccagacgccatccagctgagggaggccaagggcacccaggccctctacagctggccctaccacttcctgcgcaagttcggctccgacaagatacttctgggaaccccaggcgtcagtctcctcatctgtaaaggagagagaaccgatgacgtatcaggcataatccttgatgagagtttgctgcgtgcctactcagtgccaggcgctgggggacacagccgtgttcaggacagccttggtcctgttctccgggagccgacattccagggggagagaagtttcctgaagacttccatgctgcgttccctcctctgctcctgctcctggcgccatcctaggagccagccacgcacgcaagcgtcatgcctccagggctctgactgcccagcccctcaccgcaactccacctcagctgcacacacccttggcacatcctgaacctcattttcatgacggacacacaatttttgctctctcctgtccaagcctcatcctctggccgccacctccttccagctcacttcctttagtgcggccagtaccgcccctgcctaggcatgtcgacctgcagggacccttttctggctcttcgaggcctctgcccaccatcccctctttgttctccatagtcccttccccctgttctctctcgtttcatcttactggtctggcaaagtccccggccttgggcgagcccagacctcctcagtgcctgcacacagctgcccacagccagagaaatccatttaagcagactgcctgcatccttcttaacagtgcaaggcaggcactccctgccacaagagaccctgttccctagtagggcagcttttctcctccccagaacctcctgtctatccccacccaatgtctcctcacaggcatattggggaaacaggtcgggctctcccaccgtatctgcaagtgtactggcatccatctgtcttcttcctacccctacagtagaaacagtgtctgtccccagctgtgctctgatcccggctcctttcacctcagagcttggaaaattgagctgtccccactctctcctgcgcccattcatcctaccagcagcttttccagccacacgcaaacatgctctgtaatttcacattttaaaccttcccttgacctcacattcctcttcggccacctctgtttctctgttcctcttcacagcaaaaactgttcaaaagagttgttgattactttcatttccactttctcacccccattctcccctcaattaactctccttcatccccatgatgccattatgtggcttttattagagtcaccaaccttattctccaaaacaaaagcaacaaggactttgacttctcagcagcactcggctctggttcttgaaacacccccgttacttgctattcctcctacctcataacaatctccttcccagcctctactgctgccttctctgagttcttcccagggtcctaggctcagatgtagtgtagctcaaccctgctacacaaagaatctcctgaaagcctgtaaaaatgtccatgcatgttctgtgagtgatctaccaagaaaataaaaaattttaaaaatc

SEQ ID NO: 335 - DNA, 4568 bp, Artificial
  cDNA Sequence
ggcggcggcggcggcgtgtggagcgagggagcggcgcgagcggcggcatgacgcggaggcggagcaggccgagcggcggtgcgggcaggcgcgagcgggctcgggccgcggggccgcagaagccccaggcgcccgagcccccgccgccgccaagcctggaggcgggagcgggtgcaggccctccggaggcgccggcggagcccgaccacgacggccccagggaggatgacgaacccaacctggtgcccggcccgcaggtaggagcgagcggggagacttcggcggctcgggcgctttcaccttccccgagcgggagcgggagtggggcggggttggggatgggccatcctgccgcggctggggtagcagccttcccccgggtccggcgccgaagctttctcccccggggcgggaatggaggctggacccctctccccaaagccgaggctcggtccgcgctcctgcgactaggctgaagctgctcccctctccccgccgcctccgggcgttccggccgtacacccacactgggactgggactgggactgggctgtgatcccgaggccgcagctccgctctcggcccgccacctcccccgggcccacctgctccctcagccacaggccatctcggggctctgggactggacgactgcagcctcttccctctgcccccgggaacggctccactccgtcccctgcagcgcctgcagccgcggccccctcagcagctgtgtctcctggcgcctcctcgccatacccagcagagcagttggagcagacagccaggctgcccggaggagtttttggtggggtttctgcactgaggtggaaacccagcagaacctgcccttcttccctcccctgctccgcaaggcagcccaccccgaccttgagatcccaggtttggagaatcctgctgagagcgaacagtaggaggattccccaaagcttccagcttgccacctggaagaaggtcactttcttttgagcaaaggagataacgggaggtaccctgccaaagttcactgagaggcgggggtgacatgggccacggttgctctgggagggttgtggcactcggggctgggtggctctccctaagcttgctctgacaaaagagttttgagttggtcttttggctgagcctgcccaggaaggcaggctcctgcaggagtcttggagggtcggatgcggcgccggatgaggatgaggcgtggcggaagatgcgtttggctctgcagacactgcatcgggcagcaggggactctgggaggctggtgcagccagaaggcatggctcttgacagccttctagtagaatctctggaattgtgcatatgaagaaacagaaactcagagcaactaaacatttgcccaaatgactccaactgtaggtgtcagacaaaagaaaagaaaaggacttttaggtcccccccgcctccagccagcctgtgcagacttgctgcctgctgtgtcaccgggaacgcaaaggctgggaagaaggcccttctcaaaatggactggtgttgcagggtgagaagctgccccctgacttcatgccaaagctcgtcaagaatctcctaggcgagatgcctctgtgggtctgccagagttgccgaaagagcatggaggaagatgaaaggcagacaggtcgagaacatgcagtggcgatctccttgtcacacacatcctgcaaatcacagtcttgtggagatgactctcattcgtcctcgtcttcctcctcatcatcctcatcctcgtcctcctcttcctgccctgggaactcgggagactgggatcctagctcgttcctgtcggcacataagctctcgggcctctggaattccccacattccagtggggccatgccaggcagctctcttgggagtcctcctaccatccccggtgaggctttccccgtctcggagcaccaccagcactcagacctcactgctccccctaacagccccaccggccaccacccgcagccagcatctctaatcccgtctcaccccagctcctttggctccccaccccacccacacctgctgcccaccaccccggcagcacctttccctgcccaggcttcagagtgccctgttgctgctgccactgccccccacactccagggccatgtcagagctcccatctaccctccaccagcatgccgctcctgaagatgcccccaccattctcggggtgcagccacccctgcagcgggcactgtggtgggcactgcagtgggcctctcctcccacccccgagctctcagccactccctagcactcacagggatcccgggtgcaaggggcacaagtttgcacacagtggcctggcttgccagctgccccagccctgcgaggcagatgaggggctgggtgaggaagaggatagcagctctgagcgaagctcctgcacctcatcctccacccaccagagagatgggaagttctgtgactgctgctactgtgagttcttcggccacaatgcggcaaaaggaaaggaaatggcagagagaaagctatgattctgatgagtatgtatacgtgtgtaatcccagagaagtgaacgcttgggagtgatgaaggcagagtggaagcaaaaaggctctcagtcccccaagtgtgacagccagccgagggacaggccgtgagcacagacggcgccaggaaggaggctcagatcagagggcatgctggctctggccagggggaggaagcagtgcagaagtctcataagccacccgctgccccgacgagtcggaactataccgagatccgggagaagctccgctcgaggctgaccaggcggaaagaggagctgcccatgaaggggggcaccctgggcgggatccctggggagcccgccgtggaccaccgagatgtggatgagctgctggaattcatcaacagcacggagcccaaagtccccaacagcgccagggccgccaagcgggcccggcacaagctgaaaaagaaggaaaaggagaaggcccagttggcagcagaagctctaaagcaggcaaatcgtgtttctggaagccgggagccaaggcctgccagggagaggctcttggagtggcccgaccgggaactggatcgggtcaacagcttcctgagcagccgtctgcaggagatcaaaaacactgtcaaagactccatccgtgccagcttcagtgtgtgtgagctcagcatggacagcaatggcttctctaaggagggggctgctgagcctgagcctcagagtctacccccctcaaacctcagtggctcctcagagcagcagcctgacatcaaccttgacctgtcccctttgactttgggctcccctcagaaccacacgttacaagctccaggcgagccagccccaccatgggcagaaatgagaggcccccacccaccatggacagaggtgagggggccccctcccggtatcgtccccgagaacgggctcgtgaggagactcaacaccgtgcccaacctatcccgggtgatctgggtcaagacacccaagccgggctaccccagctccgaggagccaagctcaaaggaagttcccagttgcaagcaggagctgcctgagcctgtgtcctcaggtgggaagccacagaagggcaagaggcagggcagtcaggccaagaagagcgaggcaagcccagccccccggcccccagccagcctagaggttcccagtgccaagggccaggtcgctggccccaagcagccaggcagggtcctagagcttcccaaagtaggcagctgtgctgaggctggagaggggagccgggggagccggccaggaccaggttgggctggcagtcccaaaactgagaaggagaagggcagctcctggcgaaactggccaggcgaggccaaggcacggcctcaggagcaggagtctgtgcagccctcaggcccagcaaggccacagagcttgccccagggcaagggccgcagccgccggagccgcaacaagcaggagaagccagcctcctccttggacgatgtgttcctgcccaaggacatggacggggtggagatggatgagactgaccgagaggtggagtactttaagaggttctgtttggattctgcaaagcagactcgtcagaaagttgctgtgaactggaccaacttcagcctcaagaaaaccactcctagcacagctcagtgaggccctgcccaggctgagctgcttcagggcgtcctgaggccctgactgccagctgaaggcgtataatttttccctccgtgtgccccacctacccgtccaagaccctctgtgctccccaccatcctggaccaaccaaaagctgaacggatgccacactgtgctggggccccttgacctcagcagagccgcttcctggtgctacgcagcctccacactcagagcccgtggactgggctggcctaagggccagggctgatggtactgctggcccaacactgctctctttgtgtttggtttttttgtttttgtttttattttgtttttttccaattctttacttttgatactgtgaagatctttcgtgccgaaagataaagcaacatttggacacag

SEQ ID NO: 336 - DNA, 1392 bp, Artificial
  cDNA Sequence
gagcaagatggctgtggagctgggcgtgctgctcgtccggccccggcccggaaccgggctgggtagagtgatgcggaccctcctgctggtgctgtggctggcgacgcgcggaagcgcgctctactttcacatcggagagacggagaagaagtgctttattgaggagatcccggacgagaccatggtcataggaaactaccggacgcagctgtatgacaagcagcgggaggagtaccagccggccaccccggggcttggcatgtttgtggaggtgaaggacccagaggacaaggtcatcctggcccggcagtatggctccgagggcaggttcactttcacttcccatacccctggtgagcaccagatctgtcttcactccaattccaccaagttctccctctttgctggaggcatgctgagagttcacctggacatccaggtaggtgaacatgccaatgactatgcagaaattgctgctaaagacaagttgagtgagttgcagctacgagtgcgacagctggtggaacaagtggagcagatccagaaagagcagaactaccagcggtggcgagaggagcgcttccggcagaccagtgagagcaccaaccagcgggtgctgtggtggtccattctgcagaccctcatcctcgtggccatcggtgtctggcagatgcggcacctcaagagcttctttgaagccaagaagcttgtgtagctgtcccaggcgtcacaacccatcctcccaggctgggggagaaaggacctcctggaactgacttcttctgtcaggaggactggtttccagccatacctgttctggaagggagaggggctggaggcacccacaggcacaagctgaaggcagcagcttggctaatactgagcaggtagtggggcaaattcctgccctctctctctggcctctgggccgtttggtagtaatcacccaagggctggtaaagcccctcctcttggcacctcagaatcacagtgttactgatcagggatgtgaggctgctgttgggggtggggggaggggaatgggcaggcaagccagtcttctgtcttcctttgctaacttagggttttgagcaggttggggtatggtgcctgtcatacccacctgccaccctgggaacctcactgttctctctttcagcctagacctgctgatccagggtgtgtgtgagttgagggtgggtggaggggtttgcagtgtgggaatgtggccctgcagttgacctgagctgcttcacatggttgtccattctggggcttaaagaactgggaccagaccaagtagaggccttggtgctggttggggtggggcctgcagagtcttagttactgatttcattttcaataaatgtaggtttgttacatgagtttccc

SEQ ID NO: 337 - DNA, 2058 bp, Artificial
  cDNA Sequence
cagcgggctcgcaccgacgaggtgcctgccggaggaagccgctccgaggcggaagatgaggacgacgaggactacgtgccctatgtgccgttacggcagcgccggcagctactgctccagaagctgctgcagcgaagacgcaagggagctgcggaggaagagcagcaggacagcggtagtgaaccccggggagatgaggacgacatcccgctaggccctcagtccaacgtcagcctcctggatcagcaccagcaccttaaagagaaggctgaagcgcgcaaagagtctgccaaggagaagcagctgaaggaagaagagaagatcctggagagtgttgccgagggccgagcattgatgtcagtgaaggagatggctaagggcattacgtatgatgaccccatcaaaaccagctggactccaccccgttatgttctgagcatgtctgaagagcgacatgagcgcgtgcggaagaaataccacatcctggtggagggagacggtatcccaccacccatcaagagcttcaaggaaatgaagtttcctgcagccatcctgagaggcctgaagaagaaaggcattcaccacccaacacccattcagatccagggcatccccaccattctatctggccgtgacatgataggcatcgctttcacgggttcaggcaagacactggtgttcacgttgcccgtcatcatgttctgcctggaacaagagaagaggttacccttctcaaagcgcgaggggccctatggactcatcatctgcccctcgcgggagctggcccggcagacccatggcatcctggagtactactgccgcctgctgcaggaggacagctcaccactcctgcgctgcgccctctgcattgggggcatgtccgtgaaagagcagatggagaccatccgacacggtgtacacatgatggtggccaccccggggcgcctcatggatttgctgcagaagaagatggtcagcctagacatctgtcgctacctggccctggacgaggctgaccgcatgatcgacatgggcttcgagggtgacatccgtaccatcttctcctacttcaagggccagcgacagaccctgctcttcagtgccaccatgccgaagaagattcagaactttgctaagagtgcccttgtaaagcctgtgaccatcaatgtggggcgcgctggggctgccagcctggatgtcatccaggaggtagaatatgtgaaggaggaggccaagatggtgtacctgctcgagtgcctgcagaagacacccccgcctgtactcatctttgcagagaagaaggcagacgtggacgccatccacgagtacctgctgctcaagggggttgaggccgtagccatccatgggggcaaagaccaggaggaacggactaaggccatcgaggcattccgggagggcaagaaggatgtcctagtagccacagacgttgcctccaagggcctggacttccctgccatccagcacgtcatcaattatgacatgccagaggagattgagaactatgtacaccggattggccgcaccgggcgctcgggaaacacaggcatcgccactaccttcatcaacaaagcgtgtgatgagtcagtgctgatggacctcaaagcgctgctgctagaagccaagcagaaggtgccgcccgtgctgcaggtgctgcattgcggggatgagtccatgctggacattggaggagagcgcggctgtgccttctgcgggggcctgggtcatcggatcactgactgccccaaactcgaggctatgcagaccaagcaggtcagcaacatcggtcgcaaggactacctggcccacagctccatggacttctgagccgacagtcttcccttctctccaagaggcctcagtccccaagactgccaccagtctacacatacagcagccccctggacagaatcagcatttcagctcagctggcctgggatgggccaggctggtcctggctgcctgttccctgtgctcttcagaattactgtttttgtttccttttaccccagctgccattaaagcccaaacctctagccc

SEQ ID NO: 338 - DNA, 1536 bp, Artificial
  cDNA Sequence
agcgcctgccccatgcgccgccgcctctccgcacgatgttcccctcgcggaggaaagcggcgcagctgccctgggaggacggcaggtccgggttgctctccggcggcctccctcggaagtgttccgtcttccacctgttcgtggcctgcctctcgctgggcttcttctccctactctggctgcagctcagctgctctggggacgtggcccgggcagtcaggggacaagggcaggagacctcgggccctccccgtgcctgccccccagagccgccccctgagcactgggaagaagacgcatcctggggcccccaccgcctggcagtgctggtgcccttccgcgaacgcttcgaggagctcctggtcttcgtgccccacatgcgccgcttcctgagcaggaagaagatccggcaccacatctacgtgctcaaccaggtggaccacttcaggttcaaccgggcagcgctcatcaacgtgggcttcctggagagcagcaacagcacggactacattgccatgcacgacgttgacctgctccctctcaacgaggagctggactatggctttcctgaggctgggcccttccacgtggcctccccggagctccaccctctctaccactacaagacctatgtcggcggcatcctgctgctctccaagcagcactaccggctgtgcaatgggatgtccaaccgcttctggggctggggccgcgaggacgacgagttctaccggcgcattaagggagctgggctccagcttttccgcccctcgggaatcacaactgggtacaagacatttcgccacctgcatgacccagcctggcggaagagggaccagaagcgcatcgcagctcaaaaacaggagcagttcaaggtggacagggagggaggcctgaacactgtgaagtaccatgtggcttcccgcactgccctgtctgtgggcggggccccctgcactgtcctcaacatcatgttggactgtgacaagaccgccacaccctggtgcacattcagctgagctggatggacagtgaggaagcctgtacctacaggccatattgctcaggctcaggacaaggcctcaggtcgtgggcccagctctgacaggatgtggagtggccaggaccaagacagcaagctacgcaattgcagccacccggccgccaaggcaggcttgggctgggccaggacacgtggggtgcctgggacgctgcttgccatgcacagtgatcagagagaggctggggtgtgtcctgtccgggaccccccctgccttcctgctcaccctactctgacctccttcacgtgcccaggcctgtgggtagtggggagggctgaacaggacaacctctcatcacccccacttttgttccttcctgctgggctgcctcgtgcagagacacagtgtaggggccatgcagctggcgtaggtggcagttgggcctggtgagggttaggacttcagaaaccagagcacaagccccacagagggggaacagccagcaccgctctagctggttgttgccatgccggaa

SEQ ID NO: 339 - DNA, 1716 bp, Artificial
  cDNA Sequence
caaaagatcgcagtggactgtgtgattgacctgacaagagctgagggagaaaatagacctattgccactcttgacttaactttagaacctgtcactccttcccagagggagccaaccagtcttcagacatgtgccagcctctctggcaaagcggtgatggaagggcaggtggacagaagctctcagcctacagcacggagactcattaacagtgatcctgtagatttggacctagtggaagaaaacacctttgtaggtcccccacccgctacatccatcagtggaggctctgtttatccaacagagcctaattgtagctcagccacattcacaggtaacctcagcttcttggcaagtctacagctgtcttcagatgttagctccctctccccaacaagcaataatagtagcagcagcagcagcaatcaaaaagtacccttgccatgcccacagcaagatgtgtctcgcccaccacaagccttgccttgcccactgagagcctcaccttgtccaccacgagccttgtcatgcccatcacaaaccatgcagtgcaaactaccagctctaactcaaccacctcaagaagtgccatgccctcggcagaatatcccaagcccacctcaagactcgttatggcatcctcaacactcaccaagcccacctcaagactctctgggcctacctcaagatgtgccaggcccgcctcaaagcatattacatccacaagatgtggcatacctgcaagacatgccacagtcaccaggagatgtgccacggtcaccaggaaccatgccaccatcaccagatgtgccacagtcaacaggagacatgctagggtcaccaggagatgtgccacagtcaccaagttatgtttcaccgtcaccagatgcaccacagtcaccagggggcatgccacacttaccgggagatgtgttacattcacctggagacatgccacactcatcaggggacgtgacacactcacctagagacatccctcacttaccaggagacaggcctgactttacccagaatgatgtacagaactgtgacatgcctatggatatctcagctgcgtcccctccaagctgctctcccagcccacagtctgaaactcccttagagaaagttccttggctctctgtcatggaaaccccagccagaaaagaaatatcactgtcagagcctgccaaacctgggtctgcccacgtacaatcacgaacaccacaaggtgggttgtacaacagaccatgcctgcatagactgaagtacttcttacgacctccggttcatcatctgttctttcagacgctaataccggataaagacacgagagaacaagggtcaaaaattagaacccatccctcatcgaagactaagaatggtaacaaataccattgaagagaattttcccctggggactgtgcagtttttgatggactttgtgtcaccccagcattacccaccaagagaaatcgtggctcacatcatccagaaaatcttgctcagtggctctgagactgtggatgtcctaaaggaggcctacatgcttctcatgaaaattcaacggctacatccagccaatgccaagacagtggagtgggactggaaactgctcacctatgtcatggaggaagaggtaacaacaattataagattatatcttctgtaggggaagttttaactataaagaaaagtgataccaggtgccatggc

SEQ ID NO: 340 - DNA, 450 bp, Artificial
  cDNA Sequence
gcaccgaaagcgaaggaagctcctgctcctcctaaagccgaagccaaagtgaaggttttaaaggccaagaaggcagtgttgaaaggtgtccgcagccacaaaaagaagatccgcatgtcacccaccttcaggcggcccaagacactgcgactccggaggcagcccagatatcctcggaagagcacccccaggagaaacaagcttggccactatgctatcatcaagtttccgctgaccactgagtcggccaagaagatagaagaaaacaacacgcttgtgttcactgtggatgttaaagccaacaagcaccagatcagacaggctgtgaagaagctctatgacagtgatgtggccaaggtcaccaccctgatttgtcctgataaagagaacaaggcatatgttcgacttgctcctgattatgatgctttcgatgttgtaacaaaattggga

SEQ ID NO: 341 - DNA, 2401 bp, Artificial
  cDNA Sequence
gaagcaggcggagaagagacaagagaaactcactgcagagctggaaaagcttcagacagagcttgactggagacgggctgaaggccaggctgagtggagagcagcccaaaaatatgcagtggatgtgacgctggacccggcctcggcgcaccccagcctggaggtgtcggaggatggcaagagcgtgtcttcccgcggggcgccgccaggcccggcgcctggccacccgcagcggttctcggagcagacgtgcgcgctgagcctggagcggttctccgccggccgccactactgggaggtgcacgtgggccgccgcagccgctggttcctgggcgcctgcctggccgcggtgccgcgcgcggggcctgcgcgcctgagccctgcggccggctactgggtgctggggctgtggaacggctgcgagtacttcgtcctggccccgcaccgcgtcgcgctcaccctgcgcgtgcccccgcggcgcctgggcgtcttcctggactacgaggccggagagctgtccttcttcaacgtgtccgacggctcccacatcttcaccttccacgacaccttctcgggcgcgctctgtgcgtacttcaggcccagggcccacgacggcggcgaacatccggatcccctgaccatctgcccgctgccggttagagggacgggcgtccccgaagagaacgacagtgacacctggctacagccctatgagcccgcggaccccgccctggactggtggtgaggcgccctcgtggccgcgggactggccccggggggccccctggatcccaggccagcgctttgctctcctgctccgtctgaagggagcaggtgcaccagccaaaatgtcagcgagggggacaaagagagggacctttgcctacgtagatgtgtatgtgtagtgcgattttcttcaaggaaaggagacaagtccaaagctcgtttgtggattgtgggactgagcgaaggagtacaaatatatccacgtcgctcagagctggggtgctcacggtgggcggtgggcaagaagccagcatggaagaaagaagggagaaaactttggtgactgccttagagggatcagttaatttgtatagttttatattttttgtatatgtttgctagctctaaaaaggtcgagatgcaataacacttcgtaagcaacgagttcacctaagtaaggctcagatcctagttttaaaaaccatttcccattaaaatgaagttggaggaacagctgcttctggagccggggcaaaaatttcaaggtgagcctggagcattgtgtgtggtgaagtaaaataaaggctcaaaacgtgacggcaacccggcaaaagggtagggagccaggccgaaggggcctcactgaccaattgtgggacaatttgaacatcaggatgaataatgacaggagagattataacacactgaataaaaacataatccatgagttcatgctgatactcaaatttctttttaaaaaggagaaacaggaaggtttcttttggaggtgaaatctaattattggtgagagtcttggagaacaggctgtttccagtctcaaagcagtaaccttatacactacttataagtttgaaaggggaaaggttacctttacaatggagacatctaccagatcatccaagtgattaaatttaacatcatcaatgatgggaccaaggacattattagtttgacaactggggaaagaagtgttcttcaccccctacccccaagacattgtctctgtcggccaggctggagtgcagcctcaacctcctgggtccaagtgatcctcccacctcagcacacaacaccatgcccaattttaagtgcgttatagagacgggggtctcactttgttacccaggctggtctcaaactcctgcgctcaagcaatcctcccacctgggcctcccaaaatgctgggtgtacaggcatgagccgctgtgcctggcttcattttcagagtgagacatttgtactgtggctatgtaggagaacattcttgttcttagcaaacatactgaagtttttagatattaattaccacagtgtctgccactgaatttccagtgactaagtggaaaaatataaaacatatgaatataaagaaagaaagagacaagtcaaatgtagtaaaatgacaacacttggtgactctaggtgactggtcgacagatgttcattgtactatcaatgtggctttgctgtgggtttgaaattttgcaaactaagagttgggtggcggggagaaggatacaccaaaaaactaagtgattatctttggatgggaaaatgtttggtaattgcattcttaaaatgtcttctttgtattttttaatgttcaataatgtatatgtatcagttctgtaataaaggggaaaacacttttttt

SEQ ID NO: 342 - DNA, 2199 bp, Artificial
  cDNA Sequence
atatatcttagggtggaagatggataaataattctgtcacacgtgccctggcctctggagctcagctgccagtccacgtctagggaatcttagcatctgggaccaagacactttacagcaatcatcaccctttgcagaggaggtgagctcaccaggactcatctgccatttcagaccttttgctgctacctgccaggtggcccccactgctgacgagagatggtggacctctcagtctccccagactccttgaagccagtatcgctgaccagcagtcttgtcttcctcatgcacctcctcctccttcagcctggggagccgagctcagaggtcaaggtgctaggccctgagtatcccatcctggccctcgtcggggaggaggtggagttcccgtgccacctatggccacagctggatgcccagcaaatggagatccgctggttccggagtcagaccttcaatgtggtacacctgtaccaggagcagcaggagctccctggcaggcagatgccggcgttccggaacaggaccaagttggtcaaggacgacatcgcctatggcagcgtggtcctgcagcttcacagcatcatcccctctgacaagggcacatatggctgccgcttccactccgacaacttctctggcgaagctctctgggaactggaggtagcagggctgggctcagaccctcacctctcccttgagggcttcaaggaaggaggcattcagctgaggctcagatccagtggctggtaccccaagcctaaggttcagtggagagaccaccagggacagtgcctgcctccagagtttgaagccatcgtctgggatgcccaggacctgttcagtctggaaacatctgtggttgtccgagcgggagccctcagcaatgtgtccgtctccatccagaatctcctcttgagccagaagaaagagttggtggtccagatagcagacgtgttcgtacccggagcctctgcgtggaagagcgcgttcgtcgcgaccctgccgctgctgttggtcctcgcggcgctggcgctgggcgtcctccggaagcagcggagaagccgagaaaagctgaggaagcaggcggagaagagacaaggtgagcggggacagggcgttctgcacgcacctgcccaagtgccaaaacccgccgtcatctaaaggctgtgggtcccgttacgagggtttattccagcgcgaggtgtcagggcggccaccggggaacggggatcggtgaccccggtggggaagggggaagatcgttcatatggacaaaagcggaggtgcggaacggctgcattttccacggaggctagtgcacagatgtcagggttgaccggctgctgtcgttacgccctcggagcttcacatcacactgtacagagggagcggtgaccagggtctctgctgccagcgccacctcgtccaggttttcatagcgcacagggagtcgggcggatgcgcaacatctccgcacagggtcaggaagcggcggtcaggcaccgagaaaacagcccagttacgtgaggcagtgtccggggcttaacgtttccgccgagctaatagatttgggaggctccgaccctgattttcacactagcaggagggagggcgctgggtcaccctcctatgcagaagggcagccaagggtgcgcacttccccatcccctgcctggagcctcacttccagcccagcctgggcccgcagaccaccgcgggtgggagtgccgcatcggaggtgaggcctcagtgttcacccatctgttctgtctgcctcattccccaacctgagagtctttccccttttcttcatcttttttttttttttttctctagagaaactcactgcagagctggaaaagcttcagacagagcttggtaagtgacccctcttagaactatttctcctcagggccgggtccagtggctcacacctgtaatcccagtactttgggaggccgaggcgggtggatcacgaggtcaggagatcgagaccagcctggctaacacagtgaaaccccgtctcttctaaaaatacaaaaaattagcccggcgtggcggcatgtgcctgtagtcccagctacatgggaggctgaggcaggagaagggcgtgaacccgggaagcggagcttgcagtgagccgagatggcgccactgcactccagcctgggcgacagagcgagactctgtctc

SEQ ID NO: 343 - DNA, 2007 bp, Artificial
  cDNA Sequence
acagtttgacatcgttcatgaagagcctctccacggctcctgcgcctgagacagctggcctgacctccaaatcatccatccacccctgctgtcatctgttttcatagtgtgagatcaacccacaggaatatccatggcttttgtgctcattttggttctcagtttctacgagctggtgtcaggacagtggcaagtcactggaccgggcaagtttgtccaggccttggtgggggaggacgccgtgttctcctgctccctctttcctgagaccagtgcagaggctatggaagtgcggttcttcaggaatcagttccatgctgtggtccacctctacagagatggggaagactgggaatctaagcagatgccacagtatcgagggagaactgagtttgtgaaggactccattgcaggggggcgtgtctctctaaggctaaaaaacatcactccctcggacatcggcctgtatgggtgctggttcagttcccagatttacgatgaggaggccacctgggagctgcgggtggcagcactgggctcacttcctctcatttccatcgtgggatatgttgacggaggtatccagttactctgcctgtcctcaggctggttcccccagcccacagccaagtggaaagagacgtttttccagccctcaccttggcgcctggcttctattttactcgggttactctgtggtgccctgtgtggtgttgtcatggggatgataattgttttcttcaaatccaaagggaaaatccaggcggaactgggtatgtgtcatgtcctgagcctcccacacatggttctcccgggtccctccctgatccacagtttgagcctctggacgaccctggctgcaggctggacaggaagcaccggcagcctcttacatgttttttgtttttgtttttgtttttcagactggagaagaaagcacggacaggcagaattgagagacgcccggaaacacgcagtggaggtgactctggatccagagacggctcacccgaagctctgcgtttctgatctgaaaactgtaacccatagaaaagctccccaggaggtgcctcactctgagaagagatttacaaggaagagtgtggtggcttctcagggtttccaagcagggaaacattactgggaggtggacgtgggacaaaatgtagggtggtatgtgggagtgtgtcgggatgacgtagacagggggaagaacaatgtgactttgtctcccaacaatgggtattgggtcctcagactgacaacagaacatttgtatttcacattcaatccccattttatcagcctcccccccagcacccctcctacacgagtaggggtcttcctggactatgagggtgggaccatctccttcttcaatacaaatgaccagtcccttatttataccctgctgacatgtcagtttgaaggcttgttgagaccctatatccagcatgcgatgtatgacgaggaaaaggggactcccatattcatatgtccagtgtcctggggatgagacagagaagaccctgcttaaagggccccacaccacagacccagacacagccaagggagagtgctcccgacaggtggccccagcttcctctccggagcctgcgcacagagagtcacgccccccactctcctttagggagctgaggttcttctgccctgagccctgcagcagcggcagtcacagcttccagatgaggggggattggcctgaccctgtgggagtcagaagccatggctgccctgaagtggggacggaatagactcacattaggtttagtttgtgaaaactccatccagctaagcgatcttgaacaagtcacaacctcccaggctcctcatttgctagtcacggacagtgattcctgcctcacaggtgaagattaaagagacaacgaatgtgaatcatgcttgcaggtttgagggcacagtgtttgctaatgatgtgtttttatattatacattttcccaccataaactctgtttgcttattcc

SEQ ID NO: 344 - DNA, 2281 bp, Artificial
  cDNA Sequence
ggcgatcgagcgccgcggagcgcgtccctccctcgccaatccggctccggcgccggcgcccgcccgcgttttcccggcgcctgccgctccgccgctccgacccggcacgcagtcccggcccgagccgacgccttgcaggagggttcaaatccgcgcgggggagctgcgacgcgcaagggctgcggagccgcgggccggcgagcgcgtcgccaccatgaagcagctgcctgtaccctgttgaaacttcatggccacagccccaggccctgctggcattgccatgggcagcgtgggcagcctgttggaacggcaggacttctcccctgaagagctgcgggcggcacttgccgggtctcggggctcccgccagcctgatgggctcctccggaagggcttgggccagcgtgagttcctcagctacctgcacctccccaagaaggacagcaagagcaccaagaacaccaagcgggcccctcggaacgagcctgccgactatgccaccctctactaccgggaacattctcgcgcgggtgacttcagcaagacctcgctgccagaacggggtcgctttgacaagtgccgcattcgcccctcagtgttcaagcctacggcgggcaacgggaaaggcttcctatccatgcaaagtctggcgtcccacaaaggccagaagctgtggcgcagcaatggcagcctgcacacgctggcctgccacccgcccctgagccccgggccccgggccagccaggcccgggcacagctgctgcacgccctcagcctagatgagggcggccctgagcccgagcccagcctgtccgactcctccagtgggggtagttttggtcgcagtcctggtactggccctagccccttcagctcctcccttggccaccttaaccacctcgggggctccctggaccgggcctctcaaggacccaaggaggctgggccaccagctgtgctgagctgcctgcccgagccaccacccccctacgagttctcctgctcctctgccgaggaaatgggagccgtgctgcccgagacctgtgaggagctcaagaggggccttggcgatgaggacggctccaaccccttcacgcaggtgctggaggagcgccagcggctgtggctggctgagctgaagcgcctgtatgtggagcggctgcacgaggtgacccagaaggctgagcgcagcgagcgcaacctccagctgcagctgtttatggctcagcaggagcagcggcgcctgcgcaaggagctgcgggctcagcagggcctggctccggagcctcgggcccccggcaccctcccagaggctgaccccagtgcacgaccagaggaggaagcccgatgggaggtgtgccagaagacagcagagattagcctcttgaagcagcagctgcgtgaagcccaggcggaactggcccagaagctggcggagatcttcagtctgaagacacaacttcggggcagccgggcacaagcccaggctcaggacgcagagctggtccggctgcgcgaggctgtgcgcagcctgcaggagcaggcccctcgggaggaagccccaggcagctgtgagactgatgactgcaagagcaggggcctgctaggggaggcaggaggcagcgaggccagagacagtgctgagcagctgcgggctgagctgctgcaggagcgacttcggggccaggagcaggcgctgcgctttgagcaggagcggcggacttggcaggaggagaaggagcgcgtgctgcgctaccagcgggagatccagggagggtacatggacatgtaccgccgcaaccaggcactggagcaggaactgcgggcactgcgggagccccccacaccctggagtccccggctcgagtcctccaagatctgaggccagcagagcgagctgacagcagcaacactgtcagaaggtgccctgagacggccggctcagccttcccttgcactggttggggtggaacctgcagaggccagcccggggctggggaggcgcaaggagaggagggatccagtggggccgtgggctgggtagggtgccttggcaggagccaggacaaggccctcctggcagaggagcacctaggcagggcccagccctgcttcctggagtggatgtggcccagagaaggaggctgggggatcaccagccccaaggtcccgaagggcaggtcagagggagagaggctggagacctgggctggggccttcctccagggaaggaggctggggtgggaacactggcctcccccagaataaaaccatgttttct

SEQ ID NO: 345 - DNA, 786 bp, Artificial
  cDNA Sequence
gatgacctggaagtgatgcctaaagctgtggaccgcgtgggctcgcctccctgggactaggtttcagcggccgctgcgatgaccaaaataaaggcagatcccgacgggcccgaggctcaggcggaggcgtgttccggggagcgcacctaccaggagctgctggtcaaccagaaccccatcgcgcagcccctggcttctcgccgcctcacgcggaagctctacaaatgcatcaagaaagcggtgaagcagaagcagattcggcgcggggtgaaagaggttcagaaatttgtcaacaaaggagaaaaagggatcatggttttggcaggagacacactgcccattgaggtatactgccatctcccagtcatgtgtgaggaccgaaatttgccctatgtctatatcccctctaagacggacctgggtgcagccgcaggctccaagcgccccacctgtgtgataatggtcaagccccatgaggagtaccaggaggcttacgatgagtgcctggaggaggtgcagtccctgcccctacccctatgaggggctccggtagcacctgggcacctgccgctggaagctattgggctggcagcaggacgactggctgtcctcctgcccacccacactgacggcatcttcccagttccccaaggcacgccttcttcccaggcagctctaacagccctttcatgaaggtaatgctagtcttctgtccatcagtgccatttcctgtagaactaaaggctgttccaagaatgtggggtggggaaagtaaatgctaagact

SEQ ID NO: 346 - DNA, 1581 bp, Artificial
  cDNA Sequence
atgggatcgtcgagcagccgggtgctgggccagccgaggcgagcccttgcccagcaggaacagggtgccagggccaggggctcggcccggaggccggacactggagacgatgcggcgagctacggcttctgttactgcccgggcagtcacaagcgcaagcggagcagcggggcctgccgctactgtgacccggactcgcacagggaggagcatgaggaggagggggacaagcagcagccgctcctcaacacccctgcaaggaaaaaattaaggagtacatccaaatatatttatcaaacattatttttgaatggtgaaaacagtgacattaagatttgtgctctaggagaagaatggcgattacacaaaatatatttatgtcaatctggctacttttctagtatgttcagtggttcttggaaagaatccagcatgaatattattgaactggagattcctgaccagaacattgatgtagacgcactgcaggttgcgtttggttcactgtatcgagatgatgtcttgataaaacccagtcgagttgttgccattttggcagcagcttgtatgctgcagctggatggtttaatacagcagtgtggtgagacaatgaaggaaacaattaatgtgaaaactgtatgcggttattacacatcagtagagatctatggattagattctgtaaagaaaaagtgccttgaatggcttctaaacaatttgatgactcaccagaatgttaaactttttaaagaactcggtataaatgtcatgaaacagctcattggttcctctaacttatttgtgatgcaagtggagatggatgtatacaccactctaaaaaagtggatgttccttcaacttgtgccttcttggaatggatctttaaaacagcttttgacagaaacagatgtctggttttctaaacagagaaaagattttgaaggtatggcctttcttgaaactgaaccaggaaaaccatttgtgtcagtattcagacatttaaggttacaatatattatcagtgacctagcttctgcaagaattattgaacaagatggtatagtaccttcagaatggctgtcttctgtgtataaacagcagtggtttgctatgctgcgggcagaacaagaccgtgaggtagggcctcaagaaatcaataaagaagacctagagggaaatagcatgaggtgtggtagaaagcttgccaaagatggtgaatactactggtgttggacgggttttaacttcggctttgacctacttgtaatttacaccaatggatacatcattttcaaacgcaatacactgaatcagccacgcagcgggtctgtcagtttacggcctcgaaggagcatagcatttagattacgcttggcttcttttgatagtagtggaaaactagtatgtagtagaacaactggctatcaaatacttatacttaaaaaggatcaggaacaagtggtgatgaacttggacagcaggtttctgaccttccctttatatatctgctgtaacttcttgtatatatcaccagaaaaaggaattgaaaataatcgtcacccagaaaatccagaaaactga

SEQ ID NO: 347 - DNA, 675 bp, Artificial
  cDNA Sequence
ggccgcagccatgagcatgctcgggcctcagaagaggctcgcctctagtgtcctccgctgtggcaagaagaaggtctggttagaccccagtgagaccaatgaaatcgccaatgccaactcccgtcagcagatccggaagctcatcaaagacgggctgatcatccgcaagcctgtgacggtccattcccgggctcgatgccggaaaaacaccttggcccgccggaagggcaggcacgtggccataggtgagcagaagggtacagccaatgcccgaatgccagagaaggtcacatggatgaggagaatgacgattttgcgccggctgctcagaagataccgtgaatctaagaagatcgatcgccacacgtatcacagcctgtacctgaaggtgaaggggaatgtgttcaaagacaagcggattctcatggaacacatccacaagctgaaggcagacaaggcccgcaagaagctcctggctgaccaggctgaggcccgcaggtctaagaccaaggaagcaggcaagtgccctgaagagcgcctccaggccaagaaggaggagttcatcaagactttatccaaggaggaagagaccaagaaataaaagctccccctttgtctgtacatactggcctctgtgattacatagatcagccatgaaaataaaacaagccttaa

SEQ ID NO: 348 - DNA, 1558 bp, Artificial
  cDNA Sequence
gcggcgccaggactgactgcgccgtggaggctgctgcagtgttgtgagttggaagctggggagctcggcatggcggtccccgctgcagccatggggccctcggcgttgggccagagcggtcccggctcgatggccccgtggtgctcagtgagcagcggcccgtcgcgctacgtgcttgggatgcaggagctgttccggggccacagcaagacgcgcgagttcgcgcacagcgccaaggtgcactcggtggcctggagttgcgacgggcgtcgcctagcctcggggtccttcgacaagacggccagcgtcttcttgctggagaaggaccggttggtcaaagaaaacaattatcggggacatggggatagtgtggaccagctttgttggcatccaagtaatcctgacctatttgttacggcgtccggagataaaaccattcgcatctgggatgtgaggactacaaaatgcattgccactgtgaacactaaaggggagaacattaatatctgctggagtcctgatgggcagaccattgctgtaggcaacaaggatgatgtggtgacctttattgatgccaagacacaccgttccaaagcagaagagcagttcaagttcgaggtcaacgaaatctcctggaacaatgacaataatatgttcttcctgacaaatggcaatggttgtatcaacatcctcagctacccagaactgaagcctgtgcagtccatcaacgcccatccttccaactgcatctgtatcaagtttgaccccatggggaagtactttgccacaggaagtgcagatgctttggtcagcctctgggatgtggatgagttagtgtgtgttcggtgcttttccaggctggattggcctgtaagaaccctcagtttcagccatgatgggaaaatgctggcgtcagcatcggaagatcattttattgacattgctgaagtggagacaggggacaaactatgggaggtacagtgtgagtctccgaccttcacagtggcatggcaccccaaaaggcctctgctggcatttgcctgtgatgacaaagacggcaaatatgacagcagccgggaagccggaactgtgaagctgtttgggcttcctaatgattcttgagaggaggttgtagggagaggaggccccggcagaggtcttccttcatgtggttagtttggtctgttctctcggagttggtgggcaccctaaatatttgtaagttggtataaattgtaaacgtctctggtcaggctgcgcatttcgttcttttgctttgtctgtgtattagctctttccattctttgcccccagcatgagttaactcgcgtggactctgcagtgcgagtagtgaccccagcataccttgtcctctggacctcctgtcttctctgcttctgggtgcatggtagactttgtggcatttgatacaacttggacaatacctagtttggagggaggggaatggaagggcatggaagtttttttaaataattaaaaaaatatatatataattttgagaattgagcatttaataaactgacttttgttattatgg

SEQ ID NO: 349 - DNA, 631 bp, Artificial
  cDNA Sequence
gaggctgaggtcggagtcccgattttctcctgctgctgtggcccggacatggcgactcccggccctgtgattccggaggtcccctttgaaccatcgaagcctccagtcattgaggggctgagccccactgtttacaggaatccagagagtttcaaggaaaagttcgttcgcaagacccgcgagaacccggtggtacccataggttgcctggccacggcggccgccctcacctacggcctctactccttccaccggggcaacagccagcgctctcagctcatgatgcgcacccggatcgccgcccagggtttcacggtcgcagccatcttgctgggtctggctgtcactgctatgaagtctcgaccctaagcccagggtctggccttgaaagctccgcagaaatgattccaaaacccagggagcaaccactggccctaccgtgggacttactccctcctctcctttgagaggcccatgtgtcgctggggaggaagtgaccctttgtgtaactgtaaccgaaagttttttcaaaaatcctagatgctgttgtttgaatgttacatacttctatttgtgccacatctcccctccactcccctgcttaataaactctaaaaatccacttgtattt

SEQ ID NO: 350 - DNA, 1392 bp, Artificial
  cDNA Sequence
gagcaagatggctgtggagctgggcgtgctgctcgtccggccccggcccggaaccgggctgggtagagtgatgcggaccctcctgctggtgctgtggctggcgacgcgcggaagcgcgctctactttcacatcggagagacggagaagaagtgctttattgaggagatcccggacgagaccatggtcataggaaactaccggacgcagctgtatgacaagcagcgggaggagtaccagccggccaccccggggcttggcatgtttgtggaggtgaaggacccagaggacaaggtcatcctggcccggcagtatggctccgagggcaggttcactttcacttcccatacccctggtgagcaccagatctgtcttcactccaattccaccaagttctccctctttgctggaggcatgctgagagttcacctggacatccaggtaggtgaacatgccaatgactatgcagaaattgctgctaaagacaagttgagtgagttgcagctacgagtgcgacagctggtggaacaagtggagcagatccagaaagagcagaactaccagcggtggcgagaggagcgcttccggcagaccagtgagagcaccaaccagcgggtgctgtggtggtccattctgcagaccctcatcctcgtggccatcggtgtctggcagatgcggcacctcaagagcttctttgaagccaagaagcttgtgtagctgtcccaggcgtcacaacccatcctcccaggctgggggagaaaggacctcctggaactgacttcttctgtcaggaggactggtttccagccatacctgttctggaagggagaggggctggaggcacccacaggcacaagctgaaggcagcagcttggctaatactgagcaggtagtggggcaaattcctgccctctctctctggcctctgggccgtttggtagtaatcacccaggggctggtaaagcccctcctcttggcacctcagaatcacagtgttactgatcagggatgtgaggctgctgttgggggtggggggaggggaatgggcaggcaagccagtcttctgtcttcctttgctaacttagggttttgagcaggttggggtatggtgcctgtcatacccacctgccaccctgggaacctcactgttctctctttcagcctagacctgctgatccagggtgtgtgtgagttgagggtgggtggaggggtttgcagtgtgggaatgtggccctgcagttgacctgagctgcttcacatggttgtccattctggggcttaaagaactgggaccagaccaagtagaggccttggtgctggttggggtggggcctgcagagtcttagttactgatttcattttcaataaatgtaggtttgttacatgagtttccc

SEQ ID NO: 351 - DNA, 1755 bp, Artificial
  cDNA Sequence
gatgacagtggcgccggaagccggggccggggctgcggggcgaggctgaggccaccatggagcagtgtgcgtgcgtggagagagagctggacaaggtcctgcagaagttcctgacctacgggcagcactgtgagcggagcctggaggagctgctgcactacgtgggccagctgcgggctgagctggccagcgcagccctccaggggacccctctctcagccaccctctctctggtgatgtcacagtgctgccggaagatcaaagatacggtgcagaaactggcttcggaccataaggacattcacagcagtgtatcccgagtgggcaaagccattgacaggaacttcgactctgagatctgtggtgttgtgtcagatgcggtgtgggacgcgcgggaacagcagcagcagatcctgcagatggccatcgtggaacacctgtatcagcagggcatgctcagcgtggccgaggagctgtgccaggaatcaacgctgaatgtggacttggatttcaagcagcctttcctagagttgaatcgaatcctggaagccctgcacgaacaagacctgggtcctgcgttggaatgggccgtctcccacaggcagcgcctgctggaactcaacagctccctggagttcaagctgcaccgactgcacttcatccgcctcttggcaggaggccccgcgaagcagctggaggccctcagctatgctcggcacttccagccctttgctcggctgcaccagcgggagatccaggtgatgatgggcagcctggtgtacctgcggctgggcttggagaagtcaccctactgccacctgctggacagcagccactgggcagagatctgtgagacctttacccgggacgcctgttccctgctggggctttctgtggagtccccccttagcgtcagctttgcctctggctgtgtggcgctgcctgtgttgatgaacatcaaggctgtgattgagcagcggcagtgcactggggtctggaatcacaaggacgagttaccgattgagattgaactaggcatgaagtgctggtaccactccgtgttcgcttgccccatcctccgccagcagacgtcagattccaaccctcccatcaagctcatctgtggccatgttatctcccgagatgcactcaataagctcattaatggaggaaagctgaagtgtccctactgtcccatggagcagaacccggcagatgggaaacgcatcatattctgattcctacctggaaggaattttgttgaaaggggttttcacctgtgagccttggtctgtctcggtagggtggtcaacttcagtggactgtggttggtttcagagcgcctggctgaggagttccactgaggggagcactggagcagccctttggcagaggctgaggagggagatggaccagcccacgcctggcacctggctccatggcataaggaaagggagatgctggcctctgtgctcctgctgtcttttcctgtttctgtttgcgtttgacttagtagcaaccgacagagtggcaagggatttggtcttcagcagtagacatccttccacccctgccctcagccaagtctcttgctgccatgccaatgctatgtccacccttgcccctcggcccaagagtgtccagcggtggcccacctcttcctcccactacagcctcaacagtatgtaccatctcccactgtaaatagtcccagttagaacggaatgccgttgttttataactttgaacaaatgt

SEQ ID NO: 352 - DNA, 1785 bp, Artificial
  cDNA Sequence
aaagggcgccacgagtcggcattgtcaggcggcggcaccgcgcgggacggagcttggctgttggtcggtgggttcccgtgcggcggcggccaaggaggaggagacacagttggagcagctccgtgggctgactggggcgaggcctcagcagcgcgagcttgagtgcggccgagcctgcggcgccttcccctgcgggtggggacgagcgggccccgcggcgtcatcggcggcgaggagccgccgcgcctcggcctagcatgtcggaagcgggcgaggagcagcccatggagacgacgggcgccaccgagaacggacatgaggccgtccccgaaggcgagtcgccggccggggctggcacgggcgccgcggggctggaggcgcgaccgcggcgcccccgagcgggaatcagaacggcgccggaccagatcaacgccagcaagaacgaggaggacgcgggaaaaatgttcgttggtggcctgagctgggatactagcaaaaaagatttaaaagactattttactaaatttggagaggtcgttgactgtacaataaaaatggatcccaacactggacggtcaagagggtttgggtttatcctgttcaaagatgcagccagtgtggagaaggtcctagaccagaaggagcacaggctggatggccgtgtcattgaccctaaaaaggccatggctatgaagaaggacccggtgaagaaaatcttcgttgggggtctgaatcctgaagccactgaggaaaagatcagggagtactttggcgagtttggggagattgaggccattgaattgccaatggatccaaagttgaacaaaagacgaggttttgtgtttatcacctttaaagaagaagaacccgtgaagaaggttctggagaaaaagttccatactgtcagtggaagcaagtgtgagatcaaggtggcccagcccaaagaagtctatcagcagcagcagtatggctctgggggccgtggaaaccgcaaccgagggaaccgaggcagcggaggtggtggtggaggtggaggtcagagtcagagttggaatcagggctacggcaactactggaaccagggctacggctaccagcagggctacgggcctggctatggcggctacgactactcgccctatggctattacggctacggccccggctacgactacagtcagggtagtacaaactacggcaagagccagcgacgtggtggccatcagaataactacaagccatactgaggcggcagcaggagcgaccaactgatcgcacacatgctttgtttggatatggagtgaacacaattatgtaccaaatttaacttggcaaactttctattgcctgtcccatgtgcatcttatttaaaatttcccccatggaaatcactctcctgttgactatttccagagctctaggtgtttaggcagcgtgtggtgtctgagaggccatagcgccatcatgggctgatttttattaccaggtcccccagaagcaggtgggaggctctgcttcctgctgccgctctgcagcctggacctgtggaccctggttgtaaagagtaaattgtatcttaggaaaccagtgtcacctttttttcaccttttaattttatattatttgcgtcatacatttcctgtaacggaagtgttaattttactgtactttttggtaccttttgggaatctaatgtattgtaaggtattttacacgtgtcctgattttgccacaacctggatattgaagctatccaagcttttgaaataaaatttaaaaaccccc

SEQ ID NO: 353 - DNA, 1621 bp, Artificial
  cDNA Sequence
gtcaggcggcggcaccgcgcgggacggagcttggctgttggtcggtgggttcccgtgcggcggcggccaaggaggaggagacacagttggagcagctccgtgggctgactggggcgaggcctcagcagcgcgagcttgagtgcggccgagcctgcggcgccttcccctgcgggtggggacgagcgggccccgcggcgtcatcggcggcgaggagccgccgcgcctcggcctagcatgtcggaagcgggcgaggagcagcccatggagacgacgggcgccaccgagaacggacatgaggccgtccccgaaggcgagtcgccggccggggctggcacgggcgccgcggggctggaggcgcgaccgcggcgcccccgagcgggaatcagaacggcgccggaccagatcaacgccagcaagaacgaggaggacgcgggaaaaatgttcgttggtggcctgagctgggatactagcaaaaaagatttaaaagactattttactaaatttggagaggtcgttgactgtacaataaaaatggatcccaacactggacggtcaagagggtttgggtttatcctgttcaaagatgcagccagtgtggagaaggtcctagaccagaaggagcacaggctggatggccgtgtcattgaccctaaaaaggccatggctatgaagaaggacccggtgaagaaaatcttcgttgggggtctgaatcctgaagccactgaggaaaagatcagggagtactttggcgagtttggggagattgaggccattgaattgccaatggatccaaagttgaacaaaagacgaggttttgtgtttatcacctttaaagaagaagaacccgtgaagaaggttctggagaaaaagttccatactgtcagtggaagcaagtgtgagatcaaggtggcccagcccaaagaagtctatcagcagcagcagtatggctctgggggccgtggaaaccgcaaccgagggaaccgaggcagcggaggtggtggtggaggtggaggtcagggtagtacaaactacggcaagagccagcgacgtggtggccatcagaataactacaagccatactgaggcggcagcaggagcgaccaactgatcgcacacatgctttgtttggatatggagtgaacacaattatgtaccaaatttaacttggcaaactttctattgcctgtcccatgtgcatcttatttaaaatttcccccatggaaatcactctcctgttgactatttccagagctctaggtgtttaggcagcgtgtggtgtctgagaggccatagcgccatcatgggctgatttttattaccaggtcccccagaagcaggtgggaggctctgcttcctgctgccgctctgcagcctggacctgtggaccctggttgtaaagagtaaattgtatcttaggaaaccagtgtcacctttttttcaccttttaattttatattatttgcgtcatacatttcctgtaacggaagtgttaattttactgtactttttggtaccttttgggaatctaatgtattgtaaggtattttacacgtgtcctgattttgccacaacctggatattgaagctatccaagcttttgaaataaaatttaaaaaccccc

SEQ ID NO: 354 - DNA, 2402 bp, Artificial
  cDNA Sequence
atcttcggcgggcgagtgggctcggcctgtgcaacccgcacctgcgtccctcgcccggcccgatggcgccgcggccgctgggccccttggtgctggcgctgggcggcgccgcggcggtgctgggctcggtgctcttcatcctctggaagacctacttcggccgcggccgagagcggcgctgggaccggggagaggcctggtggggcgcggaggctgcccgcctccccgagtgggacgagtgggaccccgaggacgaggaggacgaggagccggcgctggaggagctggaacagcgcgaggtgctggtgctggggctggatggcgcaggcaagagcacgttcctgcgcgtgttgtcggggaagccaccgctggaaggccacatccccacctggggcttcaactccgtgcgtctgcccaccaaggactttgaggtggacctgctagaaattgggggcagccagaacctgcgcttctactggaaggagtttgtgagcgaggtggatgtgctggtgtttgtggtggactcggctgaccgactgcggctgccctgggcccgacaggagctgcacaagctgctggacaaggaccctgacctgcctgtcgtcgtggtggccaacaagcaggacctgagcgaggccatgagtatgggggagctgcagcgggagctgggtctacaggctatcgataaccagcgggaggttttcctcttggcagccagcattgcccctgcaggacccacctttgaagagcctggcaccgtgcacatctggaaactgctcttggagctcctctcctaggctggagctctcctgcttgccacctgcctgtcaagaccatagttgtactgctgctgcttcattgccagactgggcctggggcaagagccacatggcagcatttcccttttcccctcctttgcctttcaagagcagggcctgggcaaggccaagaaccatgcagaagccttcctggtgaggtggccgtgaagccgaagcagggaggtgggtgagacagagggtggggaggatagtgtctggctcattccaggctggaatgtggatccagctttcccttctcttacctgtacagtgagatgctcagtgggctcaatcctccactacaggtcccggtacctgaggaaccagtgtaggtgtcagaaatactcctagagcctcaaggtctcccagtccagaaacagtctggtgacgtcatgcccttctcatgtgggcagcttctgagtggtgacacagcaagcctttgttcctgtcctgcattgtccagccccagctccacctaagtgacttgtggccttgtgcaatctctgcctctctgaccccagggccattatttttaaagggaggtggtttcctaattcggagatgcctttcccagccatgggagtgtgaagtgctaggatgaacctggccatcctagcaaggagctttctgaagacctccctgcctttccctgagcccaggcctggcctgccagcctctcttgactacagaataactgatattcacccaccaaacagaaaaagtgaaggctgggtttttcccctctaatctggagacaagctgctgctctcgtactaactgtgccagtgcccatgtttacagaagtcaggggaaggaaggagcctgtgtccctgggacgacagtcaactggagctaggtgttgacctcagaactgcattttatttattaatttataagcagaacaggccagagttctaggctctgtttctaggtgctgttttcaaaaccccagatgacagtcatagaaaatttggaacttaggaaaatagctggaatcatgaatgacaatgagataacatacagatgtcagtggagacaaagttgtgggttcctcctcccacctggctttgaggctgtcgtcgatatcatagtactttacatggattcacatgaactgaaacgccaccacttggcccaggatgttgaaagggtgcaaattccttctgggtagataagaaatgactctgggagaggatttcccttatgtgaatctaggtaaaaagatggaaaaaaattgtattatgtgatcctaaggacaggaatagcagaccagccaacgggatggccttgggtacatcactcagcctttctggacccaatttttccccagtgaaagccaagttggactgaatttctggagttctcatcagtgcacattccatagttctccagtgcttggcgatcagcccaattgaaggactggctctgtactgacacttattatcggtacaggcaaagaggagcctgttgtctgttagggaccactaaatcaacaaccacaaatggattttttttttaagaggagctgtgcacctcaatttgctgtctagttgagaatagagattgtgtgccttcatttcattt

SEQ ID NO: 355 - DNA, 875 bp, Artificial
  cDNA Sequence
gagagacagaggcagcgtgtttgagctgctggtgcggtggtcagcgcgatgcccaaggccaagggcaaaacccggaggcagaagtttggttacagtgtcaaccgaaagcgtctgaaccggaatgctcgacggaaggcagcgccgcggatcgaatgctcccacatccgacatgcctgggaccacgctaaatcggtacggcagaacctggccgagatggggttggctgtggaccccaacagggcggtgcccctccgtaagagaaaggtgaaggccatggaggtggacatagaggagaggcctaaagagcttgtacggaagccctatgtgctgaatgacctggaggcagaagccagccttccagaaaagaaaggaaatactctgtctcgggacctcattgactatgtacgctacatggtagagaaccacggggaggactataaggccatggcccgtgatgagaagaattactatcaagataccccaaaacagattcggagtaagatcaacgtctataaacgcttttacccagcagagtggcaagacttcctcgattctttgcagaagaggaagatggaggtggagtgactggtttacatcacagctgccccaggctgaggcgtcccccggaccagtgaagctggagccagggtgtaaggcaaggaggtgctgtgtggctccagaggagctggccaggtcccatggaatcagaaggttacacacacgtgcacactccccgctctggggaaggaactgttctcagaggctccaatttatattcatctgggggttcacggaaaagccagaacctgctgttttcagggtgggtgatgtaaatatagtgtgtacataataaagcaaatatattttacttctct

SEQ ID NO: 356 - DNA, 954 bp, Artificial
  cDNA Sequence
atggctgatgactttggcttcttctcgtcgtcggagagcggtgccccggaggcggcggaggaggacccggcggccgccttcctggcccagcaggagagcgagattgcaggcatagagaacgacgagggcttcggggcacctgccggcagccatgcggcccccgcgcagccgggccccacgagtggggctggttctgaggacatggggaccacagtcaatggagatgtgtttcaggaggccaacggtcctgctgatggctacgcagccattgcccaggctgacaggctgacccaggagcctgagagcatccgcaagtggcgagaggagcagaggaaacggctgcaagagctggatgctgcatctaaggtcacggaacaggaatggcgggagaaggccaagaaggacctggaggagtggaaccagcgccagagtgaacaagtagagaagaacaagatcaacaaccgggcatccgaggaggctttcgtgaaggaatccaaggaggagaccccaggcacagagtgggagaaggtggcccagctatgtgacttcaaccccaagagcagcaagcagtgcaaagatgtgtcccgcctgcgctcggtgctcatgtccctgaagcagacgccactgtcccgctaggtgcctgctaggtgcatggccacagagcatgggctgggcctgggcacaggaggagcagctgctttggtcggggtggagactcgcagcagctgctacccacagcctattccactcctccccatctccaggcgctgggaggggggccctcaccccatcacgcctcgctccctcctggccctctggtccagcccctcacgcctcctctcagtctactcaattgtgactgtccctcctgatgtattttttttcttggcttaaagggtgtgttgttgactctttttacacttatttattatcattctcacttctctggaagcc

SEQ ID NO: 357 - DNA, 1009 bp, Artificial
  cDNA Sequence
atggctgatgactttggcttcttctcgtcgtcggagagcggtgccccggaggcggcggaggaggacccggcggccgccttcctggcccagcaggagagcgagattgcaggcatagagaacgacgagggcttcggggcacctgccggcagccatgcggcccccgcgcagccgggccccacgagtggggctggttctgaggacatggggaccacagtcaatggagatgtgtttcaggaggccaacggtcctgctgatggctacgcagccattgcccaggctgacaggctgacccaggagcctgagagcatccgcaagtggcgagaggagcagaggaaacggctgcaagagctggatgctgcatctaaggtcacggaacaggaatggcgggagaaggccaagaaggacctggaggagtggaaccagcgccagagtgaacaagtagagaagaacaagatcaacaaccggatcgctgacaaagcattctaccagcagccagatgctgatatcatcggctacgtggcatccgaggaggctttcgtgaaggaatccaaggaggagaccccaggcacagagtgggagaaggtggcccagctatgtgacttcaaccccaagagcagcaagcagtgcaaagatgtgtcccgcctgcgctcggtgctcatgtccctgaagcagacgccactgtcccgctaggtgcctgctaggtgcatggccacagagcatgggctgggcctgggcacaggaggagcagctgctttggtcggggtggagactcgcagcagctgctacccacagcctattccactcctccccatctccaggcgctgggaggggggccctcaccccatcacgcctcgctccctcctggccctctggtccagcccctcacgcctcctctcagtctactcaattgtgactgtccctcctgatgtattttttttcttggcttaaagggtgtgttgttgactctttttacacttatttattatcattctcacttctctggaagcca

SEQ ID NO: 358 - DNA, 2783 bp, Artificial
  cDNA Sequence
ggtactgctacctagtgggtcttggggaccttcgaaatcgccgccgctctcacaatggcttgggtccagactgcgccacagcctctcgggagacgtgggccctcggaacctttttagtgccggactccgggccgcaggcagtcccgcggcagcaggatcacagaacctctggatggactcttcctgggaagctttgctactttgcagcagctggaccatgttcctcattaacatctgtctgtccgcttagtcatcacatcatttcactgtggtggcagggactcagctcggaattctgtatagaaaaagcacctggatcccagtctttcaatggcttcaagacaaccagaagtgcctgctcttgaggctagtgcgcctctaggcaagatgtccctgcccatcgggatataccgccgggcagtcagctatgatgataccctcgaggaccctgcgcccatgactcctcctccatcggacatgggcagcgtcccttggaagccagtgattccagagcgcaagtatcagcacctcgccaaggtggaggaaggagaggccagtctaccctcccctgccatgaccctgtcatcagccattgacagtgtggacaaggtcccagtggtgaaggctaaagctacccatgtcatcatgaattctctgatcacaaaacagacccaggaaagcattcagcattttgagcgacaggcagggctgagagatgctggctacacaccccacaagggcctcaccaccgaggagaccaagtaccttcgagtggccgaagcactccacaaactaaagttacagagtggagaggtaacaaaagaagagaggcagcctgcatcagcccagtccaccccaagcaccactccgcactcttcacctaagcagaggcccaggggctggttcacttctggttcttccacagccttacctggcccaaatcctagcaccatggactctggaagtggggataaggacagaaacttgtcagataagtggagcctctttggaccgagatcccttcagaagtacgattctggaagttttgccacccaggcctaccgaggagcccagaagccctctccattggaactgatacgtgcccaggccaaccgaatggctgaagatccagcagccttgaagccccccaagatggacatcccagtgatggaaggaaagaaacagccaccacgggcccataacctcaaaccccgtgacctgaatgtgctcacacccactggcttctagagccctctttccagggattctggtaaaggtggtttcttgcatcccactccccttttaccttggctttgacataggaaaggtatatttaaaaacttaatcagctgggcgtggtggctcacgcctgtaatcccagcactttgggaggccaaggtaggtggatacctgaggtcaggagttcaagaccagcctggccaacatggtgaaaccccgtctctactaaaaatacaaaaattagctgggcgtggtggtgggcgcctgtagtcccagctacttgggaggctgaggcaggagaatcgcctgaacccaggaagcagatgttgtaccgagctgagatcatgccattacactccagcctgggcgacagaacgagacgccatcaataaataaataaataaagtaaagtaaaaaacctattaaattgaggctagagctggagatgtaattggtttttgagaaacattagtataaagcttgcccttgttgtgtggaagaagccattttgtactgctttaaagttagactaatattctcagcacgggtgtatggggacctcattacctatttttttcatcatttaccctaggtaagaactttgatcactgcttactaggtaaagaatgtttgtactgttccaaaacccaggcttctttattcctttaccactatccatgtgagcattgacaaatcatggcttagaggtgctcactgactcgctaagacgactttggccctgttgatgactggtgctgtgctccagccttatcagttaggggacccaaggtttgtttgggacctgggtacaggtaaaagccagacttggcagggacccctctttctaggctgaaccttgagtccccctgctttttggcagacctaatggatcactgtcttgcagctagttcttcatgtggggcctcttaggccagtgccggaggaggcatgctcctctttctatgccacagaacaaacactactctagcagagcctttcttgcactttaaagtgagattaatttagctgtaatttggttaaaaacttcctaagagagaaaattaagtctactgatttggtataggtaaatggacattaaacttttttaaagtaaaggagatggtagataccgttagattatagtcttgaggttcatgtgaagccagtggtgttaacttactttgatttccttgttcaggtcagggcctggaacgcctgtgcggggaggtcactcaattcaaaattttctgtatgaaagcatttttcaccaaaatgagcctcatccctttatgcaacacataaccttactgagggagggaaatacagaagccacctttttatttctcttcactgtgtacaagttcacttgttgtcttgaacactgtctcaaatacctgctttttgttttggatagtaccttgtctgtataagaagctggcctttccatagagaggccctggagtctaaaattatgagaacaattaatttatttgtgtcttctattatgatctcgttttgacaataaaaatccttactactttctc

SEQ ID NO: 359 - DNA, 375 bp, Artificial
  cDNA Sequence
atgactcttaacgagcatgctgccttcaagcatctgtttaacaaagcacatcttgcaccgcccttaatccttttaaccctgagtggacacagcacatgtttcagagagcacagggttgggggtaaggtcacagatcaacaggatcccaaggcagaggaatttttcttagtgcagaacaaaatgaaaactctcccatgtctacttctttctacacagacacggcaaccatccgatttctcaatcttttccccacctttcccgcctttctattccacaaagccgccattgtcatcctggcccgttctcaatgagctgttgggcacacctcccagacggggtggtggtcgggcagaggggctcctcacttcccagtag

SEQ ID NO: 360 - DNA, 3159 bp, Artificial
  cDNA Sequence
atggcaccagcatctgcttctggtgaggacctcaggaagcttccaaccatggcagaggtgaatggggagcaggacttcattgacttaactagagagaccagaccaaggacaaaagatcgcagtggactgtatgtgattgacctgacaagagctgagggagaaaatagacctattgccactcttgacttaactttagaacctgtcactccttcccagaaggagccaaccagtcttcagacatgtgccagcctctctggcaaagcggtgatggaagggcacgtggacagaagctctcagcctacagcacggagaatcattaacagtgatcctgtagatttggacctagtggaagaaaacacctttgtaggtcccccacccgctacatccatcagtggaggctctgtttatccaacagagcctaattgtagctcagccacattcacaggtaacctcagcttcttggcaagtctacagctgtcttcagatgttagctccctctccccaacaagcaataatagtaggagcagcagcagcagcagcaatcaaaaagcacccttgccatgcccacagcaagatgtatctcgcccaccacaggccttgccgtgccccctgcgacctttgccatgcccaccgagagcctcaccatgtccaccacgagcctcctcatgcccaccacgagccttgtcatgcccatcacaaaccatgcagtgccaactaccagctctaactcacccacctcaagaagtgccatgccctcggcagaatatcccaggcccacctcaagactctctgggcctacctcaagatgtgccagggctgcctcaaagcatattacatccacaagatgtggcatacctgcaagacatgccacggtcaccaggagatgtgccacagtcaccaagtgatgtttcaccgtcaccagatgcaccacagtcaccagggggcatgccacacttaccgggagatgtgttacattcacctggagacatgccacactcatcaggggacgtgacacactcacctagagacatccctcacttaccaggagacaggcctgactttacccagaatgatgtacagaaccgtgacatgcctatggatatctcagctctgtcctctccaagctgctctcccagcccacagtctgaaactcccttagagaaagttccttggctctctgtcatggaaaccccagccagaaaagaaatatcactgtcagagcctgccaaacctgggtctgcccacgtacaatcacgaacaccacaaggtgggttgtacaacagaccatgcctgcatagactgaagtacttcttacgtcctccggttcatcacctcttctttcagacgctaataccggataaagacacaagagagaacaagggtcaaaaattagaacccatccctcatcgaagactaagaatggtaacaaataccattgaagagaattttcctctggggactgtgcagtttttgatggactttgtgtcaccccagcattacccaccaagagaaatcgtggctcacatcatccagaaaatcttgctcagtggctctgagactgtggatgtcctaaaggaggcctacatgcttctcatgaaaattcaacagctacatccagccaatgccaagacagtggagtgggactggaaactgctcacctatgtcatggaggaagagggacaaactctgcctgggcgagtccttttcctgcgttatgtcgttcagaccctagaagatgactttcagcagaccctgaggaggcaacggcagcacctgcagcaatccattgcaaacatggtgctttcctgtgacaagcagccccacaatgtcagggatgttatcaagtggctggtcaaagcagtaactgaagatggattgactcagcccccaaatggaaatcaaacgtcttcaggaacaggaatcttgaaagccagcagtagccacccttcttcccagcccaacctgacaaagaacaccaatcagctgattgtgtgccagcttcagaggatgctctccatagccgtagaggtggacaggacccccacctgcagctccaataaaattgccgagatgatgtttgggtttgtgctggacattcctgagaggagccagagagaaatgttctttactaccatggaaagccaccttctgcgctgcaaagtgttagaaatcatattcctccacagctgtgagacacccacccgcctgcctctgtctctggcccaggccctctactttctgaataattctacgtcactgctcaagtgtcagtcagataaaagccagtggcagacttgggacgaattggttgagcatctgcagtttctgctgtccagttatcaacatgttttaagagaacacttaaggagttccgtgatcgaccgaaaggacttaataatcaaaaggattaagcccaaaccccagcaaggagatgacatcacagtggtagacgtagagaagcagattgaggccttccgcagccgcctgatccagatgctgggggagcctcttgtcccccaactccaagacaaagtgcacttgttgaagctcctgctcttctatgctgcggacttgaaccctgatgcagagccctttcaaaagggctggagcggctcctgagggcctgccaagcactgaatgccaagaatacctcctgaactctctctccaactgctcagaagctctaaaagcatgaaaagtggttaaaatcttacaggaccaaacctgcattatttaatcagtaggttgtaatttctaactctagtaaatatctttttttaaataatcctatcctagcctgttctcaaatatggcttaaatatacaaggtatatatattttttaataaattatttatctatacttttttgaaacaggttaatactctgtgcatcacatgtttaacattttcattcaagatgtggaaaaaatccctctgctgaacctagtctatacaccaatattatgtcattcaaggtaccgacaacctgtttcaggagagagacgttcatttttccctaatgaaatgcaagcattctgttagacctattatattgcctgttaatttgactgtaatgaatagggggtagaaacaaaaggatcaagtgtgttataaaacatttgatgttaaaaggagacaataaaaaggcaatggtttttc

SEQ ID NO: 361 - DNA, 1002 bp, Artificial
  cDNA Sequence
atgcctagatcctttgaacaagtaataatacttaaaaaatggtttctgaaaccttataagggacaaactctgcctgggcgagtccttttcctgcgttatgtcgttcagaccctagaagatgactttcagcagaccctgaggaggcaacggcagcacctgcagcaatccattgcaaacatggtgctttcctgtgacaagcagccccacaatgtcagggatgttatcaagtggctggtcaaagcagtaactgaagatggattgactcagcccccaaatggaaatcaaacgtcttcaggaacaggaatcttgaaagccagcagtagccacccttcttcccagcccaacctgacaaagaacaccaatcagctgattgtgtgccagcttcagaggatgctctccatagccgtagaggtggacaggacccccacctgcagctccaataaaattgccgagatgatgtttgggtttgtgctggacattcctgagaggagccagagagaaatgttctttactaccatggaaagccaccttctgcgctgcaaagtgttagaaatcatattcctccacagctgtgagacacccacccgcctgcctctgtctctggcccaggccctctactttctgaataattctacgtcactgctcaagtgtcagtcagataaaagccagtggcagacttgggacgaattggttgagcatctgcagtttctgctgtccagttatcaacatgttttaagagaacacttaaggagttccgtgatcgaccgaaaggacttaataatcaaaaggattaagcccaaaccccagcaaggagatgacatcacagtggtagacgtagagaagcagattgaggccttccgcagccgcctgatccagatgctgggggagcctcttgtcccccaactccaagacaaagtgcacttgttgaagctcctgctcttctatgctgcggacttgaaccctgatgcagagccctttcaaaagggctggagcggctcctga

SEQ ID NO: 362 - DNA, 861 bp, Artificial
  cDNA Sequence
atgtccaggggtaaagagaatgagacaggagttggcgagttcctcttgctcggcatcaccagtgactcagggaagcagcaggccctcttctggctcttcctgtgtatgcacttagtcactgaggctggaaacacacccatcatcctgggcatcggctccaaccttcgcctgcacacccccatgtacttcttcacccatctctcctttgtcaacatctgcttcatcaccaacctgatccccaagctcctggtcaaccattgcctgactcagatgtacttcctcatctcctttgccaacgtggacacctttctgctggccatcatggcactggaccactatgtggccatctgcagcgccctgcagtactgctccatcatcacccccggctctgtcaggggctggcccctcatctccctggtccacacggtcatcatgagcagactggccttctgctcctccgcccagatttcacacttctaccgtgacgcctacctgctcatgaagattgcctgctcacatacagacaatcagcatgtgttcctgggggctgtggtcctgttcctggctccctgtgcactcatcttggtctcctacatccgcattgctgcagccatcctccggattccatctcctacaagaaggcgcaaggcatgttccatatgtagctcccacctgtctctggtcaccctgttctatggaactgtcctggggatctgcatagacccccagactccttcagcccaggacaccatagcaaccatcatgtacactgtggtgacctctatgctaaaccccttcatctacagtctgatgaacaaggaggtccaggaggccgtgagaaggctcttcagtaggggctca

SEQ ID NO: 363 - DNA, 858 bp, Artificial
  cDNA Sequence
aatgagacaggagttggcgagttcctcttgctcggcatcaccagtgactcagggaagcagcaggccctcttctggctcttcctgtgtatgcacttagtcactgaggctggaaacacacccatcatcctgggcatcggctccaaccttcgcctgcacacccccatgtacttcttcacccatctctcctttgtcaacatctgcttcatcaccaacctgatccccaagctcctggtcaaccattgcctgactcagatgtacttcctcatctcctttgccaacgtggacacctttctgctggccatcatggcactggaccactatgtggccatctgcagcgccctgcagtactgctccatcatcacccccctgtcaggggctggccgtgctagcgtgagcaggctcagcctcatctccctggtccacacggtcatcatgagcagactggccttctgctcctccgcccagatttcacacttctaccgtgacgcctacctgctcatgaagattgcctgctcacatacagacaatcagcatgtgttcctgggggctgtggtcctgttcctggctccctgtgcactcatcttggtctcctacatccgcattgctgcagccatcctccggattccatctcctacaagaaggcgcaaggcatgttccatatgtagctcccacctgtctctggtcaccctgttctatggaactgtcctggggcatatgacccccagactcctttcagcccaggacaccatagcaaccatcatgtacactgtggtgacctctatgctaaaccccttcatctacagtctgatgaacaaggaggtccaggaggccgtgagaaggctcttcagtaggggctca

SEQ ID NO: 364 - DNA, 4354 bp, Artificial
  cDNA Sequence
gattcttaaaacttacaatccagattacgatgaggacctggtgcaggaagcttcatctgaagatgtcctgggcgttcatatggtggacaaagacacagagagagacattgagatgaaacggcaactacggcgactacgggagctccacctatacagcacatggaagaagtaccaagaggcgatggcacccaacgtgctgacaattactctgtgtttcctagagcgtgacgaaggctccttgggcaagccattgtgtccacccgagatactctcggagacgttgccaggctctgtgaagaaaagggtatgctttccatcagaagatcatctagaggagtttatagcagaacatctccctgaagcatccaatcagagtctcctcactgttgcccatgcagacgcaggcacccaaaccaacggtgacctggaagacctggaggagcatgggccagggcagacagtctctgaggaagccacagaagttcacacgatggagggggacccagacacactggccgaatttctgatcagggatgtacttcaggagctgtccagttacaacggtgaggaggaggacccagaggaggtgaagacatccttgggagttccacaacgtggtgacctggaagacctggaggagcatgtgccagggcagacagtctctgaggaagccacaggggttcacatgatgcaggtggacccagccacgctggcaaagagtgacctggaagacctggaggagcatgtgccagagcagacagtctctgaggaagccacaggggttcacatgatgcaggtggacccagccacactggcaaagcaattggaagactccaccattacaggcagccaccagcagatgtcagcaagtccttcctctgcacctgcagaagaagcaacagaaaagaccaaagtggaagaggaagtgaaaaccagaaagcccaagaagaaaaccaggaagcccagcaagaaaagccggtggaatgtcctgaaatgttgggacatttttaatatattttagagacctctgaaggattcctcgaccaccaggaagggccccgacgtggggatgtcaacatggctcagacttgatgtggatcgtgatcatttcgggaaatgtgttactccaaaaacttttataatctttgcttaatttgtttttaaatactttcctggctgggcgtggtggcttatgcctgtaatcccagcactttgggaggccgaggcgggtggatcacctgaggtcaggagttcaagaccagcctggccaacaaggtgaaaccccgtctctactaaaaatacaaaaattagctaggcgtggtggcgcactcttgtagtcccagctatttgggaggctgaggcaggagaatcacttgaactcaggaggcggaggttgcggtgagccgagatcatgccactgcaccccagcacctggctacagagtgagactttgtctcaaaaaaaaaaaaaaaagaacaaaaaaattctgactttaacctctgtttttcagagggcacaaattgttcttgtattgtttccattttacatttttttcttgaagttattttccaattgttttcattctttctgaagttttgtttactcggttttaagtttttgtaattttgatagacttcttttgtgctttcattttcttaatgacttttacctcatttttaaaacaaatccatagtatgggatgatattgatgatgaaatgtcttacgatgatcatttagaggtttatttcgaacaactggcaattccaggaatgatggaataaagcatacgaagtagaaggactggaacctccagaaaaagtactttaagttacctacaggtgatcctagtcagggtatgaattgataagaaatgcctgcaccttccctccttcctatctttcccttgcctacagaaaattaaaaggcaaaacaatggacatctacatattcttcattcagatcaaccagtggctagcatttgccaccttttgcagtttctttctctttccataagtactttcttctctgaatcatttgaaaggcaaatgaaaacagtagcctaaagtgtcagtttcaacccgaaaataacagctctgatttctcatggctcacactcgtctgaaatgactcgggtagaggctgaggaaggctgtgttgtttgtctacctgggactagcacctactgaaagaagttctcaagttctgattgagttctaaaattcttttgaagattggaattcttcatatgggcaccatgggccggcactgccacgttttccaaggaacctgccagagctcctgcggaagctgctcctcgggcgatggagtccctttgctgctaggcccttcttcagtcaccacaggatgcctgccattcatgaacaggaaggagaggacgggctttgaataaaaaacagggatccaggaaatatttgtgaggccatttggacttcagtgtgaaatggtgttaaaagatgaagtcatttattcaagaagtaaacctctgccacctggactgtgctcagacatttcattgattttgtttaataaacattttctggctttgggaggtgtctctcttggtagagcacagtgtcaaagatggacaagatggacacatagtccattatttggtattgtttgtgtatgggagcggaccacaaattaatgtttggagaacaattttgtcataacacactgttgaggctcagttgtacagaactggaaaagtctttcagcttggcacatgtcctgattcagcctttgtttaacatacattccaatccggattctatcttcactggctacaaagaccacctgatacgtgcaccacgacacaggagctgctggagagggggtagtgttatcacctcaaacccacagccatatttttcaaaagccagcttagagagaggtgtactgatagctgcatagagaacatgcagtccatccattcttcccagtgatgtacatttctcaatcagtaaccacgtggtataccagccttgagtgtcacatctcccaaccataccaaatggatcacctaactggaggtggggggggcccctcagaaatgagatttcgtatttactgtaaaattgccttattttttcttttgaggtggagtctcactctgttgcctgggctggagtgcaatggtgtgatcactgctcactgcaacctccgcctcctgggttcaagcagttctcctgcctcagcctcccaagtagctgcaattacaggcgcatgccaccactcccagcaaatttttatatttttagtggagacagggtttcaccatgttggccaggctggtctcaaactcctgacctcaggtgatctgcccaccttggcctcccaaagttctgggattaaaggtacgagccaccgcaactggctgagaatctttttatttgctgatttgtctcttgtgtattttctttgttcagatgtctcttcagatctttttctcacttttaaattgtttttttaattgttaagaattttctgtctagtttagatataagccctttatcagacatgtgttttgcaaatattttctcctagtctgtggcttgtattctgtctcttaacagtcattttatttttacttttgaaactaaagaagaagaatggtcagctttccgttattcttgtaacagtaatggcagaaccaagtctgctaatgctacattgagcaaagaaagtcacctggtcaagtccaacattaatgaaatggggtagtacatgcaggcggcgttggggttggggagggaacaaatgcttcttgagagtaatataatctgccataccatccaggaacctacaatggctatctattaccttattctctggtttgtttaatgttcaaatctttcctaaagatccttcaacttttctggaagaatctaatctgataacaccatcaaaaacacattacttcttttggcataatttaaattgtaagacatcattcacatttatcaatgttacatatataagaactcacccaccatattcctccttgaggaattacagcatgtaattctataaccatttttataatcgtctaacaattttataatggattggctgctatcaattttttaaaagtcatggcttctccagtcatttcttgcttatcaaaattatttcatgagatgggtctatccttgtatatttgaaaatgaggtttgcttccttctacttaaaaaacaacttgaacatacctgtttggatcacatggtcttgtcctgataacttggaagaggttgcttcagcattattcttattgttgtggtggttattattaacattgtttcatattccgtttaaaaaattaaaattttacac

SEQ ID NO: 365 - DNA, 750 bp, Artificial
  cDNA Sequence
gttgagatgaaacggcaactacggcgactacgggagctccacctatacagcacatggaagaagtaccaagaggcgatgaagacatccttgggagttccacaatgtgagcgtgacgaaggctccttgggcaagccattgtgtccacccgagatactctcggagacgttgccaggctctgtgaagaaaagggtatgctttccatcagaagatcatctagaggagtttatagcagaacatctccctgaagcatccaatcagagtctcctcactgttgcccatcgactctgtttcctaggtgacctggaagacctggaggagcatgggccagggcagacagtctctgaggaagccacagaagttcacacgatggagggggacccagacacactggccgaatttctgatcagggatgtacttcaggagctgtccagttacaacggtgaggaggaggacccagaggaggtgaagacatccttgggagttccacaacgtggtgacctggaagacctggaggagcatgtgccagggcagacagtctctgaggaagccacaggggttcacatgatgcaggtggacccagccacgctggcaaagagtgacctggaagacctggaggagcatgtgccagagcagacagtctctgaggaagccacaggggttcacatgatgcaggtggacccagccacactggcaaagcgtacgtattctgggatcatctctttgtttaggtgtgaaatcttagtgttgtaa

SEQ ID NO: 366 - DNA, 405 bp, Artificial
  cDNA Sequence
atgggcgactggaaggtctacatcagtgcagtgctgcgggaccagcgcatcgacgacgtggccatcgtgggccatgcggacaacagctgcgtgtgggcttcgcggcccgggggcctgctggcggccatctcgccgcaggaggtgggcgtgctcacggggccggacaggcacaccttcctgcaggcgggcctgagcgtggggggccgccgctgctgcgtcatccgcgaccacctgctggccgagggtgacggcgtgctggacgcacgcaccaaggggctggacgcgcgcgccgtgtgcgtgggccgtgcgccgcgcgcgctcctggtgctaatgggccgacgcggcgtacatgggggcatcctcaacaagacggtgcacgaactcatacgcgggctgcgcatgcag

SEQ ID NO: 367 - DNA, 2572 bp, Artificial
  cDNA Sequence
cttcattgagctgctgagcagaagctgaaacacagaattctaagcgttgctgagacccactgacctgcagacctcatagtgggtgcccaggatgttgtcctacggagagaggctggggtcccctgctgtctccccactcccagtccgtggggggcatgtgatgcgagggacggcctttgcctacgtgcccagccctcaggtcctacacaggatcccggggacctctgcctatgccttccccagcctgggccctgtggcccttgctgagcacacctgcccctgtggggaggtcctggagcgccatgaaccactgcctgccaagctggccctggaggaggagcagaagccagagtccaggctggtccccaagctgcgccaggctggcgccatgctgctcaaggtgccactgatgctcaccttcctctacctcttcgtctgctccctggacatgctcagctcggccttccagctggctggagggaaggtggctggtgacatcttcaaggataacgccatcctgtccaacccggtggccgggctggtggtggggatcctggtgaccgtgctggtgcagagctccagcacctccacatccatcatcgtcagcatggtctcctctggcttgctggaggtgagctctgccatccccatcatcatgggctccaacatcggcacctctgtcaccaacaccatcgtggccctgatgcaggcgggggacaggactgacttccggcgggccttcgcgggggccacggtgcatgactgctttaactggctgtcagtgctggtcctgctgcccctggaggctgccactggctacctgcaccacatcactcgacttgtggtggcctccttcaacatccatggtggccgtgatgctcctgacctgctcaagatcatcacagagcccttcacgaagctcatcatccagctggacgagtctgtgataaccagcattgccactggtgatgagtccctgaggaaccacagtctcatccagatctggtgccacccagactccttacaggctcccacctccatgtccagagcagaggccaactccagccagacccttggaaatgccaccatggagaaatgcaaccacatctttgtggacactggcctaccggacctggctgtggggctcatcctgctggcaggatccctggtgctgctgtgcacctgcctcatcctcctagtcaagatgctcaactccctgctcaagggccaagtggccaaggtcatccagaaggtcatcaatacggacttccctgcccccttcacctgggtcacaggctactttgccatggtggtgggcgccagcatgaccttcgtggtccagagcagttctgtgttcacctcggccatcaccccactcatcggtcttggtgtgatcagcattgagagggcctacccgctcacactgggttccaacatcggcaccaccaccacggccatcctggctgccctggccagccccagggagaagctgtccagcgctttccagattgccctctgtcacttcttcttcaacatctcgggtatccttctgtggtacccggtgccctgcacacgcctgcccatccgcatggccaaggcgctggggaaacgcacggccaagtaccgctggtttgccgtcctctatctccttgtctgcttcctgctgctgccctcactggtgtttggcatctccatggcaggctggcaggtcatggtaggtgtgggtacgcccttcggggccctgctggccttcgtggtgctcatcaatgtcctgcagagtcggagtcccgggcacctgcccaagtggttacagacatgggacttcctgcctcgctggatgcactccctgaagcccctggaccacctcatcacccgcgccaccctatgctgtgccaggcctgagccccgctcacccccgctgccccccagggtcttcctggaggagctaccccctgccacaccctccccccgtcttgcactgcctgctcaccacaatgccacccgcctctaggctgtgggcccagactacagcctggaatggggaaggcctggggtggaaaggcaggggagggagggtgtgtgtaggtatgtgcatgtgcctgtgccaccctgggtgccagtctctccttctgtagctccgcaaagctctgggcttgtgtgagagtgtcggtgtgtgtgcatgtgtgggggtgagtctgcatgtgcacctgtcctgtgtagaagcttgtatttgtgtacaggtgtgccagcccatgcaggtgtacacagacacacctgtgggaggctgtgtgcaggctgcaggatatctgggtatgatttcaggtcctctgcacgtgtacacatgactaggataggcaggagtaagggtgggtctgggtatatgactgtgcagctgtttgtgcatagatgttggtgcctgcgttactgaatttgcacacctccttgccaccttccttcctccaagataccatctcctcatcctaacccaggtcttcggcaccaccacaattaattcccttcccaacacttgcctgatggaaaaaaaacaaaggaattaaaactctcctcaggc

SEQ ID NO: 368 - DNA, 3825 bp, Artificial
  cDNA Sequence
atgacaggatcaaattcacacataacaatattaactttaaatataaatggactaaattctgcaattaaaagacacagactggcaagttggataaagagtcaagacccatcagtgtgctgtattcaggaaacccatctcacgtgcagagacacacataggctcaaaataaaaggatggaggaagatctaccaagcaaatggaaaacaaaaaaaggcaggggttgcaatcctagtctctgataaaacagactttaaaccaacaaagatcaaaagagacaaagaaggccattacataatggtaaagggatcaattcaacaagaggagctaactatcctaaatatttatgcacccaatacaggagcacccagattcataaagcaagtcctgagtgacctacaaagagacttagactcccacacattaataatgggagactttaacaccccactgtcaatattagacagatcaacgagacagaaagtcaacaaggatacccaggaattgaactcagctctgcaccaagcagacctaatagacatctacagaactctccaccccaaatcaacagaatatacatttttttcagcaccacaccacacctattccaaaattgaccacatagttggaagtaaagctctcctcagcaaatgtaaaagaacagaaattataacaaactatctctcagaccacagtgcaatcaaactagaactcaggattaagaatctcactcaaagccgctcaactacatggaaactgaacaacctgctcctgaatgactactgggtacataacgaaatgaaggcagaaataaagatgttctttgaaaccaacgagaacaaagacaccacataccagaatctctgggacgcattcaaagcagtgtgtagagggaaatttatagcactaaatgcctacaagagaaagcaggaaagatccaaaattgacaccctaacatcacaattaaaagaactagaaaagcaagagcaaacacattcaaaagctagcagaaggcaagaaataactaaaatcagagcagaactgaaggaaatagagacacaaaaaacccttcaaaaaatcaatgaatccaggagctggttttttgaaaggatcaacaaaattgatagaccgctagcaagactaataaagaaaaaaagagagaagaatcaaatagacacaataaaaaatgataaaggggatatcaccaccgatcccacagaaatacaaactaccatcagagaatactacaaacacctctacgcaaataaactagaaaatctagaagaaatggatacattcctcgacacatacactctcccaagactaaaccaggaagaagttgaatctctgaatagaccaataacaggctctgaaattgtggcaataatcaatagtttaccaaccaaaaagagtccaggaccagatggattcacagccgaattctaccagaggtacaaggaggaactggtaccattccttctgaaactattccaatcaatagaaaaagagggaatcctccctaactcattttatgaggccagcatcattctgataccaaagccgggcagagacacaaccaaaaaagagaattttagaccaatatccttgatgaacattgatgcaaaaatcctcaataaaatactggcaaaccgaatccagcagcacatcaaaaagcttatccaccatgatcaagtgggcttcatccctgggatgcaaggctggttcaatatacgcaaatcaataaatgtaatccagcatataaacagagccaaagacaaaaaccacatgattatctcaatagatgcagaaaaagcctttgacaaaattcaacaacccttcatgctaaaaactctcaataaattaggtattgatgggacgtatttcaaaataataagagctatctatgacaaacccacagccaatatcatactgaatgggcaaaaactggaagcattccctttgaaaactggcacaagacagggatgccctctctcaccgctcctattcaacatagtgttggaagttctggccagggcaatcaggcaggagaaggaaataaagggtattcaattaggaaaagaggaagtcaaattgtccctgtttgcagacgacatgattgtttatctagaaaaccccatcgtctcagcccaaaatctccttaagctgataagcaacttcagcaaagtctcaggatacaaaatcaatgtacaaaaaccacaagcattcttatacaccaacaacagacaaacagagagccaaatcatgggtgaactcccattcacaattgcttcaaagagaataaaatacctaggaatccaacttacaagggatgtgaaggacctcttcaagaactacaaaccactgctcaaggaaataaaagaggacacaaacaaatggaagaacattccatgctcatgggtaggaagaatcaatatcgtgaaaatggccatactgcccaaggtaatttacagattcaatgccatccccatcaagctaccaatgactttcttcacagaattggaaaaaactactttaaagttcatatggaaccaaaaaagagcccgcattgccaagtcaatcctaagccaaaagaacaaagctggaggcatcacactacctgacttcaaactatactacaaggctacagtaaccaaaacagcatggtactggtaccaaaacagagatatagatcaatggaacagaacagagccctcagaaataatgccgcatatctacaactatctgatctttgacaaacctgagaaaaacaagcaatggggaaaggattccctatttaataaatggtgctgggaaaactggctagccatatgtagaaagctgaaactggatcccttccttacaccttatacaaaaatcaattcaagatggattaaagatttaaacgttaaacctaaaaccataaaaaccctagaagaaaacctaggcattaccattcaggacataggcgtgggcaaggacttcatgtccaaaacaccaaaagcaatggcaacaaaagacaaaattgacaaatgggatctaattaaactaaagagcttctgcacagcaaaagaaactaccatcagagtgaacaggcaacctacaacatgggagaaaattttcgcaacctactcatctgacaaagggctaatatccagaatctacaatgaactcaaacaaatttacaagaaaaaaacaaacaaccccatcaaaaagtgggcgaaggacatgaacagacacttctcaaaagaagacatttatgcagccaaaaaacacatgaagaaatgctcatcatcactggccatcagagaaatgcaaatcaaaaccactatgagatatcatctcacaccagttagaatggcaatcattaaaaagtcaggaaacaacaggtgctggagaggatgcggagaaataggaacacttttacactgttggtgggactgtaaactagttcaaccattgtggaagtcagtgtggcgattcctcagggatctagaactagaaataccatttgacccagccatcccattactgggtatatacccaaatgagtataaatcatgctgctataaagacacatgcacacgtatgtttattgcggcactattcacaatagcaaagacttggaaccaacccaaatgtccaacaatgatagactggattaagaaaatgtggcacatatacaccatggaatactatgcagccataaaaaatgatgagttcatatcctttgtagggacatggatgaaattggaaaccatcattctcagtaaactatcacaagaacaaaaaaccaaacaccgcatattctcactcataggtgggaattga

SEQ ID NO: 369 - DNA, 2832 bp, Artificial
  cDNA Sequence
ggccggcggcgcggcccggcgggccaggcggcgccacagcccatggagctcgagaacatcgtagcgaacacggtgctactcaaggcccgggaaggtggcggtggaaatcgcaaaggcaaaagcaagaaatggcggcagatgctccagttccctcacatcagccagtgcgaagagctgcggctcagcctcgagcgtgactatcacagcctgtgcgagcggcagcccattgggcgcctgctgttccgagagttctgtgccacgaggccggagctgagccgctgcgtcgccttcctggatggggtggccgagtatgaagtgaccccggatgacaagcggaaggcatgtgggcggcagctaacgcagaattttctgagccacacgggtcctgacctcatccctgaggtcccccggcagctggtgacgaactgcacccagcggctggagcagggtccctgcaaagaccttttccaggaactcacccggctgacccacgagtacctgagcgtggccccttttgccgactacctcgacagcatctacttcaaccgtttcctgcagtggaagtggctggaaaggcagccagtgaccaaaaacaccttcaggcaataccgagtcctgggcaaaggtggctttggggaggtgtgcgcctgccaggtgcgggccacaggtaagatgtatgcctgcaagaagctagagaaaaagcggatcaagaagcggaaaggggaggccatggcgctgaacgagaagcagatcctggagaaagtgaacagtaggtttgtagtgagcttggcctacgcctatgagaccaaggacgcgctgtgcctggtgctgacactgatgaacgggggcgacctcaagttccacatctaccacatgggccaggctggcttccccgaagcgcgggccgtcttctacgccgccgagatctgctgtggcctggaggacctgcaccgggagcgcatcgtgtacagggacctgaagcccgagaacatcttgctggatgaccacggccacatccgcatctctgacctgggactagctgtgcatgtgcccgagggccagaccatcaaagggcgtgtgggcaccgtgggttacatggctccggaggtggtgaaaaatgaacggtacacgttcagccctgactggtgggcgctcggctgcctcctgtacgagatgatcgcaggccagtcgcccttccagcagaggaagaagaagatcaagcgggaggaggtggagcggctggtgaaggaggtccccgaggagtattccgagcgcttttccccgcaggcccgctcactttgctcacagctcctctgcaaggaccctgccgaacgcctggggtgtcgtgggggcagtgcccgcgaggtgaaggagcaccccctctttaagaagctgaacttcaagcggctgggagctggcatgctggagccgcccttcaagcctgacccccaggccatttactgcaaggatgttctggacattgaacagttctctacggtcaagggcgtggagctggagcctaccgaccaggacttctaccagaagtttgccacaggcagtgtgcccatcccctggcagaacgagatggtggagaccgagtgcttccaagagctgaatgtctttgggctggatggctcagttcccccagacctggactggaagggccagccacctgcacctcctaaaaagggactgctgcagagactcttcagtcgccaagattgctgtggaaactgcagcgacagcgaggaagagctccccacccgcctctagcccccagcccgaggcccccaccagcagttggcggtagcagctactccgagcgccgtttacagttttgcacagtgatcttccccattgtccactcaagtcgtggcctggggaacacagacggagctgtccccagtgtcctccgtccctcagcccctggcctggctgagtttggcagggcctgggccatccctgggacaaaggtgcgtcccttcagctcttctccgtggagctcggggctttctgtatttatgtatttgtacgaatgtatatagcgaccagagcattcttaattcccgccgcagacctggcgcccccgccttggctcctgggggcagccagccctggctgggagagcgggagctggcagaggagccactgccaaactcaaggctcctctggcccagcttggatggctgagggtggtcacacccctgagccttcagcactgtgctggccaccccggcctctgagtaagactcgtgcctccccctgctgccctgggctcaggctgctaccctctggggcccaaagctgtcccttctcagtgcttgtcagcgctgggtctggggcctctgtatgccctaggcctgtgccaaagtggccagagattgggctgcctgtgatacccatcagcccactgccccggccggcccagataggtctgcctctgccttccagctcccacagcctggtccctgatactgggctctgtcctgcagacacctctttcagaaacgcccaagcccagcccctaggagggggtggggcatccctggtcaaccctcaaacattccggactcccctcataacaatagacacatgtgcccagcaataatccgccccttcctgtgtgcgcctgtggggtgcgtgcgcgcgcgtgtgtacctgtgtgggtgaaggggatagggcgaggctgtgcctgtgccccaggtcccagccctggcccttcccagactgtgatggccatcctggtcccagtgttagggtagcatgggattacagggccctgttttttccatatttaaagccaatttttattactcgttttgtccaacgtaa

SEQ ID NO: 370 - DNA, 1478 bp, Artificial
  cDNA Sequence
gtgcgcgcgccccgcgcctccagcccagcgctcggagccgctttcgctgccactgtctgctcccccgggccgccgccgcctccccccgcaggcccggggctctgtccgctgggcccgcgctgctcgccccgagccaggagaacgagctcgaggaggatgcctgggcccggtgcaaggttccccctctcacccgcagctgtggagaggaggaagcggaactagagatgcccatctggagtgagtgcaggaccaggtcccgcgcggccccgggtgaggcacgcccgcgcgcccgccggcgccatgggaaggagcgggcgccgctgctgtcccccgccggcgcgcgcacgacttgagacctgccacgggcagcccccggccgcgggtccccgagtgacgctggcggcacctgagagtgtggcgcgggcccggggccacgcagcggagcccagtgtccagtgaagcgtctgaggacccgccgcccgtgccgccgccatggtgatgtcccagggcacctacacgttcctcacgtgcttcgccggcttctggctcatctggggtctcatcgtcctgctctgctgcttctgcagcttcctgcgccgccgcctcaaacggcgccaggaggagcgactgcgcgagcagaacctgcgcgccctagagctggagcccctcgaactcgagggcagtctggccgggagccccccgggcctggcgccgccgcagccaccaccacaccgtagccgcctggaggcgccggctcacgcgcactcgcatccgcacgtgcacgtgcacccgctgctgcaccacgggcccgcgcagccgcacgcgcacgcgcacccacacccgcaccaccacgcgctcccgcacccgccgcctacgcacctgtcggtgccgccacggccctggagctacccgcgccaagcggaatcggacatgtccaaaccaccgtgttacgaagaggcggtgctgatggcagagccgccgccgccctatagcgaggtgctcacggacacgcgcggcctctaccgcaagatcgtcacgcccttcctgagtcgccgcgacagcgcggagaagcaggagcagccgcctcccagctacaagccgctcttcctggaccggggctacacctcggcgctgcacctgcccagcgcccctcggcccgcgccgccctgcccagccctctgcctgcaggccgaccgtggccgccgggtcttccccagctggaccgactcagagctcagcagccgcgagcccctggagcacggagcttggcgtctgccggtctccatccccttgttcgggaggactacagccgtatagaggggcgcccggcgccccgggccccaccggcggactcctggcctgactgcggggctttttaaatgcttccctggactgcggggaggggcggggggagggagggatttcttatcccgtttgttacattttgaggataataaaggtgtgtgatctggtttggt

SEQ ID NO: 371 - DNA, 2052 bp, Artificial
  cDNA Sequence
ctattgatctggactcctggataggcagctggaccaacggacggacgccatgagggctctgctgctcctggggttcctgctggtgagcttggagtcaacactttcgattccaccttgggaagcccccaaggagcataagtacaaagctgaagagcacacagtcgttctcactgtcaccggggagccctgccacttccccttccagtaccaccggcagctgtaccacaaatgtacccacaagggccggccaggccctcagccctggtgtgctaccacccccaactttgatcaggaccagcgatggggatactgtttggagcccaagaaagtgaaagaccactgcagcaaacacagcccctgccagaaaggagggacctgtgtgaacatgccaagcggcccccactgtctctgtccacaacacctcactggaaaccactgccagaaagagaagtgctttgagcctcagcttctccggtttttccacaagaatgagatatggtatagaactgagcaagcagctgtggccagatgccagtgcaagggtcctgatgcccactgccagcggctggccagccaggcctgccgcaccaacccgtgcctccatgggggtcgctgcctagaggtggagggccaccgcctgtgccactgcccggtgggctacaccggacccttctgcgacgtggacaccaaggcaagctgctatgatggccgcgggctcagctaccgcggcctggccaggaccacgctctcgggtgcgccctgtcagccgtgggcctcggaggccacctaccggaacgtgactgccgagcaagcgcggaactggggactgggcggccacgccttctgccggaacccggacaacgacatccgcccgtggtgcttcgtgctgaaccgcgaccggctgagctgggagtactgcgacctggcacagtgccagaccccaacccaggcggcgcctccgaccccggtgtcccctaggcttcatgtcccactcatgcccgcgcagccggcaccgccgaagcctcagcccacgacccggaccccgcctcagtcccagaccccgggagccttgccggcgaagcgggagcagccgccttccctgaccaggaacggcccactgagctgcgggcagcggctccgcaagagtctgtcttcgatgacccgcgtcgttggcgggctggtggcgctacgcggggcgcacccctacatcgccgcgctgtactggggccacagtttctgcgccggcagcctcatcgccccctgctgggtgctgacggccgctcactgcctgcaggaccggcggcccgcacccgaggatctgacggtggtgctcggccaggaacgccgtaaccacagctgtgagccgtgccagacgttggccgtgcgctcctaccgcttgcacgaggccttctcgcccgtcagctaccagcacgacctggctctgttgcgccttcaggaggatgcggacggcagctgcgcgctcctgtcgccttacgttcagccggtgtgcctgccaagcggcgccgcgcgaccctccgagaccacgctctgccaggtggccggctggggccaccagttcgagggggcggaggaatatgccagcttcctgcaggaggcgcaggtaccgttcctctccctggagcgctgctcagccccggacgtgcacggatcctccatcctccccggcatgctctgcgcagggttcctcgagggcggcaccgatgcgtgccagggtgattccggaggcccgctggtgtgtgaggaccaagctgcagagcgccggctcaccctgcaaggcatcatcagctggggatcgggctgtggtgaccgcaacaagccaggcgtctacaccgatgtggcctactacctggcctggatccgggagcacaccgtttcctgattgctcagggactcatctttccctccttggtgattccgcagtgagagagtggctggggcatggaaggcaagattgtgtcccattcccccagtgcggccagctccgcgccaggatggcgcaggaactcaataaagtgctttgaaaatgctgag

SEQ ID NO: 372 - DNA, 1723 bp, Artificial
  cDNA Sequence
atgactcggggagccagactgcgatcagacgcgcgtgcccagctgaaccagctgtctctggacggagggacgggaagtggccagaaggggaagtgtgaggagttcccgtccagcctgtcatcagtctccccaggtcttgaagcggcggccctgctcctggccgtgaccatggaccctctggagacccctatcaaggatggcatcctctaccagcagcatgtcaagtttggcaagaagtgctggcggaaggtgtgggctctgctgtatgcaggaggcccatcaggcgtggcacggctggagagctgggaggtccgggatggtggcctgggagcagcgggtgacaggtcggcagggcctggccggcgaggggagcgacgggtcatccgcctggctgactgtgtgtccgtgctgccggctgacggcgagagctgcccccgggacaccggtgccttcctgctcaccaccaccgagcgaagccatctactggctgctcagcaccgccaggcctggatgggccccatctgccagctggccttcccggggacaggggaggcctcctcaggatccacagatgcccagtctcccaagaggggcctggtccccatggaggaaaactccatctactcctcctggcaggaagtgggcgagtttcccgtggtggtgcagaggactgaggccgccacccgctgccagctgaaggggccggccctgctggtgctgggcccagacgccatccagctgagggaggccaagggcacccaggccctctacagctggccctaccacttcctgcgcaagttcggctccgacaagggcgtgttctcctttgaggccggccgtcgctgccactcgggtgagggcctctttgccttcagcaccccctgtgcccctgacctgtgcagggctgtggccggggccatcgcccgccagcgggagcggctgccagagctgaccaggccccagccctgccccctgccacgggccacctctctgccctccctggacacccccggagagcttcgggagatgccaccaggacctgagccacccacgtccaggaaaatgcacctggccgagcccggaccccagagcctgccgctactgctaggcccggagcccaacgatctggcgtccgggctctacgcttcagtgtgcaagcgtgccagtgggcccccaggcaatgagcacctctatgagaacctgtgtgtgctggaggccagccccacgctgcacggtggggaacctgagccgcacgagggccccggcagccgcagccccacaaccagtcccatctaccacaacggccaggacttgagctggcccggcccggccaacgacagtaccctggaggcccagtaccggcggctgctggagctggatcaggtggagggcacaggccgccctgaccctcaggcaggtttcaaggccaagctggtgaccctgctgagtcgtgagcggaggaagggcccagccccttgtgaccggccctgaacgcccagcagagtggtggccagaggggagaggtgctccccctgggacaggagggtgggctggtgggcaaacattgggcccatgcagacacacgcctgtgtccaccctggcctgcaggaacaaggcaggccgcctgtggaggacctcagccctgccctgccctcctcatgaatagtgtgcagactcacagataataaagctcagagcagctcccggcaggggcactcacggc

SEQ ID NO: 373 - DNA, 1789 bp, Artificial
  cDNA Sequence
atgggccccatctgccagctggccttcccggggacaggggaggcctcctcaggatccacagatgcccagtctcccaagaggggcctggtccccatggaggaaaactccatctactcctcctggcaggaagtgggcgagtttcccgtggtggtgcagaggactgaggccgccacccgctgccagctgaaggggccggccctgctggtgctgggcccagacgccatccagctgagggaggccaagggcacccaggccctctacagctggccctaccacttcctgcgcaagttcggctccgacaagatacttctgggaaccccaggcgtcagtctcctcatctgtaaaggagagagaaccgatgacgtatcaggcataatccttgatgagagtttgctgcgtgcctactcagtgccaggcgctgggggacacagccgtgttcaggacagccttggtcctgttctccgggagccgacattccagggggagagaagtttcctgaagacttccatgctgcgttccctcctctgctcctgctcctggcgccatcctaggagccagccatgcacgcaagcgtcatgcctccagggctctgactgcccagcccctcaccgcaactccacctcagctgcacacacccttggcacatcctgaacctcattttcatgacggacacacaatttttgctctctcctgtccaagcctcatcctctggccgccacctccttccagctcacttcctttagtgcggccagtaccgcccctgcctaggcatgtcgacctgcagggacccttttctggctcttcgaggcctctgcccaccatcccctctttgttctccatagtcccttccccctgttctctctcgtttcatcttactggtctggcaaagtccccggccttgggcgagcccagacctcctcagtgcctgcacacagctgcccacagccagagaaatccatttaagcagactgcctgcatccttcttaacagtgcaaggcaggcactccctgccacaagagaccctgttccctagtagggcagcttttctcctccccagaacctcctgtctatccccacccaatgtctcctcacaggcatattggggaaacaggtcaggctctcccaccgtatctgcaagtgtactggcatccatctgtcttcttcctacccctacagtagaaacagtgtctgtccccagctgtgctctgatcccggctcctttcacctcagagcttggaaaattgagctgtccccactctctcctgcgcccattcatcctaccagcagcttttccagccacacgcaaacatgctctgtaatttcacattttaaaccttcccttgacctcacattcctcttcggccacctctgtttctctgttcctcttcacagcaaaaactgttcaaaagagttgttgattactttcatttccactttctcacccccattctctcctcaattaactctccttcatccccatgatgccattatgtggcttttattagagtcaccaaccttattctccaaaacaaaagcaacaaggactttgacttctcagcagcactcagctctggttcttgaaacacccccgttacttgctattcctcctacctcataacaatctccttcccagcctctactgctgccttctctgagttcttcccagggtcctaggctcagatgtagtgtagctcaaccctgctacacaaagaatctcctgaaagcctgtaaaaatgtccatgcatgttctgtgagtgatctaccaagaaaataaaaaattttaaaaatc

SEQ ID NO: 374 - DNA, 2915 bp, Artificial
  cDNA Sequence
ccctcccccggccgctggctcgctcggctcgcgacgctgcagaggctccgaggcggcggcggcgactccctctttccctccctcctcctccgtccgcccgtccgtccgcgcgtctgtccgttcggcccggtccggcccgaagcatggccggcgtcagcttcagcggccaccgcctggagctgctggcggcttacgaggaggtgatccgagaggagagcgcggccgactgggctctgtacacatatgaagatggctccgatgacctcaagcttgcagcatcaggagaagggggcttgcaggagctttcgggacactttgagaaccagaaggtgatgtacggcttctgcagtgtcaaggactcccaagctgctctgccaaaatacgtgctcatcaactgggtgggcgaagatgtgcctgatgcccgcaagtgcgcttgtgccagccacgtggctaaggtggcagagttcttccagggtgtcgacgtgatcgtgaacgccagcagcgtggaagacatagacgcgggtgccatcgggcagcggctctctaacgggctggcgcgactctccagccctgtgctgcaccgactgcggctgcgagaggatgagaacgcagagcccgtgggcaccacctaccagaagacggatgcagctgtggaaatgaagcggattaaccgagagcagttctgggagcaggccaagaaggaagaagagctgcggaaggaggaggagcggaagaaggccctggatgagaggctcaggttcgagcaggagcggatggagcaggagcggcaggagcaagaggagcgcgagcggcgctaccgggagcgggagcagcagatcgaggagcacaggaggaaacagcagactttagaagcggaagaggccaagaggcggttgaaggagcagtctatctttggtgaccatcgggatgaggaggaagagacccacatgaagaagtcagagtcggaggtggaggaggcagcagctattattgcccagcggcctgacaacccaagggagttcttcaagcagcaggaaagagtcgcatcggcctctgcgggcagctgtgatgtaccctcgcccttcaaccatcgaccaggcagccacctggacagccaccggaggatggcgcccactcccatccccacgcggagcccgtctgactccagcaccgcctccacccctgtcgctgagcagatagagcgggccctggatgaggtcacctcctcgcagcctccaccactgccaccgccacccccaccagcccaagagacccaggagcccagccccatcctagacagtgaggagaccagagcagcagcccctcaggcctgggccggccccatggaggagccccctcaggcacaggcgcctccccgggggccaggcagccctgcagaggacttgatgttcatggagtctgcagagcaggctgtcctggctgctcccgtggagcctgccacagctgacgccacggaggtccacgatgcagctgacaccattgaaactgacactgccactgctgacaccactgttgccaacaacgtaccccccgccgccaccagcctcattgacctatggcctggcaacggggaaggggcctccacactccagggtgagcccagggcccccacgccaccctcgggtactgaggtcaccctggcagaggtgcccctgctggatgaggtggctccggagccactgctgccagcaggcgaaggctgtgccacccttctcaactttgatgagctgcctgagccgccagccaccttctgtgacccagaggaagtggaaggggagcccctggctgccccccagaccccaactctgccctcagcccttgaggagctggagcaagagcaggagccggagccccacctgctaaccaatggcgagaccacccagaaggaggggacccaggccagtgaggggtacttcagtcaatcacaggaggaggagtttgcccaatcggaagagctctgtgccaaggctccgcctcctgtgttctacaacaagcctccagagatcgacatcacatgctgggatgcagacccagttccagaagaggaggagggcttcgagggtggtgattagcggtggcgccagccctaggctacccttgccaaggccgcccacctgcatcagcctctggccagacggcccgccgtgcctgcattcgcagcagctccgcctggcacccactccggattccggccctggctggggacttggccgcttccctacccacagggcctgacttttacagcttttctctttttttaaaaagttgataggagacttgtacagttgactggctttcctctcgttggtagttgagacgctgttgcaaattccacccctccttccctggtccagattgtagctcttagtcctccctgctcagctggccgggttggaggcctcaccctgcttggggcctggcgtggggggagctctggtgggaaaatgtcccccacctcttttcctagttttatgtttcttgggaaaatatcactttgtattctctgtccagggcttcagatattttgcacgaattttaaaacatggcaataaatggctcgtgggctctggctccctgggaccccctccccgcccttcttttgaccccttcctgtctggcccaaaggaagtagcaggcccagctggggcccctcggctaccccccgtctcctgccgggcaggtcccaggttggaggccctaggcgcggttcaggtcagggctatggatggggcccaggggctttggtggcccctccccaactccttcctctttgcttgggttcctttttcacgtttagtaactgtttttttttgttttttttttttttttttttggaaagcacaaacttctgtaacgggtcgtgctcatgtctgttaataaagaaatccagatcc

SEQ ID NO: 375 - DNA, 3388 bp, Artificial
  cDNA Sequence
ggcggccggacgcggcccggaggcgcggggtcccgatgtggggcccggggccgcgtggccctgcgggagcccatcccccaccctaccccccgggcccgggggacaggtgtgcacggggcggccaagggcaccttcgccaccttcgagcgggcgaggtccgggcggggacggggcggggaccgagctagcggagccagcgcagcctgcccggctcagcccggcccggccacagcacaaaggaaagcgagggcgggggaggagcggagcgggctgggggccgggcgccccgcccaccggggggcctctcggagtgggccgccctccccccgaaacctgggctggagtgaggtggaaggatgtttgctgccacatggcgaccgcgaagtgactcccttaccgccgcgggtcgcggaggaggcagggggaaggtgcccatctggttcctaggcctcctctccctgctggcagatgggaacaggttcttcttgaggaaactgaggcaaagaggagggcaggtctgagggaccccgcttgggctggcctcacccgcacactgggagggcagccaggtggggactctgacctgggggcttctggaggagaggatgagatggctgggcatccatggcatggtactgcagcactggccagcagccaggcctggagggatggacgcgagagacaagctctcgtgtcctgcagggctctgtacacatatgaagatggctccgatgacctcaagcttgcagcatcaggagaagggggcttgcaggagctttcgggacactttgagaaccagaaggtgatgtacggcttctgcagtgtcaaggactcccaagctgctctgccaaaatacgtgctcatcaactgggtgggcgaagatgtgcctgatgcccgcaagtgcgcttgtgccagccacgtggctaaggtggcagagttcttccagggtgtcgacgtgatcgtgaacgccagcagcgtggaagacatagacgcgggtgccatcgggcagcggctctctaacgggctggcgcgactctccagccctgtgctgcaccgactgcggctgcgagaggatgagaacgcagagcccgtgggcaccacctaccagaagacggatgcagctgtggaaatgaagcggattaaccgagagcagttctgggagcaggccaagaaggaagaagagctgcggaaggaggaggagcggaagaaggccctggatgagaggctcaggttcgagcaggagcggatggagcaggagcggcaggagcaagaggagcgcgagcggcgctaccgggagcgggagcagcagatcgaggagcacaggaggaaacagcagactttagaagcggaagaggccaagaggcggttgaaggagcagtctatctttggtgaccatcgggatgaggaggaagagacccacatgaagaagtcagagtcggaggtggaggaggcagcagctattattgcccagcggcctgacaacccaagggagttcttcaagcagcaggaaagagtcgcatcggcctctgcgggcagctgtgatgtaccctcgcccttcaaccatcgaccaggcagccacctggacagccaccggaggatggcgcccactcccatccccacgcggagcccgtctgactccagcaccgcctccacccctgtcgctgagcagatagagcgggccctggatgaggtcacctcctcgcagcctccaccactgccaccgccacccccaccagcccaagagacccaggagcccagccccatcctagacagtgaggagaccagagcagcagcccctcaggcctgggccggccccatggaggagccccctcaggcacaggcgcctccccgggggccaggcagccctgcagaggacttgatgttcatggagtctgcagagcaggctgtcctggctgctcccgtggagcctgccacagctgacgccacggaggtccacgatgcagctgacaccattgaaactgacactgccactgctgacaccactgttgccaacaacgtaccccccgccgccaccagcctcattgacctatggcctggcaacggggaaggggcctccacactccagggtgagcccagggcccccacgccaccctcgggtactgaggtcaccctggcagaggtgcccctgctggatgaggtggctccggagccactgctgccagcaggcgaaggctgtgccacccttctcaactttgatgagctgcctgagccgccagccaccttctgtgacccagaggaagtggaaggggagcccctggctgccccccagaccccaactctgccctcagcccttgaggagctggagcaagagcaggagccggagccccacctgctaaccaatggcgagaccacccagaaggaggggacccaggccagtgaggggtacttcagtcaatcacaggaggaggagtttgcccaatcggaagagctctgtgccaaggctccgcctcctgtgttctacaacaagcctccagagatcgacatcacatgctgggatgcagacccagttccagaagaggaggagggcttcgagggtggtgattagcggtggcgccagccctaggctacccttgccaaggccgcccacctgcatcagcctctggccagacggcccgccgtgcctgcattcgcagcagctccgcctggcacccactccggattccggccctggctggggacttggccgcttccctacccacagggcctgacttttacagcttttctctttttttaaaaagttgataggagacttgtacagttgactggctttcctctcgttggtagttgagacgctgttgcaaattccacccctccttccctggtccagattgtagctcttagtcctccctgctcagctggccgggttggaggcctcaccctgcttggggcctggcgtggggggagctctggtgggaaaatgtcccccacctcttttcctagttttatgtttcttgggaaaatatcactttgtattctctgtccagggcttcagatattttgcacgaattttaaaacatggcaataaatggctcgtgggctctggctccctgggaccccctccccgcccttcttttgaccccttcctgtctggcccaaaggaagtagcaggcccagctggggcccctcggctaccccccgtctcctgccgggcaggtcccaggttggaggccctaggcgcggttcaggtcagggctatggatggggcccaggggctttggtggcccctccccaactccttcctctttgcttgggttcctttttcacgtttagtaactgtttttttttgttttttttttttttttttttggaaagcacaaacttctgtaacgggtcgtgctcatgtctgttaataaagaaatccagatcc

SEQ ID NO: 376 - DNA, 1698 bp, Artificial
  cDNA Sequence
ggccgatcccaacgaggctccctggagcccgacgcagagcagcgccctggccgggccaagcaggagccggcatcatggattccttcaaagtagtgctggaggggccagcaccttggggcttccggctgcaagggggcaaggacttcaatgtgcccctctccatttcccggctcactcctgggggcaaagcggcgcaggccggagtggccgtgggtgactgggtgctgagcatcgatggcgagaatgcgggtagcctcacacacatcgaagctcagaacaagatccgggcctgcggggagcgcctcagcctgggcctcagcagggcccagccggttcagagcaaaccgcagaaggcctccgcccccgccgcggaccctccgcggtacacctttgcacccagcgtctccctcaacaagacggcccggccctttggggcgcccccgcccgctgacagcgccccgcagcagaatggacagccgctccgaccgctggtcccagatgccagcaagcagcggctgatggagaacacagaggactggcggccgcggccggggacaggccagtcgcgttccttccgcatccttgcccacctcacaggcaccgagttcatgcaagacccggatgaggagcacctgaagaaatcaagccaggtgcccaggacagaagccccagccccagcctcatctacaccccaggagccctggcctggccctaccgcccccagccctaccagccgcccgccctgggctgtggaccctgcgtttgccgagcgctatgccccggacaaaacgagcacagtgctgacccggcacagccagccggccacgcccacgccgctgcagagccgcacctccattgtgcaggcagctgccggaggggtgccaggagggggcagcaacaacggcaagactcccgtgtgtcaccagtgccacaaggtcatccggggccgctacctggtggcgctgggccacgcgtaccacccggaggagtttgtgtgtagccagtgtgggaaggtcctggaagagggtggcttctttgaggagaagggcgccatcttctgcccaccatgctatgacgtgcgctatgcacccagctgtgccaagtgcaagaagaagattacaggcgagatcatgcacgccctgaagatgacctggcacgtgcactgctttacctgtgctgcctgcaagacgcccatccggaacagggccttctacatggaggagggcgtgccctattgcgagcgagactatgagaagatgtttggcacgaaatgccatggctgtgacttcaagatcgacgctggggaccgcttcctggaggccctgggcttcagctggcatgacacctgcttcgtctgtgcgatatgtcagatcaacctggaaggaaagaccttctactccaagaaggacaggcctctctgcaagagccatgccttctctcatgtgtgagccccttctgcccacagctgccgcggtggcccctagcctgaggggcctggagtcgtggccctgcatttctgggtagggctggcaatggttgccttaaccctggctcctggcccgagcctggggctccctgggccctgccccacccaccttatcctcccaccccactccctccaccaccacagcacaccgatgctggccacaccagccccctttcacctccagtgccacaataaacctgtacccagctgtg

SEQ ID NO: 377 - DNA, 1651 bp, Artificial
  cDNA Sequence
cgacgcagagcagcgccctggccgggccaagcaggagccggcatcatggattccttcaaagtagtgctggaggggccagcaccttggggcttccggctgcaagggggcaaggacttcaatgtgcccctctccatttcccggctcactcctgggggcaaagcggcgcaggccggagtggccgtgggtgactgggtgctgagcatcgatggcgagaatgcgggtagcctcacacacatcgaagctcagaacaagatccgggcctgcggggagcgcctcagcctgggcctcagcagggcccagccggttcagagcaaaccgcagaaggcctccgcccccgccgcggaccctccgcggcctttgcacccagcgtctccctcaacaagacggcccggccctttgcccccgcccgctgacagcgccccgcagcagaatggacagccgctccgaccgctggtcccagatgccagcaagcagcggctgatggagaacacagaggactggcggccgcggccgggggccagtcgcgttccttccgcatccttgcccacctcacaggcaccgagttcagtaatgcaagacccggatgaggagcacctgaagaaatcaagccaggtgcccagaagccccagccccagcctcatctacaccccaggagccctggcctggccctaccgcccccagccctaccagccgcccgccctgggctgtggaccctgcgtttgccgagcgctatgccccggacaaaacgagcacagtgctgaccacagccagccggccacgcccacgccgctgcagagccgcacctccattgtgcaggcagctgccggaggggtgccaggagggggcagcaacaacggcaagactcccgtgtgtcaccagtgccacaaggtcatccggggccgctacctggtggcgctgggccacgcgtaccacccggaggagtttgtgtgtagccagtgtgggaaggtcctggaagagggtggcttctttgaggagaagggcgccatcttctgcccaccatgctatgacgtgcgctatgcacccagctgtgccaagtgcaagaagaagattacaggcgagatcatgcacgccctgaagatgacctggcacgtgcactgctttacctgtgctgcctgcaagacgcccatccggaacagggccttctacatggaggagggcgtgccctattgcgagcgagactatgagaagatgtttggcacgaaatgccatggctgtgacttcaagatcgacgctggggaccgcttcctggaggccctgggcttcagctggcatgacacctgcttcgtctgtgcgatatgtcagatcaacctggaaggaaagaccttctactccaagaaggacaggcctctctgcaagagccatgccttctctcatgtgtgagccccttctgcccacagctgccgcggtggcccctagcctgaggggcctggagtcgtggccctgcatttctgggtagggctggcaatggttgccttaaccctggctcctggcccgagcctggggctccctgggccctgccccacccaccttatcctcccaccccactccctccaccaccacagcacaccgatgctggccacaccagccccctttcacctccagtgccacaataaacctgtacccagctgtg

SEQ ID NO: 378 - DNA, 1567 bp, Artificial
  cDNA Sequence
cgacgcagagcagcgccctggccgggccaagcaggagccggcatcatggattccttcaaagtagtgctggaggggccagcaccttggggcttccggctgcaagggggcaaggacttcaatgtgcccctctccatttcccggctcactcctgggggcaaagcggcgcaggccggagtggccgtgggtgactgggtgctgagcatcgatggcgagaatgcgggtagcctcacacacatcgaagctcagaacaagatccgggcctgcggggagcgcctcagcctgggcctcagcagggcccagccggttcagagcaaaccgcagaaggtgcagacccctgacaaacagccgctccgaccgctggtcccagatgccagcaagcagcggctgatggagaacacagaggactggcggccgcggccggggacaggccagtcgcgttccttccgcatccttgcccacctcacaggcaccgagttcatgcaagacccggatgaggagcacctgaagaaatcaagccaggtgcccaggacagaagccccagccccagcctcatctacaccccaggagccctggcctggccctaccgcccccagccctaccagccgcccgccctgggctgtggaccctgcgtttgccgagcgctatgccccggacaaaacgagcacagtgctgacccggcacagccagccggccacgcccacgccgctgcagagccgcacctccattgtgcaggcagctgccggaggggtgccaggagggggcagcaacaacggcaagactcccgtgtgtcaccagtgccacaaggtcatccggggccgctacctggtggcgctgggccacgcgtaccacccggaggagtttgtgtgtagccagtgtgggaaggtcctggaagagggtggcttctttgaggagaagggcgccatcttctgcccaccatgctatgacgtgcgctatgcacccagctgtgccaagtgcaagaagaagattacaggcgagatcatgcacgccctgaagatgacctggcacgtgcactgctttacctgtgctgcctgcaagacgcccatccggaacagggccttctacatggaggagggcgtgccctattgcgagcgagactatgagaagatgtttggcacgaaatgccatggctgtgacttcaagatcgacgctggggaccgcttcctggaggccctgggcttcagctggcatgacacctgcttcgtctgtgcgatatgtcagatcaacctggaaggaaagaccttctactccaagaaggacaggcctctctgcaagagccatgccttctctcatgtgtgagccccttctgcccacagctgccgcggtggcccctagcctgaggggcctggagtcgtggccctgcatttctgggtagggctggcaatggttgccttaaccctggctcctggcccgagcctggggctccctgggccctgccccacccaccttatcctcccaccccactccctccaccaccacagcacaccgatgctggccacaccagccccctttcacctccagtgccacaataaacctgtacccagctgtg

SEQ ID NO: 379 - DNA, 754 bp, Artificial; identical to SEQ ID NO: 331
  cDNA Sequence

SEQ ID NO: 380 - DNA, 1639 bp, Artificial
  cDNA Sequence
atggattccttcaaagtagtgctggaggggccagcaccttggggcttccggctgcaagggggcaaggacttcaatgtgcccctctccatttcccggctcactcctgggggcaaagcggcgcaggccggagtggccgtgggtgactgggtgctgagcatcgatggcgagaatgcgggtagcctcacacacatcgaagctcagaacaagatccgggcctgcggggagcgcctcagcctgggcctcagcagggcccagccggttcagagcaaaccgcagaaggcctccgcccccgccgcggaccctccgcggtacacctttgcacccagcgtctccctcaacaagacggcccggccctttggggcgcccccgcccgctgacagcgccccgcagcagaatgggtgcagacccctgacaaacagccgctccgaccgctggtcccagatgccagcaagcagcggctgatggagaacacagaggactggcggccgcggccggggacaggccagtcgcgttccttccgcatccttgcccacctcacaggcaccgagttcatgcaagacccggatgaggagcacctgaagaaatcaagccaggtgcccaggacagaagccccagccccagcctcatctacaccccaggagccctggcctggccctaccgcccccagccctaccagccgcccgccctgggctgtggaccctgcgtttgccgagcgctatgccccggacaaaacgagcacagtgctgacccggcacagccagccggccacgcccacgccgctgcagagccgcacctccattgtgcaggcagctgccggaggggtgccaggagggggcagcaacaacggcaagactcccgtgtgtcaccagtgccacaaggtcatccggggccgctacctggtggcgctgggccacgcgtaccacccggaggagtttgtgtgtagccagtgtgggaaggtcctggaagagggtggcttctttgaggagaagggcgccatcttctgcccaccatgctatgacgtgcgctatgcacccagctgtgccaagtgcaagaagaagattacaggcgagatcatgcacgccctgaagatgacctggcacgtgcactgctttacctgtgctgcctgcaagacgcccatccggaacagggccttctacatggaggagggcgtgccctattgcgagcgagactatgagaagatgtttggcacgaaatgccatggctgtgacttcaagatcgacgctggggaccgcttcctggaggccctgggcttcagctggcatgacacctgcttcgtctgtgcgatatgtcagatcaacctggaaggaaagaccttctactccaagaaggacaggcctctctgcaagagccatgccttctctcatgtgtgagccccttctgcccacagctgccgcggtggcccctagcctgaggggcctggagtcgtggccctgcatttctgggtagggctggcaatggttgccttaaccctggctcctggcccgagcctggggctccctgggccctgccccacccaccttatcctcccaccccactccctccaccaccacagcacaccgatgctggccacaccagccccctttcacctccagtgccacaataaacctgtacccagctg

SEQ ID NO: 381 - DNA, 4602 bp, Artificial
  cDNA Sequence
gcggtagcggcggcggcggcggcggcggtggcggcggcggcggcgcggcgtgtggagcgagggagcggcgcgagcggcggcatgacgcggaggcggagcaggccgagcggcggtgcgggcaggcgcgagcgggctcgggccgcggggccgcagaagccccaggcgcccgagcccccgccgccgccaagcctggaggcgggagcgggtgcaggccctccggaggcgccggcggagcccgaccacgacggccccagggaggatgacgaacccaacctggtgcccggcccgcaggtaggagcgagcggggagacttcggcggctcgggcgctttcaccttccccgagcgggagcgggagtggggcggggttggggatgggccatcctgccgcggctggggtagcagccttcccccgggtccggcgccgaagctttctcccccggggcgggaatggaggctggacccctctccccaaagccgaggctcggtccgcgctcctgcgactaggctgaagctgctcccctctccccgccgcctccgggcgttctggccgtacacccacactgggactgggactgggactgggctgtgatcccgaggccgcagctccgctctcggcccgccacctcccccgggcccacctgctccctcagccacaggccatctcggggctctgggactggacgactgcagcctcttccctctgcccccgggaacggctccactccgtcccctgcagcgcctgcagccgcggccccctcagcagctgtgtctcctggcgcctcctcgccatacccagcagagcagttggagcagacagccaggctgcccggaggagtttttggtggggtttctgcactgaggtggaaacccagcagaacctgcccttcttccctcccctgctccgcaaggcagcccaccccgaccttgagatcccaggtttggagaatcctgctgagagcgaacagtaggaggattccccaaagcttccagcttgccacctggaagaaggtcactttcttttgagcaaaggagataacgggaggtaccctgccaaagttcactgagaggcgggggtgacatgggccacggttgctctgggagggttgtggcactcggggctgggtggctctccctaagcttgctctgacaaaagagttttgagttggtcttttggctgagcctgcccaggaaggcaggctcctgcaggagtcttggagggtcggatgcggcgccggatgaggatgaggcgtggcggaagatgcgtttggctctgcagacactgcatcgggcagcaggggactctgggaggctggtgcagccagaaggcatggctcttgacagccttctagtagaatctctggaattgtgcatatgaagaaacagaaactcagagcaactaaacatttgcccaaatgactccaactgtaggtgtcagacaaaagaaaagaaaaggacttttaggtcccccccgcctccagccagcctgtgcagacttgctgcctgctgtgtcaccgggaacgcaaaggctgggaagaaggcccttctcaaaatggactggtgttgcagggtgagaagctgccccctgacttcatgccaaagctcgtcaagaatctcctaggcgagatgcctctgtgggtctgccagagttgccgaaagagcatggaggaagatgaaaggcagacaggtcgagaacatgcagtggcgatctccttgtcacacacatcctgcaaatcacagtcttgtggagatgactctcattcgtcctcgtcttcctcctcatcatcctcatcctcgtcctcctcttcctgccctgggaactcgggagactgggatcctagctcgttcctgtcggcacataagctctcgggcctctggaattccccacattccagtggggccatgccaggcagctctcttgggagtcctcctaccatccccggtgaggctttccccgtctcggagcaccaccagcactcagacctcactgctccccctaacagccccaccggccaccacccgcagccagcatctctaatcccgtctcaccccagctcctttggctccccaccccacccacacctgctgcccaccaccccggcagcacctttccctgcccaggcttcagagtgccctgttgctgctgccactgccccccacactccagggccatgtcagagctcccatctaccctccaccagcatgccgctcctgaagatgcccccaccattctcggggtgcagccacccctgcagcgggcactgtggtgggcactgcagtgggcctcttctcccacccccgagctctcagccactccctagcactcacagggatcccgggtgcaaggggcacaagtttgcacacagtggcctggcttgccagctgccccagccctgcgaggcagatgaggggctgggtgaggaagaggatagcagctctgagcgaagctcctgcacctcatcctccacccaccagagagatgggaagttctgtgactgctgctactgtgagttcttcggccacaatgcggcaaaaggaaaggaaatggcagagagaaagctatgattctgatgagtatgtatacgtgtgtaatcccagagaagtgaacgcttgggagtgatgaaggcagagtggaagcaaaaaggctctcagtcccccaagtgtgacagccagccgagggacaggccgtgagcacagacggcgccaggaaggaggctcagatcagagggcatgctggctctggccagggggaggaagcagtgcagaagtctcataagccacccgctgccccgacgagtcggaactataccgagatccgggagaagctccgctcgaggctgaccaggcggaaagaggagctgcccatgaaggggggcaccctgggcgggatccctggggagcccgccgtggaccaccgagatgtggatgagctgctggaattcatcaacagcacggagcccaaagtccccaacagcgccagggccgccaagcgggcccggcacaagctgaaaaagaaggaaaaggagaaggcccagttggcagcagaagctctaaagcaggcaaatcgtgtttctggaagccgggagccaaggcctgccagggagaggctcttggagtggcccgaccgggaactggatcgggtcaacagcttcctgagcagccgtctgcaggagatcaaaaacactgtcaaagactccatccgtgccagcttcagtgtgtgtgagctcagcatggacagcaatggcttctctaaggagggggctgctgagcctgagcctcagagtctacccccctcaaacctcagtggctcctcagagcagcagcctgacatcaaccttgacctgtcccctttgactttgggctcccctcagaaccacacgttacaagctccaggcgagccagccccaccatgggcagaaatgagaggcccccacccaccatggacagaggtgagggggccccctcccggtatcgtccccgagaacgggctcgtgaggagactcaacaccgtgcccaacctatcccgggtgatctgggtcaagacacccaagccgggctaccccagctccgaggagccaagctcaaaggaagttcccagttgcaagcaggagctgcctgagcctgtgtcctcaggtgggaagccacagaagggcaagaggcagggcagtcaggccaagaagagcgaggcaagcccagccccccggcccccagccagcctagaggttcccagtgccaagggccaggtcgctggccccaagcagccaggcagggtcctagagcttcccaaagtaggcagctgtgctgaggctggagaggggagccgggggagccggccaggaccaggttgggctggcagtcccaaaactgagaaggagaagggcagctcctggcgaaactggccaggcgaggccaaggcacggcctcaggagcaggagtctgtgcagccctcaggcccagcaaggccacagagcttgccccagggcaagggccgcagccgccggagccgcaacaagcaggagaagccagcctcctccttggacgatgtgttcctgcccaaggacatggacggggtggagatggatgagactgaccgagaggtggagtactttaagaggttctgtttggattctgcaaagcagactcgtcagaaagttgctgtgaactggaccaacttcagcctcaagaaaaccactcctagcacagctcagtgaggccctgcccaggctgagctgcttcagggcgtcctgaggccctgactgccagctgaaggcgtataatttttccctccgtgtgccccacctacccgtccaagaccctctgtgctccccaccatcctggaccaaccaaaagctgaacggatgccacactgtgctggggccccttgacctcagcagagccgcttcctggtgctacgcagcctccacactcagagcccgtggactgggctggcctaagggccagggctgatggtactgctggcccaacactgctctctttgtgtttggtttttttgtttttgtttttattttgtttttttccaattctttacttttgatactgtgaagatctttcgtgccgaaagataaagcaacatttggacacag

SEQ ID NO: 382 - DNA, 2058 bp, Artificial
  cDNA Sequence
cagcgggctcgcaccgacgaggtgcctgccggaggaagccgctccgaggcggaagatgaggacgacgaggactacgtgccctatgtgccgttacggcagcgccggcagctactgctccagaagctgctgcagcgaagacgcaagggagctgcggaggaagagcagcaggacagcggtagtgaaccccggggagatgaggacgacatcccgctaggccctcagtccaacgtcagcctcctggatcagcaccagcaccttaaagagaaggctgaagcgcgcaaagagtctgccaaggagaagcagctgaaggaagaagagaagatcctggagagtgttgccgagggccgagcattgatgtcagtgaaggagatggctaagggcattacgtatgatgaccccatcaaaaccagctggactccaccccgttatgttctgagcatgtctgaagagcgacatgagcgcgtgcggaagaaataccacatcctggtggagggagacggtatcccaccacccatcaagagcttcaaggaaatgaagtttcctgcagccatcctgagaggcctgaagaagaaaggcattcaccacccaacacccattcagatccagggcatccccaccattctatctggccgtgacatgataggcatcgctttcacgggttcaggcaagacactggtgttcacgttgcccgtcatcatgttctgcctggaacaagagaagaggttacccttctcaaagcgcgaggggccctatggactcatcatctgcccctcgcgggagctggcccggcagacccatggcatcctggagtactactgccgcctgctgcaggaggacagctcaccactcctgcgctgcgccctctgcattgggggcatgtccgtgaaagagcagatggagaccatccgacacggtgtacacatgatggtggccaccccggggcgcctcatggatttgctgcagaagaagatggtcagcctagacatctgtcgctacctggccctggacgaggctgaccgcatgatcgacatgggcttcgagggtgacatccgtaccatcttctcctacttcaagggccagcgacagaccctgctcttcagtgccaccatgccgaagaagattcagaactttgctaagagtgcccttgtaaagcctgtgaccatcaatgtggggcgcgctggggctgccagcctggatgtcatccaggaggtagaatatgtgaaggaggaggccaagatggtgtacctgctcgagtgcctgcagaagacacccccgcctgtactcatctttgcagagaagaaggcagacgtggacgccatccacgagtacctgctgctcaagggggttgaggccgtagccatccatgggggcaaagaccaggaggaacggactaaggccatcgaggcattccgggagggcaagaaggatgtcctagtagccacagacgttgcctccaagggcctggacttccctgccatccagcacgtcatcaattatgacatgccagaggagattgagaactatgtacaccggattggccgcaccgggcgctcgggaaacacaggcatcgccactaccttcatcaacaaagcgtgtgatgagtcagtgctgatggacctcaaagcgctgctgctagaagccaagcagaaggtgccgcccgtgctgcaggtgctgcattgcggggatgagtccatgctggacattggaggagagcgcggctgtgccttctgcgggggcctgggtcatcggatcactgactgccccaaactcgaggctatgcagaccaagcaggtcagcaacatcggtcgcaaggactacctggcccacagctccatggacttctgagccgacagtcttcccttctctccaagaggcctcagtccccaagactgccaccagtctacacatacagcagccccctggacagaatcagcatttcagttcagctggcctggaatgggccaggctggtcctggctgcctgttccctgtgctcttcagaattactgtttttgtttccttttaccccagctgccattaaagcccaaacctctagccc

SEQ ID NO: 383 - DNA, 789 bp, Artificial
  cDNA Sequence
atgggaagatgggtgaaccagtcctacacagatggcttcttcctcttgggcatcttttcccacagccagactgaccttgtcctcttctctgcagttatggtggtcttcacagtggccctctgtgggaatgtcctcctcatcttcctcatctacctggacgctggacttcacacccccatgtacttcttcctcagccagctctccctcatggacctcatgttggtctgtaacattgtgccaaagatggcagccaacttcctgtctggcaggaagtccatctcctttgtgggctgtggcatacaaattggcttttttgtctctcttgtgggatctgaggggctcttgctgggactcatggcttatgaccgctacgtggccgttagccacccacttcactatcccatcctcatgaatcagagggtctgtctccagattactgggagctcctgggcctttgggataatagatggagtgattcagatggtggcagccatgggcttaccttactgtggctcaaggagcgtggatcactttttctgtgaggtacaagctttattgaagctggcctgtgcagacacttccctttttgacaccctcctctttgcttgctgtgtcttcatgcttctccttcccttctccatcatcatggcctcctatgcttgcatcaggggctgtgctccgaatacgctctgctcaggcctggaaaaaagccctggccacctgctcctcccacctaacagctgtcaccctcttctatggggcagccatgttcatgtacctgaggcctag

SEQ ID NO: 384 - DNA, 1500 bp, Artificial
  cDNA Sequence
gccgggcagcagcgcaggggcagctcgtcccgtcgcaccgcgtcgcgcagcctgtcccacgccgacctcagcaccagggccgacgagagctcggcggagaagcggctcgcgctgtcgcagatctgcgagtggatggtcaagagcgtgccctgctcccagggcgacagcaacagctcggcgggctgcaggaattcacttcgtcatcttctgtccctacacagcaagctgactcgcgcgcagaatgaaggaactggaaaaagtgctcggtggacgctggatccagagggcggcaagggtgggagatctcttaggacaagagctgcatccatggacagcagcagcaaatgcgctcggagcctaagtcaagctgccacgaaaaaagcactgcagtctagccaggggggtgccggggacagccctggaccccagttttccagatggcctgcaagccctggctctcacagcaatgatgactttaatagctggagtgcatttcgccctggaactagctcaaatgctagtactgttactgggagactttcacccattatagtcaaaggagactatcttggagatggggacgcacattctgtggggtacccgccatctgcggcaaagatgcccctactcacccagtctgagacaagcaatcctaacgtggaaagctttctgagtgatctcagtcttatctcctcaccaacatcattaactgtgtccacccagtcctcacctggcaccatgatgcagcagacgccatactcctttgtgccaccaaacaccagtctgaattcgcccagccaaactgcaaaaaacagacgtggccagtccaacatgagccctttgccccagatgcaaacactccaggagcacaaatcaagttacggagctgtgagtccgtgtaactgtgtagcgggactcctggaggagatgctgacttctgactctcctccccataatgacattatgacaccagctgatcctggagtagcccaatccaacagtcggtttctgggccagaataccatgatgggccttaattcagccatgtcaacctatggcagccaggcatctggatacaaaatgaggcatcccagctcccatatccaccctgggcatgctcagcagacatatgcagcttacggccgtgccctgtctcacacggaaaacaccaagccccacacctcaggtgtgaaccaactgaccccagtgaagacacctttgcaagtgcctctgccccaccccatgcagatgagtgccctggggggctactcctcggtgagcagctgcagtggttatggcagaatggaccttctccaccaggagaggcttccaagtgacttggacggcatgctcactgagcccttggactgtgacatggaaatcttcatttggaatgacctcatggatggagacacgctggatttttcaggcaatgttttgcccagccaaagctcctcacacagtgtcaagacaaggacacatagctgcgtgtcaggctga

SEQ ID NO: 385 - DNA, 1104 bp, Artificial
  cDNA Sequence
atgctgtgcaaagagaaagggatcaccgtgctgggttggaacgtggtgtttgacatcttggtgagaggcaaattcaatgttctggaaattgtccagaaggtaccacataaggacaagtcaagagaatcttggcatgctcaggaaccgggactcctcttcagaatgaccctgctcgcctccggaggggctgggatgctctccgtgcgctggaggatcataggcccgggcccgccggccttcaccgaggaggacaactgggcctcctttgctgaccgcgtgctggcgagggccataaacgacaattactcctattcattgaatgcctggctgctgctgctgcgtccctggtggctgtgttttgattggtcagtgggctgcagccccctcatgaagtccctcagcgactggagggtaactgcatttgcagcgctctggttccgcccagttggcctcatacgccaagccctgtgctctgcagacggccaccagagaaggatccttactctgcgcctgggattgctcgttatcccgtttctccccgcaagtaacctgttcttccgagcgggcttcgtggtcccgagcgtggggtgctgtgtgatgctgctttttggattcggagcctgcaaacacaccgagaaaaagaagctcatcgctgccgtggtgctgggaatcctactcgatgctgagaggctgagatgcgcggtgcgcggcggcgagtggcggagcgaggcggttttcagaggcgctgtgtctgtgtgtcccctcagtgctgaggttcgctgcaacatcggcagaaacctggctgctaaaggcaaccagacgggcgccatcagataccaccgggaagctgtaagcttaaatcccaagtatgttcatgccgtgaataatcttgcaaatgtcttaaaagaaaggaatgagctacaggaagctgaggagctgctgtctttggctgttcaaatgcagccagactttgctgctgcgtggatgagtctaggcatagcgcggagcagcctgaaacgctttgaaaccgccaagcaaagttacccgacggcgagtaaaagaaggaaatacccagaccgttactacagcctccggcgtctgctg

SEQ ID NO: 386 - DNA, 948 bp, Artificial
  cDNA Sequence
atggagacgtgggtgaaccagtcctacacagatggcttcttcctcttaggcatcttctcccacagtactgctgaccttgtcctcttctccgtggttatggcggtcttcacagtggccctctgtgggaatgtcctcctcatcttcctcatctacatggaccctcaccttcacacccccatgtacttcttcctcagccagctctccctcatggacctcatgttggtctgtaccaatgtgccaaagatggcagccaacttcctgtctggcaggaagtccatctcctttgtgggctgtggcatacaaattggcctctttgtctgtcttgtgggatctgaggggctcttgctgggactcatggcttatgaccgctatgtggccattagccacccacttcactatcccatcctcatgaatcagagggtctgtctccagattactgggagctcctgggcctttgggataatcgatggcttgatccagatggtggtagtaatgaatttcccctactgtggcttgaggaaggtgaaccatttcttctgtgagatgctatccttgttgaagctggcctgtgtagacacatccctgtttgagaaggtgatatttgcttgctgtgtcttcatgcttctcttcccattctccatcatcgtggcctcctatgctcacattctagggactgtgctgcaaatgcactctgctcaggcctggaaaaaggccctggccacctgctcctcccacctgacagctgtcaccctcttctatggggcagccatgttcatctacctgaggcctaggcactaccgggcccccagccatgacaaggtggcctctatcttctacacggtccttactcccatgctcaaccccctcatttacagcttgaggaacagggaggtgatgggggcactgaggaaggggctggaccgctgcaggatcggcagccagcactga

SEQ ID NO: 387 - DNA, 2535 bp, Artificial
  cDNA Sequence
acagggaaaaagcaacaagaaggaagagcaatggcgacactggatcgcaaagtgcccagtccggaggcgtttctgggcaaaccctggtcctcctggatcgacgccgccaaattacactgctccgacaatgtagatttagaagaggctggaaaagagggtggaaaaagcagggaggttatgaggcttaataaagaagatatgcacttatttggccattacccagcacatgacgacttctatctcgtagtgtgcagtgcctgtaaccaggtcgtcaagccacaggttttccagtcgcactgcgagagaagacacggttcaatgtgtagaccttctccctctccagtgtctccagcctccaatcccaggacatcactagtacaggtgaaaacaaaagcctgtctcagcggccatcactctgccagcagcacctcaaagccattcaaaacgcccaaagacaatctacttacctccagcagcaaacagcacacagtctttcctgcgaaaggatcaagggataaaccatgtgttccagttcctgtagtcagtttagagaaaattcctaacctagtgaaggcagatggtgccaatgtcaaaatgaactccacaaccactactgcagtttctgcctcctccacctcgtcctctgccgtctccacccctcctttaattaagcctgtcctgatgtccaagtcagtgccaccttcaccagagaagatcttaaatggcaaaggaattctgccaaccaccatagacaagaaacaccaaaatggcaccaaaaacagcaacaagccttacaggagactttcagagagagaatttgacccaaataaacactgtggagtattggatcccgagacaaagaaaccttgcacaagatccctcacctgcaagacacattcgctaagccatcggagggcagtcccaggccggaaaaagcaatttgacctcctcctggcagaacacaaagcaaagtcccgggaaaaagaagttaaagataaagagcatctcctgacttccacgagggaaatacttccaagccaatccgggccggcacaggattctctgctagggtcttcagggagctctgggccagaaccaaaagttgcatcccctgcaaaatccagaccacccaactctgtacttcctagaccatcatctgcaaatagcataagcagcagcacatcttcaaatcatagcggccacactccagagcccccactcccaccggttggaggtgacctcgccagccgactgtccagtgatgaaggggagatggacggagccgacgaatccgagaagctagactgtcagttctccacgcaccaccccagacctctggcgttttgctcatttgggagtcgcctcatgggacgagggtactatgtgtttgatagaagatgggatcgttttcgattcgcactaaactccatggtagaaaaacacctgaattcacagatgtggaagaagatccctcctgcggcagatagccccctgccctcgccagcagcccacatcaccacccccgttccagcatccgttttgcagcctttcagcaaccccagtgctgtgtatcttccttcagctcccatcagctcgaggctcacctcttcttacataatgacatcagccatgctctcaaacgcagctttcgtgacatcgccggacccgagcgccctcatgtcccacaccacagctttccctcatgtggccgcaaccctcagcatcatggactcaaccttcaaggccccatccgccgtgtccccgataccagccgtcatcccttccccatcccacaagccatccaaaaccaaaaccagcaaatcctcaaaagtcaaagacctgtccacccgtagcgacgagtctccaagtaacaaaaaaaggaagccacagtcttcgacttcctcctcctcctcctcctcctcctcttccttgcagacatccctctcgtctccactgtcagggcctcacaaaaagaactgtgttttgaatgccagttctgctttgaactcctatcaggcggcccctccctataacagcctgtctgtgcacaactcaaacaatggggtgagcccactcagtgccaaactggagccctcaggacggacctcgctgcccggcggccccgcggacatagtgagacaggtgggcgcggtgggaggcagcagtgactcctgtcccctctctgtgccctcccttgcgctccacgcaggggacctctctctggcctcacacaatgctgtgtcttctctgcccctctcttttgacaaatcagaaggaaaaaagcgtaagaactcgagttctagtagcaaagcctgtaaaatcactaaaatgcctggtatgaatagcgttcacaaaaagaacccgcccagccttctcgcaccggtgcccgatcccgttaacagcacctcctctcggcaggttgggaaaaatagcagcctagctttgtcacaatccagtccttcaagtatatccagcccaggacacagccgacagaagaacacaaacagaacgggcaggataaggactcttccataa

SEQ ID NO: 388 - DNA, 1961 bp, Artificial
  cDNA Sequence
ccatcatctgcaaatagcataagcagcagcacatcttcaaatcatagcggccacactccagagcccccactcccaccggttggaggtgacctcgccagccgactgtccagtgatgaaggggagatggacggagccgacgaatccgagaagctagactgtcagttctccacgcaccaccccagacctctggcgttttgctcatttgggagtcgcctcatgggacgagggtactatgtgtttgatagaagatgggatcgttttcgattcgcactaaactccatggtagaaaaacacctgaattcacagatgtggaagcacagaaacccgagccacagggcatcaggtccctcccccctgttcaggacttgcctaaccaatctgctgtcactgagcaacattggggctgcctgggtgtcaactctggagagcgtagcaccccgctaccctctcaacctcgctgcccaaaccccaggccccggcgggcccgaacctggagggatggcagccgatgggggcgtggaagacattaggaagaaaaggaacggccaagactcttttttctttaacaagcatttaactctgcatcaggagccgccaacacagtattctctttcagccaggaagatccctcctgcggcagatagccccctgccctcgccagcagcccacatcaccacccccgttccagcatccgttttgcagcctttcagcaaccccagtgctgtgtatcttccttcagctcccatcagctcgaggctcacctcttcttacataatgacatcagccatgctctcaaacgcagctttcgtgacatcgccggacccgagcgccctcatgtcccacaccacagctttccctcatgtggccgcaaccctcagcatcatggactcaaccttcaaggccccatccgccgtgtccccgataccagccgtcatcccttccccatcccacaagccatccaaaaccaaaaccagcaaatcctcaaaagtcaaagacctgtccacccgtagcgacgagtctccaagtaacaaaaaaaggaagccacagtcttcgacttcctcctcctcctcctcctcctcctcttccttgcagacatccctctcgtctccactgtcagggcctcacaaaaagaactgtgttttgaatgccagttctgctttgaactcctatcaggcggcccctccctataacagcctgtctgtgcacaactcaaacaatggggtgagcccactcagtgccaaactggagccctcaggacggacctcgctgcccggcggccccgcggacatagtgagacaggtgggcgcggtgggaggcagcagtgactcctgtcccctctctgtgccctcccttgcgctccacgcaggggacctctctctggcctcacacaatgctgtgtcttctctgcccctctcttttgacaaatcagaaggaaaaaagcgtaagaactcgagttctagtagcaaagcctgtaaaatcactaaaatgcctggtatgaatagcgttcacaaaaagaacccgcccagccttctcgcaccggtgcccgatcccgttaacagcacctcctctcggcaggtaagggacctcctggcaccgccttcaccggctctggggggcagggggagctgggcagcgcccctgcttagccgggcggctccgacaggtaacacaagcttgattcctgttctcgttttccccgaaggcagttttcaccctctgctttgagagcactttactgaacaagtacttgataccacgctcactatgtgctagacactgttctcggcactttacggttattacctcactgagtcctcacgacaccccagtgcagtgagtgcagttatcactttacagatgagtaaactgaggcacagagagattctgagttccccactccacatcggtcagttttatcttttgaggttctgagaacattgtcattaaagagttctgttgct

SEQ ID NO: 389 - DNA, 1467 bp, Artificial
  cDNA Sequence
actcaatgtcggaacgttccgaagatgacgtcggagcgttctcgaatcccgtgtctctcggctgctgctgccgaaggaacagggaaaaagcaacaagaaggaagagcaatggcgacactggatcgcaaagtgcccagtccggaggcgtttctgggcaaaccctggtcctcctggatcgacgccgccaaattacactgctccgacaatgtagatttagaagaggctggaaaagagggtggaaaaagcagggaggttatgaggcttaataaagaagatatgcacttatttggccattacccagcacatgacgacttctatctcgtagtgtgcagtgcctgtaaccaggtcgtcaagccacaggttttccagtcgcactgcgggagaaagcaagacaacaggagaaatgaaggcatctccaggagtggaccagagagcagccaagccatagagaagcatcaggtgtgagaatggaaaacgcagaagagacgtacaacttctgaaagatctcagaggactggcattgtctggagacggcttcctggaagaggagactccagcagagccctgaagtgtggacaagcttccattcactgcaaattcgtgagcacactctggtgtcaggatctagtaaggaaatgggcttgagcagagcagggggtacctgtggggttcttctcttcattttcaccaccacaaagctggtctaagctgccatcaattcccacctggacaactgcaaaagccttccagctgttcctgcttccactcttgctcctctacaattcattctgcacgcagaagtcagaatcaaaatcaaagttcatcatgtcattctcttgacttgtggcttccctttgctcttaagctaaaagtaaaaatcattatcatggctacaaagtcttgtgtggtctgggccacatcctgtgccaggctccctttcattgtctatattccagtcaagctggccttcaaaatttcagcacattgggtctttctgccacaggcccttgcacatacatgcttttccctctgtacatgtgattttctttcatccccgctttccaaagctaactctgactcatccttcagactgcatcttaatgattacttccttctggaagactcccctaattttcacaactagatgagctctcccttatatgttgaaaacaagtatttcttgtgtgaacagaaatgtttaatgtctgccttcccaactcagccacaagctctgtgaggatggggactcagtctttgcatccctcagagcctaacatagtctcagttaatacgtgatagctggagcgtgacatttcattaggaacagtgaggctagttgagaaattatacctcaccagtatataggagagtaccattaggaattcttaatgggatgaaaacctgaattcatgtctagaccctgccacctgctggctgtgctgttttaaataaattgcagatcctctc

SEQ ID NO: 390 - DNA, 7139 bp, Artificial
  cDNA Sequence
cgccgccattttcccagagcgagaggcagtgacactgagcgggcgcagggggccgagtcggagaccgtgccggagttcgggagcggcaacagagtgggcatagacactccgagcagcctcgccgtcgtctctgcgttcctgttgactgcctggctgccccctcccctactcctcggttcctggtgaagaggctgcgcgctgctgtttggggagggggtgtgtggagccgggtcctgtgtccgcagtggctgctgtcggggggtcgcctgttcgcggaggtgcggagagactccttgggggtcgagcacataacggggttcgggtgtctcgtgtgtgaacatcacaggtctattctggataagcaggttttgtgaagacatttattctttcttggacctcagatttaccagacatctcatgggtttgtggatgcacttagatgtttgcaatgagcactgtggctggcatgccccagtgttttggataccaatgcataggactccatagtaatcgaatttaccagaggcgaacgtcatgagcatagtgatcccattgggggttgatacagcagagacgtcatacttggaaatggctgcaggttcagaaccagaatccgtagaagctagccctgtggtagttgagaaatccaacagttatccccaccagttatataccagcagctcacatcattcacacagttacattggtttgccctatgcggaccataattatggtgctcgtcctcctccgacacctccggcttcccctcctccatcagtccttattagcaaaaatgaagtaggcatatttaccactcctaattttgatgaaacttccagtgctactacaatcagcacatctgaggatggaagttatggtactgatgtaaccaggtgcatatgtggttttacacatgatgatggatacatgatctgttgtgacaaatgcagcgtttggcaacatattgactgcatggggattgataggcagcatattcctgatacatatctatgtgaacgttgtcagcctaggaatttggataaagagagggcagtgctactacaacgccggaaaagggaaaatatgtcagatggtgataccagtgcaactgagagtggtgatgaggttcctgtggaattatatactgcatttcagcatactccaacatcaattactttaactgcttcaagagtttccaaagttaatgataaaagaaggaaaaaaagcggggagaaagaacaacacatttcaaaatgtaaaaaggcatttcgtgaaggatctaggaagtcatcaagagttaagggttcagctccagagattgatccttcatctgatggttcaaattttggatgggagacaaagatcaaagcatggatggatcgatatgaagaagcaaataacaaccagtacagtgagggtgttcagagggaggcacaaagaatagctctgagattaggcaatggaaatgacaaaaaagagatgaataaatccgatttgaataccaacaatttgctcttcaaacctcctgtagagagccatatacaaaagaataagaaaattcttaaatctgcaaaagatttgcctcctgatgcacttatcattgaatacagagggaagtttatgctgagagaacagtttgaagcaaatgggtatttctttaaaagaccatacccttttgtgttattctactctaaatttcatgggctagaaatgtgtgttgatgcaaggacttttgggaatgaggctcgattcatcaggcggtcttgtacacccaatgcagaggtgaggcatgaaattcaagatggaaccatacatctttatatttattctatacacagtattccaaagggaactgaaattactattgcctttgattttgactatggaaattgtaagtacaaggtggactgtgcatgcctcaaagaaaacccagagtgccctgttctaaaacgtagttctgaatccatggaaaatatcaatagtggttatgagaccagacggaaaaaaggaaaaaaagacaaagatatttcaaaagaaaaagatacacaaaatcagaatattactttggattgtgaaggaacgaccaacaaaatgaagagcccagaaactaaacaaagaaagctttctccactgagactatcagtatcaaataatcaggaaccagattttattgatgatatagaagaaaaaactcctattagtaatgaagtagaaatggaatcagaggagcagattgcagaaaggaaaaggaagatgacaagagaagaaagaaaaatggaagcaattttgcaagcttttgccagacttgaaaagagagagaaaagaagagaacaagctttggaaaggatcagcacagccaaaactgaagttaaaactgaatgtaaagatacacagattgtcagtgatgctgaagttattcaggaacaagcaaaagaagaaaatgctagcaagccaacccctgccaaagtaaatagaactaaacagagaaaaagtttttctcggagtaggactcacattggacagcagcgtcggagacacagaactgtcagcatgtgttcagatatccagccatcttctcctgatatagaagttacttcacaacaaaatgatattgaaaatactgtacttacaatagaaccagaaactgaaactgcactagcagaaataattactgaaactgaagttccagcacttaataaatgtcctaccaagtaccccaaaacaaagaagcacttggttaatgaatggttaagtgagaagaatgagaagacaggaaaaccttcagatggcctttcagaaaggcctctacgcataactacagatcctgaagtgttagctacacaactcaattctttaccaggtctcacttacagcccccatgtatactccactcctaagcattatattagatttacttcaccattcctttcagaaaaaaggagaagaaaagaacctactgaaaacatttctggttcatgcaagaagcgatggttgaaacaagctctggaagaagaaaattcagcaattttacatagatttaattcaccctgtcaagaaagatccagaagtcctgcagtcaatggtgaaaataaaagtccactactattaaatgacagctgttcccttccagatttaactacaccactaaaaaaacgaagattttatcagttgctagattcggtttactcagaaacctccacacctactccttccccgtatgctacaccaactcacaccgatattactcctatggacccatcttttgccacgcctccacggataaaatcagatgatgaaacttgtagaaatggttataaacccatatattcaccagttaccccagtaactcctggtacaccaggaaataccatgcactttgagaatatttcttccccagaaagttctccagaaataaagagacgcacttatagtcaagagggatatgacagatcttcaaccatgttaacattggggccttttagaaattctaatttaactgaactgggtctgcaagaaataaagactattggttatacgagccctaggagtaggactgaagtcaacaggcagtgtcctggagaaaaggaacctgtgtcagaccttcagctaggactcgatgcagttgagccaactgccctacataaaaccctggaaacgcctgcacatgacagggctgagcccaacagccaactggactcgactcactctggacggggcacaatgtattcttcctgggtaaagagccctgacagaacaggagttaacttctcagtgaactccaacttgagggacctgacaccctcgcatcagttggaggttggaggaggcttccgaataagtgagtcaaagtgcctgatgcaggatgatactagaggcatgtttatggaaacaactgtgttttgtacttccgaagatgggcttgtatctggtttcggacggactgttaatgacaatttgatcgacgggaattgcacaccccagaatccaccacaaaagaaaaaggtttctctattagaataccgtaagagacaacgtgaagctaggaaaagtggctctaagacagagaactttccactcattagtgtatcaccccatgcaagtggaagcttgagcaacaatggtgatggctgtgccagcagtaatgacaatggggagcaggtggaccacactgctagcctacctttaccaacaccagctacagtttataatgccacttctgaagaaactagcaataactgccctgttaaggatgctactgctagtgagaagaatgaaccagaagttcaatggactgcctcaacttcagtggaacaagtcagagaaaggagttatcagagagctttacttctcagtgatcaccgaaaagataaagatagtgggggagaatcaccatgtgtctcatgttcaccgagtcatgttcagtcttcaccttcatctcattcaaatcacataccccagttgcaagctaagggcccagtcccttctttcagtgaacttatggaagaccctgatcctgaaaatccagaacccacaactacgaatgaatgtccatccccagatacttctcaaaatacttgtaaaagtcctccaaaaatgagcaagcctggttcacctggatctgtaattcctgctcaagcacacgggaaaatattcacaaaaccagatccccaatgggactccacagttagtgcatccgaagctgaaaatggtgttcacctaaaaacagagctccaacaaaaacagctatcaaataacaaccaagcactttcaaagaatcatcctcctcagacacacgttcgtaattcatctgagcaactttcacaaaagctgccttctgtgccaacaaagttgcactgtcctccatcacctcacctagaaaatcctccaaagtcatccacgcctcacacacctgtacagcatggttatctttcaccaaagcctccttcacagcagttaggatctccctacaggcctcatcattcacagtcacctcaagttggaacacctcagcgagagcctcaaagaaacttttatccagcagcacagaaccttccagccaatactcagcaggcaacttctggaacattatttacacagacaccctcaggacaatcttcagcaacatacagtcagtttaaccaacaaagtctgaacagcacggcaccaccccctccacctcctccacctccttcttcgtcttactatcaaaaccagcagccctctgcaaactttcagaattataatcagctcaaaggtagtctttctcaacaaactgtgtttacatcaggaccaaatcaagcacttcctggcaccacaagccagcaaacagttccaggacaccacgtgactccagggcattttttgccctctcagaaccctaccattcaccatcaaactgctgctgccgtagtcccccctcctcctccaccaccacctgctccaggaccgcaccttgtacaacagccgaattcccatcagcaacactctgtagcacatgtagtagggcctgttcatgcggtcacccctgggtcgcatattcattctcaaactgctggacaccacttacccccacccccaccccctcctggtcctgcccctcatcaccatccaccaccccatccatccacaggactccaaggtctacaagcacaacaccagcatgttgtaaattcagcacccccaccaccccctccgccgccaccttccagtgttttggcttctgggcatcataccacatcagctcaagccttacaccacccacctcatcaaggacctccactttttccttcgagtgctcatccaactgtaccaccgtatccctcacaagctacacatcataccactttgggaccgggaccccagcaccagccttctggaacagggccacattgtccattacctgtcacaggtcctcatctccagccccaaggaccaaacagtattccaacacctactgcttcagggttctgtcctcatcctggctctgtggccctgccacatggggttcaaggacctcagcaggcatctccagtgcctggacagattccaattcacagagcacaggtgccaccaacatttcaaaacaattaccatgggtcagggtggcattaaaatggactccaaaaacatttttttaaatgttctgtaagataaactgtatatttcatatgtacctgttaaggtactttttaaagcttgtacatgaacctttgtataaaaaacaccagtgctctttcgttgtatttttctcatttttgctttttaaaattcctttaaaaaatgtgctgttaagccagtattaggtatctttattttgtaagtgaacattccagctgtttttttctggcagatctgatgctgatttgatgctgtatgatcttttttttttttttagttaaattcatttagtgaatgttctattattttatacatacacattaagtactcagctaagtaatggcactatgaggattttttttttctttcctgtcagcagcagttctgtgaatgcatcttaggtataaaaatgcaatacagatttttatattttggtgtggacatggctcattttgttttaccagttatttgcaagcaaaatgtaatttaatgtatagatgatttctaatgtctcctgacaaactgtaaatactgcatttcttttgcgtatataattgcttacagcttttctcatttgatatatagcattgtacatatgacaagtcttttgcaaaactgtgtgatctttgtgaaagtagtacagtatatgacctttaatttcttttttattttaaatatactgtcacactgaagcactggttgggcattttaattcatgttaataaatcacaattatgtcagttttaccagattgtcctgtacaacttctaagatcgggatctgtgtgtttctacagaagttctagttttcaaatatagattgtaaggagccttcaattttctttagcgactactacctcagcaacaggaggcagcaaggggctgttcctgtggtggtttctgtttgcatttttgcaggagccataggaaactactgaaatgattgtgctgggtaaattaaggatctggcatcatacaaaatgaagccagaccactaatgcattacagtagttcttgaataca

SEQ ID NO: 391 - DNA, 5038 bp, Artificial
  cDNA Sequence
atgagcatagtgatcccattgggggttgatacagcagagacgtcatacttggaaatggctgcaggttcagaaccagaatccgtagaagctagccctgtggtagttgagaaatccaacagttatccccaccagttatataccagcagctcacatcattcacacagttacattggtttgccctatgcggaccataattatggtgctcgtcctcctccgacacctccggcttcccctcctccatcagtccttattagcaaaaatgaagtaggcatatttaccactcctaattttgatgaaacttccagtgctactacaatcagcacatctgaggatggaagttatggtactgatgtaaccaggtgcatatgtggttttacacatgatgatggatacatgatctgttgtgacaaatgcagcgtttggcaacatattgactgcatggggattgataggcagcatattcctgatacatatctatgtgaacgttgtcagcctaggaatttggataaagagagggcagtgctactacaacgccggaaaagggaaaatatgtcagatggtgataccagtgcaactgagagtggtgatgaggttcctgtggaattatatactgcatttcagcatactccaacatcaattactttaactgcttcaagagtttccaaagttaatgataaaagaaggaaaaaaagcggggagaaagaacaacacatttcaaaatgtaaaaaggcatttcgtgaaggatctaggaagtcatcaagagtttagggttcagctccagagattgatccttcatctgatggttcaaattttggatgggagacaaagatcaaagcatggatggatcgatatgaagaagcaaataacaaccagtacagtgagggtgttcagagggaggcacaaagaatagctctgagattaggcaatggaaatgacaaaaaagagatgaataaatccgatttgaataccaacaatttgctcttcaaacctcctgtagagagccatatacaaaagaataagaaaattcttaaatctgcaaaagatttgcctcctgatgcacttatcattgaatacagagggaagtttatgctgagagaacagtttgaagcaaatgggtatttctttaaaagaccatacccttttgtgttattctactctaaatttcatgggctagaaatgtgtgttgatgcaaggacttttgggaatgaggctcgattcatcaggcggtcttgtacacccaatgcagaggtgaggcatgaaattcaagatggaaccatacatctttatatttattctatacacagtattccaaagggaactgaaattactattgcctttgattttgactatggaaattgtaagtacaaggtggactgtgcatgcctcaaagaaaacccagagtgccctgttctaaaacgtagttctgaatccatggaaaatatcaatagtggttatgagaccagacggaaaaaaggaaaaaagacaagagaagaaagaaaaatggaagcaattttgcaagcttttgccagacttgaaaagagagagaaaagaagagaacaagctttggaaaggatcagcacagccaaaactgaagttaaaactgaatgtaaagatacacagattgtcagtgatgctgaagttattcaggaacaagcaaaagaagaaaatgctagcaagccaacccctgccaaagtaaatagaactaaacagagaaaaagtttttctcggagtaggactcacattggacagcagcgtcggagacacagaactgtcagcatgtgttcagatatccagccatcttctcctgatatagaagttacttcacaacaaaatgatattgaaaatactgtacttacaatagaaccagaaactgaaactgcactagcagaaataattactgaaactgaagttccagcacttaataaatgtcctaccaagtaccccaaaacaaagaagcacttggttaatgaatggttaagtgagaagaatgagaagacaggaaaaccttcagatggcctttcagaaaggcctctacgcataactacagatcctgaagtgttagctacacaactcaattctttaccaggtctcacttacagcccccatgtatactccactcctaagcattatattagatttacttcaccattcctttcagaaaaaaggagaagaaaagaacctactgaaaacatttctggttcatgcaagaagcgatggttgaaacaagctctggaagaagaaaattcagcaattttacatagatttaattcaccctgtcaagaaagatccagaagtcctgcagtcaatgaatatttcttccccagaaagttctccagaaataaagagacgcacttatagtcaagagggatatgacagatcttcaaccatgttaacattggggccttttagaaattctaatttaactgaactgggtctgcaagaaataaagactattggttatacgagccctaggagtaggactgaagtcaacaggcagtgtcctggagaaaaggaacctgtgtcagaccttcagctaggactcgatgcagttgagccaactgccctacataaaaccctggaaacgcctgcacatgacagggctgagcccaacagccaactggactcgactcactctggacggggcacaatgtattcttcctgggtaaagagccctgacagaacaggagttaacttctcagtgaactccaacttgagggacctgacaccctcgcatcagttggaggttggaggaggcttccgaataagtgagtcaaagtgcctgatgcaggatgatactagaggcatgtttatggaaacaactgtgttttgtacttccgaagatgggcttgtatctggtttcggacggactgttaatgacaatttgatcgacgggaattgcacaccccagaatccaccacaaaagaaaaaggtttctctattagaataccgtaagagacaacgtgaagctaggaaaagtggctctaagacagagaactttccactcattagtgtatcaccccatgcaagtggaagcttgagcaacaatggtgatggctgtgccagcagtaatgacaatggggagcaggtggaccacactgctagcctacctttaccaacaccagctacagtttataatgccacttctgaagaaactagcaataactgccctgttaaggatgctactgctagtgagaagaatgaaccagaagttcaatggactgcctcaacttcagtggaacaagtcagagaaaggagttatcagagagctttacttctcagtgatcaccgaaaagataaagatagtgggggagaatcaccatgtgtctcatgttcaccgagtcatgttcagtcttcaccttcatctcattcaaatcacataccccagttgcaagctaagggcccagtcccttctttcagtgaacttatggaagaccctgatcctgaaaatccagaacccacaactacgaatgaatgtccatccccagatacttctcaaaatacttgtaaaagtcctccaaaaatgagcaagcctggttcacctggatctgtaattcctgctcaagcacacgggaaaatattcacaaaaccagatccccaatgggactccacagttagtgcatccgaagctgaaaatggtgttcacctaaaaacagagctccaacaaaaacagctatcaaataacaaccaagcactttcaaagaatcatcctcctcagacacacgttcgtaattcatctgagcaactttcacaaaagctgccttctgtgccaacaaagttgcactgtcctccatcacctcacctagaaaatcctccaaagtcatccacgcctcacacacctgtacagcatggttatctttcaccaaagcctccttcacagcagttaggatctccctacaggcctcatcattcacagtcacctcaagttggaacacctcagcgagagcctcaaagaaacttttatccagcagcacagaaccttccagccaatactcagcaggcaacttctggaacattatttacacagacaccctcaggacaatcttcagcaacatacagtcagtttaaccaacaaagtctgaacagcacggcaccaccccctccacctcctccacctccttcttcgtcttactatcaaaaccagcagccctctgcaaactttcagaattataatcagctcaaaggtagtctttctcaacaaactgtgtttacatcaggaccaaatcaagcacttcctggcaccacaagccagcaaacagttccaggacaccacgtgactccagggcattttttgccctctcagaaccctaccattcaccatcaaactgctgctgccgtagtcccccctcctcctccaccaccacctgctccaggaccgcaccttgtacaacagccgaattcccatcagcaacactctgtagcacatgtagtagggcctgttcatgcggtcacccctgggtcgcatattcattctcaaactgctggacaccacttacccccacccccaccccctcctggtcctgcccctcatcaccatccaccaccccatccatccacaggactccaaggtctacaagcacaacaccagcatgttgtaaattcagcacccccaccaccccctccgccgccaccttccagtgttttggcttctgggcatcataccacatcagctcaagccttacaccacccacctcatcaaggacctccactttttccttcgagtgctcatccaactgtaccaccgtatccctcacaagctacacatcataccactttgggaccgggaccccagcaccagccttctggaacagggccacattgtccattacctgtcacaggtcctcatctccagccccaaggaccaaacagtattccaacacctactgcttcagggttctgtcctcatcctggctctgtggccctgccacatggggttcaaggacctcagcaggcatctccagtgcctggacagattccaattcacagagcacaggtgccaccaacatttcaaaacaattaccatgggtcagggtggcattaa

SEQ ID NO: 392 - DNA, 1980 bp, Artificial
  cDNA Sequence
aagaggctgcgcgctgctgtttggggagggggtgtgtggagccgggtcctgtgtccgcagtggctgctgtcggggggtcgcctgttcgcggaggtgcggagagactccttgggggtcgagcactgtggctggcatgccccagtgttttggataccaatgcataggactccatagtaatcgaatttaccagaggcgaacgtcatgagcatagtgatcccattgggggttgatacagcagagacgtcatacttggaaatggctgcaggttcagaaccagaatccgtagaagctagccctgtggtagttgagaaatccaacagttatccccaccagttatataccagcagctcacatcattcacacagttacattggtttgccctatgcggaccataattatggtgctcgtcctcctccgacacctccggcttcccctcctccatcagtccttattagcaaaaatgaagtaggcatatttaccactcctaattttgatgaaacttccagtgctactacaatcagcacatctgaggatggaagttatggtactgatgtaaccaggtgcatatgtggttttacacatgatgatggatacatgatctgttgtgacaaatgcagcgtttggcaacatattgactgcatggggattgataggcagcatattcctgatacatatctatgtgaacgttgtcagcctaggaatttggataaagagagggcagtgctactacaacgccggaaaagggaaaatatgtcagatggtgataccagtgcaactgagagtggtgatgaggttcctgtggaattatatactgcatttcagcatactccaacatcaattactttaactgcttcaagagtttccaaagttaatgataaaagaaggaaaaaaagcggggagaaagaacaacacatttcaaaatgtaaaaagggttcagctccagagattgatccttcatctgatggttcaaattttggatgggagacaaagatcaaagcatggatggatcgatatgaagaagcaaataacaaccagtacagtgagggtgttcagagggaggcacaaagaatagctctgagattaggcaatggaaatgacaaaaaagagatgaataaatccgatttgaataccaacaatttgctcttcaaacctcctgtagagagccatatacaaaagaataagaaaattcttaaatctgcaaaagatttgcctcctgatgcacttatcattgaatacagagggaagtttatgctgagagaacagtttgaagcaaatgggtatttctttaaaagaccatacccttttgtgttattctactctaaatttcatgggctagaaatgtgtgttgatgcaaggacttttgggaatgaggctcgattcatcaggcggtcttgtacacccaatgcagaggtgaggcatgaaattcaagatggaaccatacatctttatatttattctatacacagtattccaaagggaactgaaattactattgcctttgattttgactatggaaattgtaagtacaaggtggactgtgcatgcctcaaagaaaacccagagtgccctgttctaaaacgtagttctgaatccatggaaaatatcaatagtggttatgagaccagacggaaaaaaggaaaaaaagacaaagatatttcaaaagaaaaagatacacaaaatcagaatattactttggattgtgaaggaacgaccaacaaaatgaagagcccagaaactaaacaaagaaagctttctccactgagactatcagtatcaaataatcaggaaccagattttattgatgatatagaagaaaaaactcctattagtaatgaagtagaaatggaatcagaggagcagattgcagaaaggaaaaggaagatgaactggacagttgatggatgtggttcctggttctggtttagagctgaagcatctgtcaaggctctgggtcttactcttaatgttctctttggatag

SEQ ID NO: 393 - DNA, 1591 bp, Artificial
  cDNA Sequence
tattcaggaccataattatggtgctcgtcctcctccgacacctccggcttcccctcctccatcagtccttattagcaaaaatgaagtaggcatatttaccactcctaattttgatgaaacttccagtgctactacaatcagcacatctgaggatggaagttatggtactgatgtaaccaggtgcatatgtggttttacacatgatgatggatacatgatctgttgtgacaaatgcagcgtttggcaacatattgactgcatggggattgataggcagcatattcctgatacatatctatgtgaacgttgtcagcctaggaatttggataaagagagggcagtgctactacaacgccggaaaagggaaaatatgtcagatggtgataccagtgcaactgagagtggtgatgaggttcctgtggaattatatactgcatttcagcatactccaacatcaattactttaactgcttcaagagtttccaaagttaatgataaaagaaggaaaaaaagcggggagaaagaacaacacatttcaaaatgtaaaaaggcatttcgtgaaggatctaggaagtcatcaagagttaagggttcagctccagagattgatccttcatctgatggttcaaattttggatgggagacaaagatcaaagcatggatggatcgatatgaagaagcaaataacaaccagtacagtgagggtgttcagagggaggcacaaagaatagctctgagattaggcaatggaaatgacaaaaaagagatgaataaatccgatttgaataccaacaatttgctcttcaaacctcctgtagagagccatatacaaaagaataagaaaattcttaaatctgcaaaagatttgcctcctgatgcacttatcattgaatacagagggaagtttatgctgagagaacagtttgaagcaaatgggtatttctttaaaagaccatacccttttgtgttattctactctaaatttcatgggctagaaatgtgtgttgatgcaaggacttttgggaatgaggctcgattcatcaggcggtcttgtacacccaatgcagaggtgaggcatgaaattcaagatggaaccatacatctttatatttattctatacacagtattccaaagggaactgaaattactattgcctttgattttgactatggaaattgtaagtacaaggtggactgtgcatgcctcaaagaaaacccagagtgccctgttctaaaacgtagttctgaatccatggaaaatatcaatagtggttatgagaccagacggaaaaaaggaaaaacaaagatatttcaaaagaaaaagatacacaaaatcagaatattactttggattgtgaaggaacgaccaacaaaatgaagagcccagaaactaaacaaagaaagctttctccactgagactatcagtatcaaataatcaggaaccagattttattgatgatatagaagaaaaaactcctattagtaatgaagtagaaatggaatcagaggagcagattgcagaaaggaaaaggaagatgacaagagaagaaagaaaaatggaagcaattttgcaagcttttgccagacttg

SEQ ID NO: 394 - DNA, 720 bp, Artificial
  cDNA Sequence
catcctcctcagacacacgttcgtaattcatctgagcaactttcacaaaagctgccttctgtgccaacaaagttgcactgtcctccatcacctcacctagaaaatcctccaaagtcatccacgcctcacacacctgtacagcatggttatctttcaccaaagcctccttcacagcagttaggatctccctacaggcctcatcattcacagtcacctcaagttggaacacctcagcgagagcctcaaagaaacttttatccagcagcacagaaccttccagtgttttggcttctgggcatcataccacatcagctcaagccttacaccacccacctcatcaaggacctccactttttccttcgagtgctcatccaactgtaccaccgtatccctcacaagctacacatcataccactttgggaccgggaccccagcaccagccttctggaacagggccacattgtccattacctgtcacaggtcctcatctccagccccaaggaccaaacagtattccaacacctactgcttcagggttctgtcctcatcctggctctgtggccctgccacatggggttcaaggacctcagcaggcatctccagtgcctggacagattccaattcacagagcacaggtgccaccaacatttcaaaacaattaccatgggtcagggtggcattaaaatggactccaaaaacatttttttaaatgttctgtaa

SEQ ID NO: 395 - DNA, 6529 bp, Artificial
  cDNA Sequence
aagaggctgcgcgctgctgtttggggagggggtgtgtggagccgggtcctgtgtccgcagtggctgctgtcggggggtcgcctgttcgcggaggtgcggagagactccttgggggtcgagcactgtggctggcatgccccagtgttttggataccaatgcataggactccatagtaatcgaatttaccagaggcgaacgtcatgagcatagtgatcccattgggggttgatacagcagagacgtcatacttggaaatggctgcaggttcagaaccagaatccgtagaagctagccctgtggtagttgagaaatccaacagttatccccaccagttatataccagcagctcacatcattcacacagttacattggtttgccctatgcggaccataattatggtgctcgtcctcctccgacacctccggcttcccctcctccatcagtccttattagcaaaaatgaagtaggcatatttaccactcctaattttgatgaaacttccagtgctactacaatcagcacatctgaggatggaagttatggtactgatgtaaccaggtgcatatgtggttttacacatgatgatggatacatgatctgttgtgacaaatgcagcgtttggcaacatattgactgcatggggattgataggcagcatattcctgatacatatctatgtgaacgttgtcagcctaggaatttggataaagagagggcagtgctactacaacgccggaaaagggaaaatatgtcagatggtgataccagtgcaactgagagtggtgatgaggttcctgtggaattatatactgcatttcagcatactccaacatcaattactttaactgcttcaagagtttccaaagttaatgataaaagaaggaaaaaaagcggggagaaagaacaacacatttcaaaatgtaaaaaggcatttcgtgaaggatctaggaagtcatcaagagttaagggttcagctccagagattgatccttcatctgatggttcaaattttggatgggagacaaagatcaaagcatggatggatcgatatgaagaagcaaataacaaccagtacagtgagggtgttcagagggaggcacaaagaatagctctgagattaggcaatggaaatgacaaaaaagagatgaataaatccgatttgaataccaacaatttgctcttcaaacctcctgtagagagccatatacaaaagaataagaaaattcttaaatctgcaaaagatttgcctcctgatgcacttatcattgaatacagagggaagtttatgctgagagaacagtttgaagcaaatgggtatttctttaaaagaccatacccttttgtgttattctactctaaatttcatgggctagaaatgtgtgttgatgcaaggacttttgggaatgaggctcgattcatcaggcggtcttgtacacccaatgcagaggtgaggcatgaaattcaagatggaaccatacatctttatatttattctatacacagtattccaaagggaactgaaattactattgcctttgattttgactatggaaattgtaagtacaaggtggactgtgcatgcctcaaagaaaacccagagtgccctgttctaaaacgtagttctgaatccatggaaaatatcaatagtggttatgagaccagacggaaaaaaggaaaaaaagacaaagatatttcaaaagaaaaagatacacaaaatcagaatattactttggattgtgaaggaacgaccaacaaaatgaagagcccagaaactaaacaaagaaagctttctccactgagactatcagtatcaaataatcaggaaccagattttattgatgatatagaagaaaaaactcctattagtaatgaagtagaaatggaatcagaggagcagattgcagaaaggaaaaggaagatgacaagagaagaaagaaaaatggaagcaattttgcaagcttttgccagacttgaaaagagagagaaaagaagagaacaagctttggaaaggatcagcacagccaaaactgaagttaaaactgaatgtaaagatacacagattgtcagtgatgctgaagttattcaggaacaagcaaaagaagaaaatgctagcaagccaacccctgccaaagtaaatagaactaaacagagaaaaagtttttctcggagtaggactcacattggacagcagcgtcggagacacagaactgtcagcatgtgttcagatatccagccatcttctcctgatatagaagttacttcacaacaaaatgatattgaaaatactgtacttacaatagaaccagaaactgaaactgcactagcagaaataattactgaaactgaagttccagcacttaataaatgtcctaccaagtaccccaaaacaaagaagcacttggttaatgaatggttaagtgagaagaatgagaagacaggaaaaccttcagatggcctttcagaaaggcctctacgcataactacagatcctgaagtgttagctacacaactcaattctttaccaggtctcacttacagcccccatgtatactccactcctaagcattatattagatttacttcaccattcctttcagaaaaaaggagaagaaaagaacctactgaaaacatttctggttcatgcaagaagcgatggttgaaacaagctctggaagaagaaaattcagcaattttacatagatttaattcaccctgtcaagaaagatccagaagtcctgcagtcaatggtgaaaataaaagtccactactattaaatgacagctgttcccttccagatttaactacaccactaaaaaaacgaagattttatcagttgctagattcggtttactcagaaacctccacacctactccttccccgtatgctacaccaactcacaccgatattactcctatggacccatcttttgccacgcctccacggataaaatcagatgatgaaacttgtagaaatggttataaacccatatattcaccagttaccccagtaactcctggtacaccaggaaataccatgcactttgagaatatttcttccccagaaagttctccagaaataaagagacgcacttatagtcaagagggatatgacagatcttcaaccatgttaacattggggccttttagaaattctaatttaactgaactgggtctgcaagaaataaagactattggttatacgagccctaggagtaggactgaagtcaacaggcagtgtcctggagaaaaggaacctgtgtcagaccttcagctaggactcgatgcagttgagccaactgccctacataaaaccctggaaacgcctgcacatgacagggctgagcccaacagccaactggactcgactcactctggacggggcacaatgtattcttcctgggtaaagagccctgacagaacaggagttaacttctcagtgaactccaacttgagggacctgacaccctcgcatcagttggaggttggaggaggcttccgaataagtgagtcaaagtgcctgatgcaggatgatactagaggcatgtttatggaaacaactgtgttttgtacttccgaagatgggcttgtatctggtttcggacggactgttaatgacaatttgatcgacgggaattgcacaccccagaatccaccacaaaagaaaaaggtttctctattagaataccgtaagagacaacgtgaagctaggaaaagtggctctaagacagagaactttccactcattagtgtatcaccccatgcaagtggaagcttgagcaacaatggtgatggctgtgccagcagtaatgacaatggggagcaggtggaccacactgctagcctacctttaccaacaccagctacagtttataatgccacttctgaagaaactagcaataactgccctgttaaggatgctactgctagtgagaagaatgaaccagaagttcaatggactgcctcaacttcagtggaacaagtcagagaaaggagttatcagagagctttacttctcagtgatcaccgaaaagataaagatagtgggggagaatcaccatgtgtctcatgttcaccgagtcatgttcagtcttcaccttcatctcattcaaatcacataccccagttgcaagctaagggcccagtcccttctttcagtgaacttatggaagaccctgatcctgaaaatccagaacccacaactacgaatgaatgtccatccccagatacttctcaaaatacttgtaaaagtcctccaaaaatgagcaagcctggttcacctggatctgtaattcctgctcaagcacacgggaaaatattcacaaaaccagatccccaatgggactccacagttagtgcatccgaagctgaaaatggtgttcacctaaaaacagagctccaacaaaaacagctatcaaataacaaccaagcactttcaaagaatcatcctcctcagacacacgttcgtaattcatctgagcaactttcacaaaagctgccttctgtgccaacaaagttgcactgtcctccatcacctcacctagaaaatcctccaaagtcatccacgcctcacacacctgtacagcatggttatctttcaccaaagcctccttcacagcagttaggatctccctacaggcctcatcattcacagtcacctcaagttggaacacctcagcgagagcctcaaagaaacttttatccagcagcacagaaccttccagccaatactcagcaggcaacttctggaacattatttacacagacaccctcaggacaatcttcagcaacatacagtcagtttaaccaacaaagtctgaacagcacggcaccaccccctccacctcctccacctccttcttcgtcttactatcaaaaccagcagccctctgcaaactttcagaattataatcagctcaaaggtagtctttctcaacaaactgtgtttacatcaggaccaaatcaagcacttcctggcaccacaagccagcaaacagttccaggacaccacgtgactccagggcattttttgccctctcagaaccctaccattcaccatcaaactgctgctgccgtagtcccccctcctcctccaccaccacctgctccaggaccgcaccttgtacaacagccgaattcccatcagcaacactctgtagcacatgtagtagggcctgttcatgcggtcacccctgggtcgcatattcattctcaaactgctggacaccacttacccccacccccaccccctcctggtcctgcccctcatcaccatccaccaccccatccatccacaggactccaaggtctacaagcacaacaccagcatgttgtaaattcagcacccccaccaccccctccgccgccaccttccagtgttttggcttctgggcatcataccacatcagctcaagccttacaccacccacctcatcaaggacctccactttttccttcgagtgctcatccaactgtaccaccgtatccctcacaagctacacatcataccactttgggaccgggaccccagcaccagccttctggaacagggccacattgtccattacctgtcacaggtcctcatctccagccccaaggaccaaacagtattccaacacctactgcttcagggttctgtcctcatcctggctctgtggccctgccacatggggttcaaggacctcagcaggcatctccagtgcctggacagattccaattcacagagcacaggtgccaccaacatttcaaaacaattaccatgggtcagggtggcattaaaatggactccaaaaacatttttttaaatgttctgtaagataaactgtatatttcatatgtacctgttaaggtactttttaaagcttgtacatgaacctttgtataaaaaacaccagtgctctttcgttgtatttttctcatttttgctttttaaaattcctttaaaaaatgtgctgttaagccagtattaggtatctttattttgtaagtgaacattccagctgtttttttctggcagatctgatgctgatttgatgctgtatgatcttttttttttttttagttaaattcatttagtgaatgttctattattttatacatacacattaagtactcagctaagtaatggcactatgaggattttttttttctttcctgtcagcagcagttctgtgaatgcatcttaggtataaaaatgcaatacagatttttatattttggtgtggacatggctcattttgttttaccagttatttgcaagcaaaatgtaatttaatgtatagatgatttctaatgtctcctgacaaactgtaaatactgcatttcttttgcgtatataattgcttacagcttttctcatttgatatatagcattgtacatatgacaagtcttttgcaaaactgtgtgatctttgtgaaagtagtacagtatatgacctttaatttcttttttattttaaatatactgtcacactgaagcactggttgggcattttaattcatgttaataaatcacaattatgtcagtttt

SEQ ID NO: 396 - DNA, 1990 bp, Artificial
  cDNA Sequence
gcgggcgcagggggccgagtcggagaccgtgccggagttcgggagcggcaacagagtgggcatagacactccgagcagcctcgccgtcgtctctgcgttcctgttgactgcctggctgccccctcccctactcctcggttcctggtgaagaggctgcgcgctgctgtttggggagggggtgtgtggagccgggtcctgtgtccgcagtggctgctgtcggggggtcgcctgttcgcggaggtgcggagagactccttgggggtcgagcacataacggggttcgggtgtctcgtgtgtgaacatcacaggtctattctggataagcaggttttgtgaagacatttattctttcttggacctcagatttaccagacatctcatgggtttgtggatgcacttagatgtttgcaatgagcactgtggctggcatgccccagtgttttggataccaatgcataggactccatagtaatcgaatttaccagaggcgaacgtcatgagcatagtgatcccattgggggttgatacagcagagacgtcatacttggaaatggctgcaggttcagaaccagaatccgtagaagctagccctgtggtagttgagaaatccaacagttatccccaccagttatataccagcagctcacatcattcacacagttacattggtttgccctatgcggaccataattatggtgctcgtcctcctccgacacctccggcttcccctcctccatcagtccttattagcaaaaatgaagtaggcatatttaccactcctaattttgatgaaacttccagtgctactacaatcagcacatctgaggatggaagttatggtactgatgtaaccaggtgcatatgtggttttacacatgatgatggatacatgatctgttgtgacaaatgcagcgtttggcaacatattgactgcatggggattgataggcagcatattcctgatacatatctatgtgaacgttgtcagcctaggaatttggataaagagagggcagtgctactacaacgccggaaaagggaaaatatgtcagatggtgataccagtgcaactgagagtggtgatgaggttcctgtggaattatatactgcatttcagcatactccaacatcaattactttaactgcttcaagagtttccaaagttaatgataaaagaaggaaaaaaagcggggagaaagaacaacacatttcaaaatgtaaaaaggcatttcgtgaaggatctaggaagtcatcaagagtttagggttcagctccagagattgatccttcatctgatggttcaaattttggatgggagacaaagatcaaagcatggatggatcgatatgaagaagcaaataacaaccagtacagtgagggtgttcagagggaggcacaaagaatagctctgagattaggcaatggaaatgacaaaaaagagatgaataaatccgatttgaataccaacaatttgctcttcaaacctcctgtagagagccatatacaaaagaataagaaaattcttaaatctgcaaaagatttgcctcctgatgcacttatcattgaatacagagggaagtttatgctgagagaacagtttgaagcaaatgggtatttctttaaaagaccatacccttttgtgttattctactctaaatttcatgggctagaaatgtgtgttgatgcaaggacttttgggaatgaggctcgattcatcaggcggtcttgtacacccaatgcagaggtgaggcatgaaattcaagatggaaccatacatctttatatttattctatacacagtattccaaagggaactgaaattactattgcctttgattttgactatggaaattgtctcactctgtcacccaggctggaatgcagtggcacaatcttggctcactgcaacttctgcctcctgggttcaggcaattctcctgccttagcctatcgcgtagccaggattacaggtgcctgccaccatggccag

SEQ ID NO: 397 - DNA, 6289 bp, Artificial
  cDNA Sequence
aagaggctgcgcgctgctgtttggggagggggtgtgtggagccgggtcctgtgtccgcagtggctgctgtcggggggtcgcctgttcgcggaggtgcggagagactccttgggggtcgagcactgtggctggcatgccccagtgttttggataccaatgcataggactccatagtaatcgaatttaccagaggcgaacgtcatgagcatagtgatcccattgggggttgatacagcagagacgtcatacttggaaatggctgcaggttcagaaccagaatccgtagaagctagccctgtggtagttgagaaatccaacagttatccccaccagttatataccagcagctcacatcattcacacagttacattggtttgccctatgcggaccataattatggtgctcgtcctcctccgacacctccggcttcccctcctccatcagtccttattagcaaaaatgaagtaggcatatttaccactcctaattttgatgaaacttccagtgctactacaatcagcacatctgaggatggaagttatggtactgatgtaaccaggtgcatatgtggttttacacatgatgatggatacatgatctgttgtgacaaatgcagcgtttggcaacatattgactgcatggggattgataggcagcatattcctgatacatatctatgtgaacgttgtcagcctaggaatttggataaagagagggcagtgctactacaacgccggaaaagggaaaatatgtcagatggtgataccagtgcaactgagagtggtgatgaggttcctgtggaattatatactgcatttcagcatactccaacatcaattactttaactgcttcaagagtttccaaagttaatgataaaagaaggaaaaaaagcggggagaaagaacaacacatttcaaaatgtaaaaaggcatttcgtgaaggatctaggaagtcatcaagagttaagggttcagctccagagattgatccttcatctgatggttcaaattttggatgggagacaaagatcaaagcatggatggatcgatatgaagaagcaaataacaaccagtacagtgagggtgttcagagggaggcacaaagaatagctctgagattaggcaatggaaatgacaaaaaagagatgaataaatccgatttgaataccaacaatttgctcttcaaacctcctgtagagagccatatacaaaagaataagaaaattcttaaatctgcaaaagatttgcctcctgatgcacttatcattgaatacagagggaagtttatgctgagagaacagtttgaagcaaatgggtatttctttaaaagaccatacccttttgtgttattctactctaaatttcatgggctagaaatgtgtgttgatgcaaggacttttgggaatgaggctcgattcatcaggcggtcttgtacacccaatgcagaggtgaggcatgaaattcaagatggaaccatacatctttatatttattctatacacagtattccaaagggaactgaaattactattgcctttgattttgactatggaaattgtaagtacaaggtggactgtgcatgcctcaaagaaaacccagagtgccctgttctaaaacgtagttctgaatccatggaaaatatcaatagtggttatgagaccagacggaaaaaaggaaaaaaaacaagagaagaaagaaaaatggaagcaattttgcaagcttttgccagacttgaaaagagagagaaaagaagagaacaagctttggaaaggatcagcacagccaaaactgaagttaaaactgaatgtaaagatacacagattgtcagtgatgctgaagttattcaggaacaagcaaaagaagaaaatgctagcaagccaacccctgccaaagtaaatagaactaaacagagaaaaagtttttctcggagtaggactcacattggacagcagcgtcggagacacagaactgtcagcatgtgttcagatatccagccatcttctcctgatatagaagttacttcacaacaaaatgatattgaaaatactgtacttacaatagaaccagaaactgaaactgcactagcagaaataattactgaaactgaagttccagcacttaataaatgtcctaccaagtaccccaaaacaaagaagcacttggttaatgaatggttaagtgagaagaatgagaagacaggaaaaccttcagatggcctttcagaaaggcctctacgcataactacagatcctgaagtgttagctacacaactcaattctttaccaggtctcacttacagcccccatgtatactccactcctaagcattatattagatttacttcaccattcctttcagaaaaaaggagaagaaaagaacctactgaaaacatttctggttcatgcaagaagcgatggttgaaacaagctctggaagaagaaaattcagcaattttacatagatttaattcaccctgtcaagaaagatccagaagtcctgcagtcaatggtgaaaataaaagtccactactattaaatgacagctgttcccttccagatttaactacaccactaaaaaaacgaagattttatcagttgctagattcggtttactcagaaacctccacacctactccttccccgtatgctacaccaactcacaccgatattactcctatggacccatcttttgccacgcctccacggataaaatcagatgatgaaacttgtagaaatggttataaacccatatattcaccagttaccccagtaactcctggtacaccaggaaataccatgcactttgagaatatttcttccccagaaagttctccagaaataaagagacgcacttatagtcaagagggatatgacagatcttcaaccatgttaacattggggccttttagaaattctaatttaactgaactgggtctgcaagaaataaagactattggttatacgagccctaggagtaggactgaagtcaacaggcagtgtcctggagaaaaggaacctgtgtcagaccttcagctaggactcgatgcagttgagccaactgccctacataaaaccctggaaacgcctgcacatgacagggctgagcccaacagccaactggactcgactcactctggacggggcacaatgtattcttcctgggtaaagagccctgacagaacaggagttaacttctcagtgaactccaacttgagggacctgacaccctcgcatcagttggaggttggaggaggcttccgaataagtgagtcaaagtgcctgatgcaggatgatactagaggcatgtttatggaaacaactgtgttttgtacttccgaagatgggcttgtatctggtttcggacggactgttaatgacaatttgatcgacgggaattgcacaccccagaatccaccacaaaagaaaaaggtttctctattagaataccgtaagagacaacgtgaagctaggaaaagtggctctaagacagagaactttccactcattagtgtatcaccccatgcaagtggaagcttgagcaacaatggtgatggctgtgccagcagtaatgacaatggggagcaggtggaccacactgctagcctacctttaccaacaccagctacagtttataatgccacttctgaagaaactagcaataactgccctgttaaggatgctactgctagtgagaagaatgaaccagaagttcaatggactgcctcaacttcagtggaacaagtcagagaaaggagttatcagagagctttacttctcagtgatcaccgaaaagataaagatagtgggggagaatcaccatgtgtctcatgttcaccgagtcatgttcagtcttcaccttcatctcattcaaatcacataccccagttgcaagctaagggcccagtcccttctttcagtgaacttatggaagaccctgatcctgaaaatccagaacccacaactacgaatgaatgtccatccccagatacttctcaaaatacttgtaaaagtcctccaaaaatgagcaagcctggttcacctggatctgtaattcctgctcaagcacacgggaaaatattcacaaaaccagatccccaatgggactccacagttagtgcatccgaagctgaaaatggtgttcacctaaaaacagagctccaacaaaaacagctatcaaataacaaccaagcactttcaaagaatcatcctcctcagacacacgttcgtaattcatctgagcaactttcacaaaagctgccttctgtgccaacaaagttgcactgtcctccatcacctcacctagaaaatcctccaaagtcatccacgcctcacacacctgtacagcatggttatctttcaccaaagcctccttcacagcagttaggatctccctacaggcctcatcattcacagtcacctcaagttggaacacctcagcgagagcctcaaagaaacttttatccagcagcacagaaccttccagccaatactcagcaggcaacttctggaacattatttacacagacaccctcaggacaatcttcagcaacatacagtcagtttaaccaacaaagtctgaacagcacggcaccaccccctccacctcctccacctccttcttcgtcttactatcaaaaccagcagccctctgcaaactttcagaattataatcagctcaaaggtagtctttctcaacaaactgtgtttacatcaggaccaaatcaagcacttcctggcaccacaagccagcaaacagttccaggacaccacgtgactccagggcattttttgccctctcagaaccctaccattcaccatcaaactgctgctgccgtagtcccccctcctcctccaccaccacctgctccaggaccgcaccttgtacaacagccgaattcccatcagcaacactctgtagcacatgtagtagggcctgttcatgcggtcacccctgggtcgcatattcattctcaaactgctggacaccacttacccccacccccaccccctcctggtcctgcccctcatcaccatccaccaccccatccatccacaggactccaaggtctacaagcacaacaccagcatgttgtaaattcagcacccccaccaccccctccgccgccaccttccagtgttttggcttctgggcatcataccacatcagctcaagccttacaccacccacctcatcaaggacctccactttttccttcgagtgctcatccaactgtaccaccgtatccctcacaagctacacatcataccactttgggaccgggaccccagcaccagccttctggaacagggccacattgtccattacctgtcacaggtcctcatctccagccccaaggaccaaacagtattccaacacctactgcttcagggttctgtcctcatcctggctctgtggccctgccacatggggttcaaggacctcagcaggcatctccagtgcctggacagattccaattcacagagcacaggtgccaccaacatttcaaaacaattaccatgggtcagggtggcattaaaatggactccaaaaacatttttttaaatgttctgtaagataaactgtatatttcatatgtacctgttaaggtactttttaaagcttgtacatgaacctttgtataaaaaacaccagtgctctttcgttgtatttttctcatttttgctttttaaaattcctttaaaaaatgtgctgttaagccagtattaggtatctttattttgtaagtgaacattccagctgtttttttctggcagatctgatgctgatttgatgctgtatgatcttttttttttttttagttaaattcatttagtgaatgttctattattttatacatacacattaagtactcagctaagtaatggcactatgaggattttttttttctttcctgtcagcagcagttctgtgaatgcatcttaggtataaaaatgcaatacagatttttatattttggtgtggacatggctcattttgttttaccagttatttgcaagcaaaatgtaatttaatgtatagatgatttctaatgtctcctgacaaactgtaaatactgcatttcttttgcgtatataattgcttacagcttttctcatttgatatatagcattgtacatatgacaagtcttttgcaaaactgtgtgatctttgtgaaagtagtacagtatatgacctttaatttcttttttattttaaatatactgtcacactgaagcactggttgggcattttaattcatgttaataaatcacaattatgtcagtttt

SEQ ID NO: 398 - DNA, 5645 bp, Artificial
  cDNA Sequence
ggaccccggtgtctggcttcccccgagccgggaccccgcgatggccaagcgcagctcgctgtacatccgcatcgtggaggggaagaaccttcccgccaaggacatcactggcagcagcgacccctactgcatcgtgaaggtggacaatgagcccatcatcaggtaccgcccccacccccaggaccgaggggcgctcagcctctcatcggcccgcgctctccccgcaaaggggacagccacagtgtggaagaccctgtgccccttctggggtgaggagtaccaagtgcacctgccgcccaccttccacgctgtggctttctatgtcatggatgaggatgccctcagccgggacgacgttatcggaaaggtctgccttacaagggacaccatagcctctcaccctaagggtttcagcgggtgggcccacctgacggaggtcgaccccgatgaggaggtgcagggcgagatccacctgcggctggaagtgtggccaggggcccgggcctgccggctacgctgctctgtgctggaggccagggatctggccccaaaggaccgcaatggcacatctgaccccttcgtccgagtgcgctacaagggccggacacgggagacctcgatcgtgaagaagtcatgctacccacgctggaatgagacgtttgaatttgagctgcaggagggggccatggaggcgctgtgcgtggaggcctgggactgggaccttgtcagccgaaacgacttcctgggcaaagtggtgattgatgtccagagactgcgggtggtgcagcaggaggagggctggttccggctgcagcccgaccagtccaagagccggcggcatgacgagggcaacctgggctccttgcagctggaggtgcggctgcgggacgagacggtgctgccctccagctactaccagccactggtgcacctgctgtgccacgaggtcaagctgggcatgcagggcccagggcagctgatcccactcatcgaggagacaaccagcaccgagtgtcgccaggacgtggccacgaacctgctcaagctcttcctggggcaggggctggccaaggacttcctggacctgctcttccagctggagctgagtcgcaccagtgagaccaacaccctgttccggagcaactctctggcctcaaagtccatggagtcttttctgaaggtggccgggatgcagtacctgcacggcgtcctgggccccatcatcaacaaggtgtttgaggagaagaagtacgtggagctggaccccagcaaagtggaagttaaggatgtagggtgctccgggctgcaccgcccgcagaccgaggccgaggtgctggagcagagcgcgcagacgctgcgcgcccacctgggggccctgctgagcgcgctcagccgctcggttcgcgcgtgccccgccgtggtgcgcgccaccttccgccagctcttccggcgcgtgcgcgagcgcttccccggcgcccagcacgagaatgtaccgttcatcgccgtcaccagcttcctgtgcctgcgcttcttctctcccgccatcatgtcgcccaagctcttccacctgcgggagcgccacgcggacgcccgcaccagccgcaccctgctcctgttggccaaggcagtccagaacgtgggcaacatggacacgccggcttccagggccaaggaggcttggatggagccgctgcagcccaccgtgcgccagggcgtggcgcagctgaaggacttcatcaccaagctcgtggacatcgaggagaaggacgagctggacctgcagcggacgctgagtttgcaggcgccacctgtgaaggaggggccactcttcatccacaggaccaagggcaagggccccctcatgtcctcctccttcaagaagctctacttctccctcactaccgaggccctcagcttcgcgaagacgcccagctccaagaaaagcgccctcatcaagttagccaacatccgggcagcggaaaaggttgaggaaaagagctttggcggctcgcacgtcatgcaggtcatctacacggacgacgccggcaggccccagactgcctacctgcagtgcaagtgtgtgaatgagcttaaccagtggctgtctgcgctgcggaaggtgagcatcaacaacaccggactgctgggctcctaccaccctggcgtcttccgtggggacaagtggagctgctgccaccaaaaagagaagacaggtcagggctgcgataagacccggtcacgggtgaccctgcaggagtggaatgaccctcttgaccatgaccttgaggcccagctcatctgccggcacctgctgggcgtggaggccatgctgtgggagaggcaccgggagctgagcgggggcgcagaggcaggcacggtgcccacgagccctggcaaagtccccgaggactcattggcccggctgctccgggtgctgcaggacctccgcgaggcccatagctccagcccggccggctccccaccctcagagcccaactgcctcctggagctgcagacgtgaggcccgccctacgctccccttgctgagtcccctgccaagcgctcggagcccccccaggacactctgcaccccctcaccccggtcctcctcattagggtgcagggcctaggtctcttccaggtgggggaggggggagagtcaggaataaggggatccccagaagtgcagagctgagcaggcttgggcctgtcatggctggccggaagtgtccccagctccctacagacgctgtagccatcactgcctctccagggaccctcctctcctgcccaggacagacccagccagaaccactgctaggatgggccgcacccaggggtctggcctccagggacctagagaatgggagggagaacggggccccaggagacccggccgccaccccacccgctacccttgggtgccacagggctgtgctgttgccaacagtaaacctgctcttactgtccaggctctggggtcttgtgatgagggtctggggagaaagtgggcccggggggaccccggaggctgtcggtggatgtgccgatgatggggctgacagtatgggctctgggcatccctgttcccccctctttcttccccccactcttctggggtcgggggttcctttcccttcccagttgctgtccctgggtcccctctttcatgtcccacaggccacagagcccagtgtgtccaaccagctgttctctcctcaaagcagcccccaagcaagtcccttctctagggtgtccctgaggacagcacagaggcgggactcagagaccccattcctcttcacgcagcccttaccccaagccctctagctgtgtggctggcagtgttggccacgtaggggctcccatccccccaccattgtgtcacatgggctgccaggctcagctcccagctgcgtccacagtgacctggatcagggtggggacaaggactggaccctccttctccagaaggccttcagctcttgccttgccatgcagtcacctccttccccctctgaccccagatcccaaaggtgcaccgttgccccagcccctttctggccccatggggtttctctgatgccttcatcatagaggcccggggctggtccgatggttggcaaaacttgactccggcccagtccccactcttggggacttagaacccctgctgtcctgggatctggcctgcctttctttggtcagtccctgtggtcccccaccagctccccctcccatagggctgcccaccaagccctgcccccagcccaagaggagcccccactgcctgcggggcagtgatgtctggccaccggctcacaccaatgacttggtcctggggtggcagaagcagcaggtgacaggagcagggcccctgtccctctcttctggccctgtggtacccaggccacacgttgtgcccgctcttggggctgaccggctgtagggaccaccagccgctgctactgtgggccgccccggggcagggtgggcagggcttttgtgggttatgaggacacagaagtccctgaggcccccagacctggctcagccaacctccttcctcccccggttgccccccactctaaagcctcctccctcccagcgtccactggctccaggctcctcacaacagcagctcatagacacggggcgtctccaggtggtcccagccctccagatgtttctagctctccaggtgggcgctgttttcacgtctgcctgcatccattcattccttcattcctcacctttatcctgttatctctatttttttaagctaccaggaaggaaagggaagaagagatcacgaaactgggacccccagaagggaggagtgggctttgaacttagacatctacctcagagctcaaataggttgtttaaaatcacattcaattttcagatgaaggggaactttatagtttttttttttttttttttttttgagacagagtctcactgtgttgcccaggctggagtgcaaatggcttgatcttggttcactgcaacctctgcctcccaggttcaagcaattctcttgcctcagcctcccgagtagctgggactaaaggcgtgtgccaccatgcccagctaattcttgtatttttagtagagacggagtttctccatgttggccagactggtctcgaactcctgacctcaggtgatctgaccgccttggcctccgaaagtgctgagattacagttgcgagccactgtgcgtggccagaactttataataagagacttgaagctgggtgtgacggtgcacacctctagtcccagctactcgggaggccaagacagaaggatcaccttgaggccaggagtttaaggccagcctgggcaacatagcaaaacctagtccctaaaattaaaaaaaaaaaaaaaaaaaaaggaaaataaaggagacttgaaatttttgaactaaatagtggtgatggctacacattgtgaatgtaattaacaccactgagttaaacacttaaaatggttaaaatggcaaattgtatgttatacctattttactacaataaaaagtataaaaaagagaagatatttaggtgacttacagcaaccaattgcaacaaaacaaaatgttaagaaatgatctttttatgaggcaattggaaatttgaacactgatcaactataggatgattggaattattaatttttaaaggtgtgataagatactgcacttggctgggcacagtggcacatgcctgtaatcccagctacttggcaggctgaggtgggagaatcgcttgagctcaggagttcgagaccagcctgggcaacgtggcgaaatccccgtctttacaaaaacaaacaaacaaacaaaaaagatattgcagttgtgttgtaagcgtccttatctttcagagctacatagtggaatgtttatggaatatttaggataaatgatataggcatttgggatttgctgcaaaatgacccagaggcaggggtcagggggagaggtagagatgagacaagaggtagaggggagaggtagaggtagccacgagctgataattacagacaagagatgcggagtatgtgggggctcattatcctgcatagtctatctttgtatatctttgaacttttcaagaataaaaaagcttaaaaagtat

SEQ ID NO: 399 - DNA, 2334 bp, Artificial
  cDNA Sequence
aaaaggaagagggagtggtcagatgaatctgaggaggagccggagaaggagctcgcccctgagcctgaggagacctgggtagtggagatgctgtgtgggctcaagatgaagctgaagcaacagcgagtgtcacccatcctccctgagcaccacaaggacttcaacagtcagcttgcccctggggtagatcccagccccccgcataggtccttttgctggaaaaggaagatggagtggtgggacgaatctgaggagtcgttggaggaggagccacggaaggtgctcgcccctgagcctgaggagatctgggtggcggagatgctgtgtggcctcaagatgaagctgaagcgacggcgagtgtcgctcgtgctccctgagcaccacgaggccttcaacaggctgcttgaggatcctgtcattaaaagattcttggcctgggacaaagatctgagggtgtcggacaagtatctcctggctatggtcatagcgtatttcagccgggccggcttcccctcctggcaataccaacgcattcatttcttcctggctctctacctggccaatgacatggaggaggacgacgaggactccaaacaaaacatcttccacttcctgtataggaagaaccgctctcgcatacccttgctccgtaagccttggttccagttaggccattccatgaacccgagggccaggaagaaccgctctcgcatacccttgctccgtaagcgtcggttccagttataccgttccacgaacccgagggccaggaagaaccgctctcgcatacccttgctccgtaagcgtcggttccagttataccgttccatgaactcgagggccaggaagaaccgctctcagatagtcctgttccagaaacgacggttccacttcttctgttccatgagctgcagggcttgggtttccccagaggagttggaggagatccaggcttatgacccagagcactgggtgtgggcgcgagatcgcgctcacctttcctagagctccagggaccggggaggcctgaggtcatcggcctgagagaagaacaccggacccaggggagatgtggattttcagcgggaactttattccaatgctaatggcagacaccaggcaggaggagaggaaccatttgtgcagatcatctagaagaacctggaccattcttgatggagctgaatacagtgatcacgttgtcctcctaggagcaggggtggggggaggggggtggggtccttctaggagtccttggagaaaagtaagaaaccaggagcgtttccagttccaccctttcctgcggcaccaccaccctttttatattgctgaattccaacctccctggggcggaacctggaggtcctgtttcttacggacttgcagtccaggaggatttgaaggcacaatgcaggggctcagattgggacagaattcttttgtgaaatatcagtgccacagattgtaacagatagcttcatgcacactctgcattttattggtttgtatggaaaatgtcggccattgaattattcatagatttatttcaaatagtttggaaattgttgtacttttgaaaacatgctgttcctgtagttttttgatgagagttatagttgttatatatacataaagctaattttcttttcatttttaagagacaattctttttatcctaaatattttattatctttaaatttgtttctgtattattacatgtgctcctgaagcgagcactctttttatctatgatacttccataataatctcttctatttatagctattggtagttccccaccagaaaaaaacataattctggtgatagaaatttttatttgctgtttaggtttgtgactgaattgtgagaattcagttgtgatttttaacatgcctcagatatatatactaacacgtctaatatatactatctattttattggtttattttgaaaaacatgggtatagaattatttaaatattattttatttatttaaatatttattaaatatatttatttatttaaatattattactttaaatattattttaaatattttggaaatactggtatttttgaatagatgctgtttctataaagctgtgtgatggatattataactgttatatacacatacatataattttgttttcctttttaagagaggattcttttcatcctaaatcttttacctttcaatctttgtatctattattacacgtgctgctgaagggagcatggtttttatctatgatacttagttaacatatatattacatttatagctatgtagtagttcccctaaattcttgtaaaaataaatttttatttg

SEQ ID NO: 400 - DNA, 381 bp, Artificial
  cDNA Sequence
tcagcccctggggtagatcccagccccccgcataggtccttttgctggaaaaggaagatggagtggtgggacgaatctgaggagtcgttggaggaggagccacggaaggtgctcgcccctgagcctgaggagatctgggtggcggagatgctgtgtggcctcaagatgaagctgaagcgacggcgagtgtcgctcgtgctccctgagcaccacgaggccttcaacaggctgcttgaggatcctgtcattaaaagattcttggcctgggacaaagatctgagggtgtcggacaagtatctcctggctatggtcatagcgtatcagccgggccggcttcccctcctggcaataccaacgcattcatttcttcctggctctgtg

SEQ ID NO: 401 - DNA, 1354 bp, Artificial
  cDNA Sequence
atgaacgcccctccagccttcgagtcgttcttgctcttcgagggcgagaagatcaccattaacaaggacaccaaggtacccaatgcctgtttattcaccatgaacaaagaagaccacacactgggaaacatcattaaatcacaactcctaaaagacccgcaagtgctatttgctggctacaaagtcccccaccccttggagcacaagatcatcatccgagtgcagaccacgccggactacagcccccaggaagcctttaccaacgccatcaccgacctcatcagcgagctgtccctgctggaggagcgcttccgggtgagggcagggcctggaggggcagacggggtgggctggacactggcccgtgtgcccaggcctgggacagccctggcctgtttcttcggaggtcctcagggagaggcggcggtgatggaagaacagggacttccaccacaggctccaggacatgtggactgaggggctgtggagtctgggcctgtggctcccgtctgccccatgggacttctgtagtgctgcagggtccctcgggtgctgtgggccagatccgggcggggacctactgtcctttgggggtgctcttctacgtcccttgtcggtgattggcaaggcctggtccttccaggcctctgggaggcagctcaccccagggtggcccacacctgttcctagcagggcgcctgggaatctagaacagtttagaggggaaagagccacagcaaagaaaagccgaggcagggtgatcacgaggtcaggagttcaagaccagcctggcaaacatggtgaagccctgtttctactaaaaatacaaaaattagctaggcatggtggcatgtgctgtagtcccagctactcgggaggctgaggcaggagaatcgcttgaacccgggaggcggaggttgcagtgagccgagattgtgccactgcactccagcctaggtaacagagcaggactccatctcagtcaatcaatcaatcaatcaatctcagcggttgaactacccttgacatggttcagctctgtatccacacccaaatgtcatgtcaaattgtaattcccagtgttgtgggagggacctggtgggaggtgattggctcatgggggccgacttcccccttgctgttctcgtgatattgagtgagcgcttgtgggatctggttgtttaaaagcgtgcagccctcccacttcactctctctgtctctcctgctccaacatggccagacgtgcctgcttccccttcgccttctgccgtgattgtcagtttcctgaggcctccccagccacgcttcctgtacagcctgcagaactgtgagtcaattaaacctcttttcttc

SEQ ID NO: 402 - DNA, 1249 bp, Artificial
  cDNA Sequence
gcaaagctacagcacgtctttcctcaccgacagctatttaaaatatattggttggactctgcatgataagcaccgagaagtccgcgtgaagtgcgtgaaggctctgaaagggctgtacggtaaccgggacctgaccgcacgcctggagctcttcactggccgcttcaaggactggatggtttccatgatcgtggacagagagtacagtgtggcagtggaggccgtcagattactgatacttatccttaaacttttctaccctgagtgcgagataagaacgatgggtggaagagagcaacgccagagcccaggcgcccagaggactttcttccagcttctgctgtccttctttgtggagagcaagctccacgaccacgctgcttacttagtagacaacctgtgggactgtgcagggactcagctgaaggactgggagggtctgacaagcctgctgctggagaaggaccagagcacgtgccacatggagccagggccagggaccttccacctcctagggtgaaaccaggagagattgcttgcttcacttgtacaaggcaggaacggtggcatggcgtgggggaaacttggagttggaaggtggctaatctttgattctatgtttttgatcctcctggcactccagacctgggtgatatgcaggagagcacactgatagaaatccttgtgtccagtgcccagcaactcctgcctcagcctcccgagcagctgggactacaggtgcccgccaccacgcccggctaacttttttgtatttttagtagagacgggttttcaccgtgttagccaggatggtcttgatctcttgaccttgtgatccacctgcctcatcatcccaaagtgctgggattacaggcgtgagccactgcgcccagcatgttagacaatttttaattcatcctctctgtgctgttgttttctcagctgtgaaaggaatattctggtggggacaaggttacagagttgctgagagggtctcatgacatgaaggtactggccttggcacagtgcctgggggggcggggactccgcacatgcctgtgatgtcacagttactgtcagttcacagcgaaccttccctccttttcctgttgactttcccacactcctgtaaccatccctccctcccttcttcctctctctctctctcactcacgcacacgcacacacacacacacacactccattcactgtctccatgactctggagtaaactaacgtctcgagttgc

SEQ ID NO: 403 - DNA, 3535 bp, Artificial
  cDNA Sequence
ggagggcgagtggcgagcaggggcctcggccgccacccacacgccccgaagcgtgctcgtcccccgcgcggggctcccggccgccgccctcggccatcggctgctccccggtggcccaggcctcggactccgcggccggcccggcgcggcccagcgccctcagggatcatggcccaggtagcagtgtccaccctgcctgttgaagaagagtcctcctcagagaccaggatggtggtgacattcctcgtgtctgccctcgaatccatgtgtaaagaactggccaagtccaaggcagaagtggcctgcatcgcagtgtacgaaacagacgtgtttgtcgtcggaaccgagagaggatgcgcttttgttaatgccaggacggattttcagaaagattttgcaaaatactgcgttgcagagggactgtgtgaggtgaaacctccctgccctgtgaacgggatgcaggtccactcgggcgaaacggaaatactcaggaaggcagtggaggactatttctgcttttgttatggtaaagccttagggacaacagtgatggtgcctgttccctatgagaagatgctgcgagaccagtcggctgtggtagtgcaggggcttccggaaggcgttgcctttcaacaccctgagaattacgaccttgcaaccctgaaatggattttggagaacaaagcagggatttcattcatcataaatagacccttcctaggaccagagagtcagctgggtggccctgggatggtaacagatgcggagagatccatagtatcaccaagtgaaagctgcggccccatcaatgtgaaaactgaacccatggaagattctggcatttcactgaaagcagaagctgtctcagtcaagaaagaatcagaagatcctaattactatcaatataatatgcaaggaagccacccttcttccacaagcaatgaagtaatagaaatggaattaccaatggaagattccactccgctggtcccttcagaagaaccaaatgaggaccctgaagccgaggtgaaaatcgaaggaaacacaaattcatccagtgttacaaattctgcagcaggtgttgaagatcttaacatcgttcaagtgactgttccagataatgagaaggaaagattatcaagcattgaaaagattaaacagctaagagaacaagttaatgacctctttagccgaaaatttggtgaagcaattggcgtggatttccctgtgaaagttccctacaggaagatcacattcaaccctggctgtgtggtgattgatggcatgcccccgggggtggtattcaaggcccccggctatctggaaatcagttccatgaggaggatcttggaggcagctgagtttatcaaattcacagtcatcaggccgcttccagggcttgagctcagtaatgtgggaaaacgcaagatagaccaggagggccgtgtgtttcaagaaaagtgggagagagcgtatttcttcgtggaagtacagaatattccaacatgtctcatatgcaaacaaagcatgtctgtgtccaaagaatataacctaagacgccactatcaaaccaatcacagcaagcattatgaccagtatatggaaagaatgcgtgacgagaagcttcacgagctgaaaaaagggctcaggaagtatctcttaggcttgtcagacaccgagtgtcccgagcaaaaacaagtgtttgcacacccaagtccaacccagaaatcccccgtgcagcctgtagaggacctagctgggaacttatgggagaagttacgtgaaaaaatcaggtcttttgtggcatattctatcgcaatcgatgagatcacggatataaataataccacccagttggccatattcatccgtggtgtcgatgagaatttcgatgtgtccgaagaacttctggacacggtgcccatgacgggtacaaaatctggcaacgagatcttttcgcgtgttgagaagagcctgaaaaagttctgtatcgactggtcgaaattagtaagcgtggcctccactggcaccccagcgatggtggatgccaataacgggcttgtcacaaaactgaagtccagggtggcgacgttctgcaagggtgcggaactgaagtccatctgttgtataattcatccggaatcactctgtgctcagaagttgaagatggaccacgtcatggacgtggtagtgaagtccgtgaactggatatgctcccggggactgaaccacagtgagttcacaaccttgctctatgagctggacagccagtatggtagcctcctgtactacacggagattaagtggctcagtcgcgggctcgtgctaaagagatttttcgaatccttggaagaaatcgactccttcatgtcatccagagggaaacccctgcctcaactgagctccatagattggatccgagacctggccttcttggttgacatgacgatgcatctgaacgctttgaacatctctctccaaggacactcccaaatcgtcacgcagatgtatgacctgatccgggcgttcctagcaaaactgtgcctctgggagactcatttgacgaggaataatctggcccactttcccaccctgaaattggcttccagaaatgaaagcgatggcctgaactacattcccaaaatcgcggaactcaagaccgaattccagaaaaggctgtctgatttcaaactctacgaaagcgaactgactctgttcagctccccgttctccacgaagatcgacagtgtgcacgaggagctccagatggaggttatcgacctgcaatgcaacacggtcctgaagacgaaatacgacaaggtgggaataccagaattctacaagtacctctggggtagctacccgaaatacaagcaccattgcgcaaagattctttccatgttcgggagcacctacatctgcgaacagctgttctccattatgaaactgagcaaaacaaaatactgctcccagttaaaggattcccagtgggattctgtactccacatcgcaacgtgatggagagaaaactcctggcagggccctatggtgggaaaggctggagtcttctagtcccaagggattgggagatgacaaaatgaatttttttttcttttttgagatggagtcttgctctgtcgcccaggttggagtgcagtggcgtgatctcggcttactgcaacttccagctcctgggttcgaacgattctcctgcctcagcctcccgagcagctgggactacaggcgtgcgccaccatgcctggctaatttttgtattagtagagatgaggtttcaccatgttggccaggctggtctccaactcctgacctcaggtgatccacctgcctcgacctcacaaagtgctgggattacaggcatgaaccactgtgcccagctgacaaaatgagttcttaaacttttttttttttcagttttttttccactttgaatcagaaatataatctgcagtatcatacttgtttatattacattgtgtgcctcactattcattaaaaatcaagaaagttttattgt

SEQ ID NO: 404 - DNA, 788 bp, Artificial
  cDNA Sequence
gagagctgagagctggaggtgagctgggctcgcggtcgcccctctcgcgcgccctctttgagaaccacggcttccaacctccctggaaatggggggaacatggccgaggcgcgtggcgaggtcacctcgtggaggccccggagcggcatcctcagcgccccagcgatccggtgcccattagatttctttagtacagaacctgctaaggccatcaaacctattgatcggaagtcagtccatcagatttgctctgggccggtagtactgagtctaagcactgcggtgaagaagatggtagaaaacagtctggatgctggtgccactaatattgatctaaagcttaaggactatggaatggatctcattgaagtttcaggcaatggatgtggggtagaagaagaaaacttcgaaggcttaatgatgtcaccatttctacctgccacgtatcggcgaaggttgggactcgactggtgtttgatcacgatgggaaaatcatccagaaaaccccctacccccaccccagagggaccacagtcagcgtgaagcagttattttctacgctacctgtgcgccataaggaatttcaaaggaatattaagaagaaacgtgcctgcttccccttcgccttctgccgtgattgtcagttccttgagggctccccagccatgcttcctgtacagcctgcaaaactgactcctagaagtaccccaccccacccctgctccttggaggacaacgtgatcactgtattcagctctgtcaagaatggtccaggttcttctagatga

SEQ ID NO: 405 - DNA, 477 bp, Artificial
  cDNA Sequence
gctaaggccatcaaacctattgatcggaagtcagtccatcagatttgctctgggccggtagtactgagtctaagcactgcggtgaagaagatggtagaaaacagtctggatgctggtgccactaatattgatctaaagcttaaggactatggaatggatctcattgaagtttcaggcaatggatgtggggtagaagaagaaaacttcgaaggcttaatgatgtcaccatttctacctgccacgtatcggcgaaggttgggactcgactggtgtttgatcacgatgggaaaatcatccagaaaaccccctacccccaccccagaccacagtcagcgtgaagcagttattttctacgctacctgtcataaggaatttcaaaggaatattaagaagaaacgtgcctgcttccccttcgccttctgccgtgtcagttccttgagggctccccagccatgcttcctgtacagcctgcaaaac

SEQ ID NO: 406 - DNA, 2022 bp, Artificial
  cDNA Sequence
cagctctacatcctgtagattctcacacccagggcctccttcggcctcttctcaggggagtctcagagcaggagcctctctcccttgcccagtgaaagtcattctcccctctcccatccacctcacccgcagccacaatcctgagactttcccccgggaggcacacttctcctcgctgccctgctgctctcacggaaaccctgtcctgcttctcacactgacatctgctctctaatcacagaggatcctgtcattaaaagactcctggcctgggacaaagatctgagggtgtcggacaagtatctcctggctatggtcatagcgtatttcagccgggccggcctcccctcctggcaataccaacgcattcatttcttcctggctctctatctggccaatgacatggaggaggacgatgaggcccccaaacaaaacatcttctacttcctgtacgaggagacccgctctcatatacccttgctccgtgagctttggttccagttatgccgttacatgaacccgagggccaggaagaactgctctcagatagccttgttccggaagtatcggttccacttcttttgttccatgcgctgcagggcttgggtttccctggaggagttggaagagatccaggcttatgacccagagcactgggtgtgggcgcgagatcgcgcccacctttcctagagctccagggaccgtggaggcctgaggtcatcggcctgagagaagaacaccggacccaggggagatgtggattttcagcaggaactttattccaatgctaatggcagacatcaggaaggaggagaggaaccatttgtgcagatcatctagaagaacctggaccattcttgacagagctgaatacagtgatcacgttgtcctccaaggagcaggggtggggtggggtacttctaggagtccttggagaaaagtaagaaaccaggagtgtttccagttccaccctttcctgcggcaccacctccctttttatattgctgaatgccaacctccctggggcggaacctggaggtcctgtttcttatggacttggttgccacagtccaggagcatttgaaggcacagtgcaggggctcagattggcacagaattctttgtgaaatatgagtgccacagactgtaacagatagcttcatgcacactatgcattttattggtttgtttggaaaatgttggccattgaattattaataggtttatttcaaatagtttggaaattgttgtacttttgaaaacatgctgttcctgtagagttttttgatgagagttatagttgttatatatacctaaagataattttcttttcatttttaagtgagaattctttttatcctaaatcttttattatctttaaatttttttctgtattattatatgtgctcctgaagcgagcactctttttatctatgatacttccataataatctcttctatttatagctattggtagttccccaccagaaaaaaacataattctggtgatagaaatttttatttgctgtttaggtttgtgactgaattgtgagaattcagttgtgatttttaacatgtctcagatatatatactaacacgtctaatatatactatctattttattggtttattttgaaaaacatgggtatagaattatttaaatattattttatttattgaaatatttattaaatatgtttatttatttaaatattattattactttaaatattattttaaatattttggaaatactggtatttttgaatagatgctgtttctacaaagctgtgtgatgggtgttataactgttgtatacacatacatataattttgttttcctttttaagagaggattcttttcatcctaaatcttttacctttcaatctttgtatctattattacacgtgctgctgaaggggagcatggtttttatctatgatacttagttaacatatatattacatttatagctatgtggtagttcccctaaattcttgtaaaaataaatttttatttg

SEQ ID NO: 407 - DNA, 369 bp, Artificial
  cDNA Sequence
tcagcccctggggtagatcccagccccccacgtaggtcccttggctggaaaaggaagagggaatgtttggatgaatctgatgatgagccagagaaggagctcgcccctgagcctgaggagacctgggtggcggagacgctgtgtggcctcaagatgaaggcgaagcgacggcgagtgtcgctcgtgctccctgagtactacgaggccttcaacaggctgcttgaggatcctgtcattaaaagactcctggcctgggacaaagatctgagggtgtcggacaagtatctcctggctatggtcatagcgtatcagccgggccggcctcccctcctggcaataccaacgcattcatttcttcctggctctgtg

SEQ ID NO: 408 - DNA, 990 bp, Artificial
  cDNA Sequence
atggaactccacatcctggagcaccggctgcaagttgccagcgtcgccaacgagagtataccgctgttcacctacggcctgatcaaacttgccttcctgtcctccaagaccaggtgcaagttcttcagtctgactgagacgccagaggattacactatcattgtcgatgaggaaggattcctagagctgccctcctcggagcacctgagtgtggcagatgccacctggctggccctgaacgtggtgtccggcggtggcagcttctccagctcccagcccatcggcgtgaccaagatcgccaagtcagtcatcgccccactggctgaccagaacatatccgtgttcatgctgtccacgtatcagacagacttcatcctggtgcgcgagcgggacctgccctttgtcacccacacattgtcatcagagttcaccatcctgcgggtcgtcaatggcgagaccgtggcagccgagaacctcggcatcaccaatggcttcgtgaagcccaagctggtccagaggccagtcatccacccactgtccagcccgagcaacaggttctgtgtcaccagcctggaccctgacacgctgcctgctgttgccacactcctcatggatgtcatgttctactccaatggagtgaaggaccccatggccactggggatgactgcggccacatccgcttcttctccttctccctcatcgagggctacatctccctggtgatggacgtgcagacgcagcagaggtttcctagtaacttgctgttcacaagcgcatccggagagctctggaagatggtccggattggaggacagcccctggggtttgatgagtgtggcatcgtggcccagatctcagagcccttggctgctgcagacatcccagcctactacatcagtactttcaagtttgatcatgcacttgtccccgaagagaacatcaatggtgtcatcagtgccctgaaggtcagccaagcagagaagcactag

SEQ ID NO: 409 - DNA, 468 bp, Artificial
  cDNA Sequence
atgagccgccgtggaccgggcgcgggcggacgatggaactccacatcctggagcaccggctgcaagttgccagcgtcgccaacgagagtataccgctgttcacctggcctgatcaaacttgccttcctgtcctccaagaccaggtgcaagttcttcagtctgactgagacgccagaggattacactatcattgtcgatgaggaaggattcctagagctgccctcctcggagcacctgagtgtggcagatgccacctggctggccctgaacgtggtgtccggcggtggcagcttctccagctcccagcccatcggcgtgaccaagatcgccaagtcagtcatcgccccactggctgaccagaacatatccgtgttcatgctgtccacgtatcagacagacttcatcctggtgcgcgagcgggacctgccctttgtcacccacacattgtcatcagagttcaccatcctg

SEQ ID NO: 410 - DNA, 1814 bp, Artificial
  cDNA Sequence
ttctagcagaaatggcggctgcggcggctcgagtggtgttgtcatccgcggcgcggcggcggctctggggtttcagcgagagtcttctaatccgaggcgctgcgggacggtcattatattttggagagaacagattaagaagtacacaggctgctacccaagttgttctgaatgttcctgaaacaagagtaacatgtttagaaagtggactcagagtagcttcggaagactctgggctctcaacatgcacagttggactctggattgatgctggaagtagatacgaaaatgagaagaacaatggaacagcacactttctggagcatatggctttcaaggcaagttggagtttgcataatttgtttttcctcttttatttcaagggcaccaagaagagatcccagttagatctggaacttgagattgaaaatatgggtgctcatctcaatgcctatacctccagagagcagactgtatactatgccaaagcattctctaaagacttgccaagagctgtagaaattcttgctgatataatacaaaacagcacattgggagaagcagagattgaacgtgagcgtggagtaatccttagagagatgcaggaagttgaaaccaatttacaagaagttgtttttgattatcttcatgccacagcttatcaaaatactgcacttggacggacaattttgggaccaactgaaaatatcaaatctataagtcgtaaggacttagtggattatataaccacacattataaggggccaagaatagtgcttgctgctgctggaggtgtttcccatgatgaattgcttgacttagcaaagtttcatttcggtgactctttatgcacacacaaaggagaaataccagctctgcctccctgcaaattcacaggaagtgagattcgtgtgagggatgacaagatgcctttggcgcaccttgcaatagctgttgaagctgttggttgggcacatccagatacaatctgtctcatggttgcaaacacgctgattggcaactgggatcgctcttttgggggaggaatgaatttatctagcaagctggcccagctcacttgtcatggcaatctttgccatagctttcagtctttcaacacttcctacacagatacaggattatggggactgtatatggtttgtgaatcatccactgttgcagacatgctacatgttgttcaaaaagaatggatgcgactctgtacaagtgtcacagaaagtgaggttgcacgagccagaaatcttctgaaaacaaacatgttgttgcagcttgatggttcaactccaatttgtgaagatattggtaggcaaatgttatgctataatagaaggattcccatccctgagcttgaagcaagaattgatgctgtgaatgctgagacaattcgagaagtatgtaccaaatacatttataataggagtccagctattgctgctgttggtcccattaagcaactaccagattttaaacagatacgcagtaacatgtgttggcttcgtgattaaaatgctcctaatcaagattgtttgaacacatgtatttataaaacagagctagagaaaaataaaaatgaacatgtatatacatttggaaatttgaattaaatactgtatcatactttcaaaggataaaaagactacccctctgaaggttgttttgtattaatggtcagtctttgttctctgagaaattatgttggaagcagcatactttcaaattattaccatgagtataattttaagaatgaaaatgtttacagtattttcagttttattataaaaatgcacacacaa

SEQ ID NO: 411 - DNA, 309 bp, Artificial
  cDNA Sequence
atggcaaaaatctccagccctacagagactgagcggtgcattgagtccctgattgctgttttccagaagtatgctggaaaggatggttacaaccgcaatctctccaagacggagttcctaagcttcatgaatacagagctggctgcctttacaaagaaccagaaggaccccggtgtccttgaccacatgaagaaactggatgtcagcagtgatgggcagttagatttcccaaaatttcttaatctgattggtggcctagctgtggcttgccatgactccttcctcaaggctgtcccctcccagaagtag

SEQ ID NO: 412 - DNA, 1526 bp, Artificial
  cDNA Sequence
gaagacaccaccggaagcaaggaaggtgctgtgtaatcattaaggagcggaggcttttggagctgctaaaatgccggattacctcggtgccgatcagcggaagaccaaagaggatgagaaggacgacaagcccatccgagctctggatgagggggatattgccttgttgaaaacttatggtcagagcacttactctaggcagatcaagcaagttgaagatgacattcagcaacttctcaagaaaattaatgagctcactggtattaaagaatctgacactggcctggccccaccagcactctgggatttggctgcagataagcagacactccagagtgaacagcctttacaggttgccaggtgtacaaagataatcaatgctgattcggaggacccaaaatacattatcaacgtaaagcagtttgccaagtttgtggtggaccttagtgatcaggtggcacctactgacattgaagaagggatgagagtgggcgtggatagaaataaatatcaaattcacattccattgcctcctaagattgacccaacagttaccatgatgcaggtggaagagaaacctgatgtcacatacagtgatgttggtggctgtaaggaacagattgagaaactgcgagaagtagttgaaaccccattacttcatccagagaggtttgtgaaccttggcattgagcctcccaagggcgtgctgctctttggtccacccggtacaggcaagacactctgtgcgcgggcagttgctaatcggactgatgcgtgcttcattcgagttattggatctgagcttgtacagaaatacgtcggtgagggggctcgaatggttcgtgaactctttgaaatggccagaacaaaaaaagcctgccttatcttctttgatgaaattgatgctattggaggggctcgttttgatgatggtgctggaggtgacaatgaagtgcagagaacaatgttggaactgatcaatcagcttgatggttttgatcctagaggcaatattaaagtgctgatggccactaacagacctgatactttggatccagcactgatgaggccagggagattggatagaaaaattgaatttagcttgcccgatctagagggtcggacccacatatttaagattcacgctcgttcaatgagtgttgaaagagatatcagatttgaactgttagcacgactgtgtccaaatagcactggtgctgagattagaagcgtctgcacagaggctggtatgtttgccatcagagcacggcgaaaaattgctaccgagaaggatttcttggaagctgtaaataaggtcattaagtcttatgccaaattcagtgctactcctcgttacatgacatacaactgaaccctgaaggctttcaagtgaaaactttaaattggaatcctaaccttatatagacttgttaataaccaattcataaacaaataaatggcttcaaaattgtatgcttttttccatatctcttcttgtaatataataaaaggtgatttctaatgtt

SEQ ID NO: 413 - DNA, 1754 bp, Artificial
  cDNA Sequence
atgctgcttctgccaagcgccgcggacggccggggcaccgccatcacccacgctctgacctctgcctctacactctgtcaagttgaacctgtgggaagatggtttgaagcttttgttaagaggagaaacagaaatgcttctgcctcttttcaggaactggaggataagaaagagttatccgaggaatcagaagatgaagaattgcagttggaagagtttcccatgctgaaaacacttgatcccaaagactggaagaaccaagatcattatgcagttcttggacttggccatgtgagatacaaggctacacagagacagatcaaagcagctcataaagcaatggttttaaaacatcacccagacaaacggaaagcagctggtgaaccaataaaagaaggagataatgactacttcacttgcataactaaagcttatgaaatgttatctgatccagtgaaaagacgagcatttaacagtgtagatcctacttttgataactcagttccttctaaaagtgaagcaaaggataatttcttcgaagtgtttaccccagtgtttgaaaggaattccagatggtcaaataaaaaaaatgttcctaaacttggtgatatgaattcatcatttgaagatgtagatatattttattctttctggtataattttgattcttggagagaattttcttatttagatgaagaagaaaaagaaaaagcagaatgtcgtgatgagaggagatggattgaaaagcagaacagagcaacaagagcacaaagaaaaaaagaagaaatgaacagaataagaacattagttgacaatgcatacagctgtgatccaaggataaaaaagttcaaggaagaagaaaaagccaagaaagaagcagaaaagaaagcaaaagcagaagctaaacggaaggagcaagaagctaaagaaaaacaaagacaagctgaattagaagctgctcggttagctaaggagaaagaagaggaggaagtcagacagcaagcattgctggcaaagaaggaaaaagatatccagaaaaaagccattaagaaggaaaggcaaaaacttcgaaactcatgcaagatagaagaaataaatgagcaaatcagaaaagagaaagaggaagctgaggctcgtatgcgacaagcatctaagaacacagagaaatcaactggtggaggtggaaatggaagtaaaaattggtcagaagatgatctacaattactaattaaagctgtgaatctgttccctgctggaacaaattcaagatgggaagttattgctaattacatgaacatacattcttcctctggagtcaaaagaactgccaaagatgttattggcaaagcaaagagtctccaaaaacttgaccctcatcaaaaagatgacataaataaaaaggcatttgataagttcaaaaaagaacatggagtggtacctcaagcagacaacgcaacgccttcagaacgatttgaaggtccatatacagacttcaccccttggacaacagaagaacagaagcttttggaacaagctttgaaaacatacccagtaaatacacctgaaagatgggaaaaaatagcagaagcggtgcctggcaggacaaagaaggactgcatgaaacgatacaaggaacttgtcgagatggtaaaagcaaagaaagctgctcaagaacaagtgctgaatgcaagtagagccaagaaatgacaatctttgttgtgtgtgcatttttataataaaactgaaaatactgt

SEQ ID NO: 414 - DNA, 984 bp, Artificial
  cDNA Sequence
aaagcaaagacaagctgaattagaagctgctcggttagctaaggagaaagaagaggaggaagtcagacagcaagcattgctggcaaagaaggaaaaagatatccagaaaaaagccattaagaaggaaaggcaaaaacttcgaaactcatgcaagacctggaatcatttttctgataatgaggcagagcgggttaaaatgatggaagaagtggaaaaactttgtgatcggcttgaactggcaagcttacagtgcttgaatgaaacactcacatcatgcacaaaagaagtaggaaaggctgctttggaaaaacagatagaagaaataaatgagcaaatcagaaaagagaaagaggaagctgaggctcgtatgcgacaagcatctaagaacacagagaaatcaactggtggaggtggaaatggaagtaaaaattggtcagaagatgatctacaattactaattaaagctgtgaatctgttccctgctggaacaaattcaagatgggaagttattgctaattacatgaacatacattcttcctctggagtcaaaagaactgccaaagatgttattggcaaagcaaagagtctccaaaaacttgaccctcatcaaaaagatgacataaataaaaaggcatttgataagttcaaaaaagaacatggagtggtacctcaagcagacaacgcaacgccttcagaacgatttgaaggtccatatacagacttcaccccttggacaacagaagaacagaagcttttggaacaagctttgaaaacatacccagtaaatacacctgaaagatgggaaaaaatagcagaagcggtgcctggcaggacaaagaaggactgcatgaaacgatacaaggaacttgtcgagatggtaaaagcaaagaaagctgctcaagaacaagtgctgaatgcaagtagagccaagaaatgacaatctttgttgtgtgtgcatttttataataaaactgaaaatactgt

SEQ ID NO: 415 - DNA, 357 bp, Artificial
  cDNA Sequence
atgaagaaacaaggagtaagcccaaagccgctgcaatcttcccgccccagcccgtctaagcggccctgcggggcctcccccgcccgggagcgggaggtggaaaagtcggccctaggcggcgggaaactgccggggggcgccaggaggtcctccccggggaggatcccaaatctgaaaaagcgaaaaggcttggagctaaaggtggtggccaaggcccttctcggccccttccagttcgtctgtaattccctggcgcagctccgggaagaggtgcacgaactgcaggcgcggtggttccccagcagaaccactctgcatcgccgtctttgtggcaattctacattggtaagatgtagt

SEQ ID NO: 416 - DNA, 1630 bp, Artificial
  cDNA Sequence
gtatactctatttttttttttttttacagtggtactgaactgggaggtcttattacagtactgtgcttctttttcaaccatggagaggccacctgtgtgatgtggacaccacctctccgtgaaagtttttcctatcctttccttgtacttcagatgtatgttttaactttgattctcaggacctcaagcaatgatagaaggcccttcattgcactctgtctttccaatgttgcttttatgcttccctggcaatttgctcagtttatactttttacacagatagcatcattatttcccatgtatgttgtgggatacattgaaccaagcaaatttcagaagatcatttatatgaacatgatttcagttacccttagtttcattttgatgtttggaaattcaatgtacttatcttcttattattcttcatctttgttaatgacatgggcaataattctaaagagaaatgaaattcaaaaactgggagtatctaaactcaactgctggctaattcaaggtagtgcctggtggtgtggaacaatcattttgaaatttctgacatctaaaatcttaggcgtttcagaccatatttgcctgagtgatcttatagcagccggaatcttaaggtatacagattttgatactttaaaatacacctgttctcccgaatttgacttcatggaaaaagcgactctgctgatatacacaaagacattattgcttccagttgttatggtgattacatgttttatctttaaaaagactgttggtgatatttcgcgtgttttagctacaaacgtttatctaagaaaacagctccttgaacacagtgagctggcttttcacacattgcagttgttagcatttactgcccttgccattttaattttgaggctaaagctgtttttgacacagcacatgtgtgttatggcttccttgatatgctcttgacggctctttggctggctttttcgcagagttcgcagagagaatgttatctttggcattctaacagtgatgtcaatacaaggttatgcaaacctctgtaatcaatggagcataacaggagaatttaatgatttgcctcaggaagaacttttacagtggatcaaatacaataccgtaccagatgctgtctttgcaggtgccatgcctacaatggcaagtgtcaagctgtctacacttcatcccattgtgaatcatccacattacgaagatgcagacttgagggcttggacaaaaatagtttattctacatatagtggaaaatctgccaaagaagtaagagataaattgttggagttacatgtgaattattatgttttagaagaggcatggtgtgttgtgagaactaagcctggttgcagcatgcttgaaatctgggatgtggaagacccttccaatgcagctaaccctcccttatgtagcgtcctccttgagccgagattgtgccactgcactccagcctgggcgacaaatcaagaccccgtctccaaaaaaaaaaaaaacaaaacttgattgggatccaaaatcatacaactatacactaaaatcagtgaatattaccttatgtaaattaaaaattaggaaatcaaaagaaaagcatacatataaaaaacagttttttctaagc

SEQ ID NO: 417 - DNA, 2389 bp, Artificial
  cDNA Sequence
agtgtacacagtcctggaggaactgagtccaggaaccatcgtggccaatatcacagcggaggatcctgatgatgaaggttttcccagccacctcctctacagcattaccactgttagcaaatatttcatgataaatcagttgactggtacaatccaagtggcccaaaggatagaccgagatgcaggtgaattgagacaaaatcccaccatttccctggaagttctagtgaaggacagaccatatgggggtcaggagaatcgcatccagataaccttcattgtggaagacgtcaacgacaatcctgccacatgccaaaagttcaccttcagcattatggtgccggaaagaacagccaaggggacgttgcttcttgacctaaacaagttctgctttgatgatgacagtgaggcaccaaacaacagattcaacttcaccatgccatctggagtggggagcggcagcagatttttacaggatccagctggctctgggaagattgtgctgattggtgatctagactacgaaaatccaagtaacctagcagccggcaataaatatacggtgataatccaggtgcaggatgtggcccccccttactataaaagcaagtatcattttgttttatttcatgattataacgtctacgtttatatcctaacaagcccagaaaatgagtttcctctcatttttgataggccatcctatgtatttgatgtgtcagaaagaaggcccgcccagggtcacctatcaggtcctgaggaaaaacgtttactctccatctgcatggtacgtgccgtttgtcatcactttgggctccatattgcttctgggtctcctcgtgtacctggtcgtcctattggccaaagccatccacagacactgcccctgcaagactgggaagaacaaggaacctctgtaagttgccaaaacgaagactgcagagagagacgtcgtggtggaaactatccagatgaacactatctttgatggagaagccatagatccaggtgaccggggaaacatatgaattcaactcaaaaactggagccagaaagtggaaagatccactaacccaaatgccaaaatggaaagagtccagccaccagggagctgccccacgcagagtcactgctggggaagggatggggtcactgagaagtgccaactgggaagaagatgagctgagtggcaaagcgtgggctgaggatgctggtctgggttccagaaatgagggtggcaagctgggcaacccaaagaacagaaatccagccttcatgaacagggcttaccccaaaccacacccaggaaagtaaacggggtctaaggaggggcctgtcaatcactgagatgctgcctcaccctaaattctatggggatggtgtgggcatggtgtaggggggaaaatgtgggctgaggggattcagacatccagggtcaaacatgggatgtttgacaaatttttaaacaaatagaaaggggtttgatcacatagttgcgtgttctgaaatgatacaggaacattttctatcagatttcagaactacctgtgcttctgataagcaagactgttaactttggggtgtggaattgttgtgtttcttctttgcattgactgctaggaagctctattctgttcaccatagaaagtttgtaggaattcctgacataaatagtgaagactatccttacatctggtttccaccttattttcctgccctcgttttaacatcacccagatttcttcagttataaatatgccatacacctttgtaagtcacctcaaatcttcttcaaaagaagcagaacagtgaaaaaaacagatgagtaagttaagagttggtcatctggaaagaagaaaactcagtaggcaccttcttttgttttttcttgtggtgtccggatcagcatcctgcatgtgagattcatccacgttgtcctgtctagcagtagttcagttctcttcatggttatgtctggtttcattctatgattatatcacaatttatctattctacacttgggtggcagctgcttcagattttttacttttaaaaaatatacttaaaagtgaactacaggcagggcatgatggctcatgcctgtaatgccagcactttgccaaggtgggcagatcacctaaggtcaggagttcaagatcagcctggcctagatggcaaaaccctgtctctactaaaaaatacaaaaattagcttggtgtggtggtgggcacatgtaatcccagctacttgggaggctgaggtagggagaactgcttaaacctgagaggtggaggttacagtgagttgagattgtgccactgcactctagcctgggtgacaaagcaagactccatctcagaaaaaaaaaataaaagtgaattacaacact

SEQ ID NO: 418 - DNA, 3415 bp, Artificial
  cDNA Sequence
taaatggcagccaatggagggtggtgttgcgcggggctgggattagggccggggcgaatggctggcaatcttactgggattacagaacaaagagcctccccgcgctcccgctctccgctcctctccccgcgccgccccgccctccgccgcagcccgcgccgggggtgggggccgccgagcgccagccccccggccggccgattccccccccgcgccccctccccgcgcctccctccccgccctcgccgcgccgccgtcctcgcctccctctgcctctccttcccccattctcccggattaattaaggaggcagcggcaggaggctgagtcctggccgcgggccggggccggggcgccgctggcaggagcgcttggggatcctccaaggcgaccatggccttgctgggtaagcgctgtgacgtccccaccaacggctgcggacccgaccgctggaactccgcgttcacccgcaaagacgagatcatcaccagcctcgtgtctgccttagactccatgtgctcagcgctgtccaaactgaacgccgaggtggcctgtgtcgccgtgcacgatgagagcgcctttgtggtgggcacagagaaggggagaatgttcctgaatgcccggaaggagctacagtcagacttcctcaggttctgccgagggcccccgtggaaggatccggaggcagagcaccccaagaaggtgcagcggggcgagggtggaggccgtagcctccctcggtcctccctggaacatggctcagatgtgtaccttctgcggaagatggtagaggaggtgtttgatgttctttatagcgaggccctgggaagggccagtgtggtgccactgccctatgagaggctgctcagggagccagggctgctggccgtgcaggggctgcccgaaggcctggccttccgaaggccagccgagtatgaccccaaggccctcatggccatcctggaacacagccaccgcatccgcttcaagctcaagaggccacttgaggatggcgggcgggactcgaaggccctggtggagctgaacggtgtctccctgattcccaaggggtcacgggactgtggcctgcatggccaggcccccaaggtgccaccccaggacctgcccccaaccgccacctcctcctccatggccagcttcctgtacagcacggcgctccccaaccacgccatccgagagctcaagcaggaagcaccttcctgcccccttgcccccagcgacctgggcctgagtcggcccatgccagagcccaaggccaccggtgcccaagacttctccgactgttgtggacagaagcccactgggcctggtgggcctctcatccagaacgtccatgcctccaagcgcattctcttctccatcgtccatgacaagtcagagaagtgggacgccttcataaaggaaaccgaggacatcaacacgctccgggagtgtgtgcagatcctgtttaacagcagatatgcggaagccctgggcctggaccacatggtccccgtgccctaccggaagattgcctgtgacccggaggctgtggagatcgtgggcatcccggacaagatccccttcaagcgcccctgcacttatggagtccccaagctgaagcggatcctggaggagcgccatagtatccacttcatcattaagaggatgtttgatgagcgaattttcacagggaacaagtttaccaaagacaccacgaagctggagccagccagcccgccagaggacacctctgcagaggtctctagggccaccgtccttgaccttgctgggaatgctcggtcagacaagggcagcatgtctgaagactgtgggccaggaacctccggggagctgggcgggctgaggccgatcaaaattgagccagaggatctggacatcattcaggtcaccgtcccagacccctcgccaacctctgaggaaatgacagactcgatgcctgggcacctgccatcggaggattctggttatgggatggagatgctgacagacaaaggtctgagtgaggacgcgcggcccgaggagaggcccgtggaggacagccacggtgacgtgatccggcccctgcggaagcaggtggagctgctcttcaacacacgatacgccaaggccattggcatctcggagcccgtcaaggtgccgtactccaagtttctgatgcacccggaggagctgtttgtggtgggactgcctgaaggcatctccctccgcaggcccaactgcttcgggatcgccaagctccggaagattctggaggccagcaacagcatccagtttgtcatcaagaggcccgagctgctcactgagggagtcaaagagcccatcatggatagtcaaggaactgcctcctcacttggcttctctccccctgccctgcccccagagagggattccggggaccctctggtggacgagagcctgaagagacagggctttcaagaaaattatgacgcgaggctctcacggatcgacatcgccaacacactaagggagcaggtccaggaccttttcaataagaaatacggggaagccttgggcatcaagtacccggtccaggtcccctacaagcggatcaagagtaaccccggctccgtgatcatcgaggggctgcccccaggaatcccgttccgaaagccctgtaccttcggctcccagaacctggagaggattcttgctgtggctgacaagatcaagttcacagtcaccaggcctttccaaggactcatcccaaagcctgatgaagatgacgccaacagactcggggagaaggtgatcctgcgggagcaggtgaaggaactcttcaacgagaaatacggtgaggccctgggcctgaaccggccggtgctggtcccttataaactaatccgggacagcccagacgccgtggaggtcacgggtctgcctgatgacatccccttccggaaccccaacacgtacgacatccaccggctggagaagatcctgaaggcccgagagcatgtccgcatggtcatcattaaccagctccaaccctttgcagaaatctgcaatgatgccaaggtgccagccaaagacagcagcattcccaagcgcaagagaaagcgggtctcggaaggaaattccgtctcctcttcctcctcgtcttcctcttcctcgtcctctaacccggattcagtggcatcggccaaccagatctcactcgtgcaatggccaatgtacatggtggactatgccggcctgaacgtgcagctcccgggacctcttaattactagacctcagtactgaatcaggacctcactcagaaagactaaaggaaatgtaatttatgtacaaaatgtatattcggatatgtatcgatgccttttagtttttccaatgatttttacactatattcctgccaccaaggccttttt

SEQ ID NO: 419 - DNA, 3715 bp, Artificial
  cDNA Sequence
tttccctttatagcaccattgaatcccagtcctaacagaagtactgcgaatcttgtggcctcattctgaacaaaagggattagagaagaaaaatctcttgatataaggcttgaaagcaagggcaggcaatcttggttgtgaatattttctgatttttccagaaatcaagcagaagattgagctgctgatgtcagttaactctgagaagtcgtcctcttcagaaaggccggagcctcaacagaaagctcctttagttcctcctcctccaccgccaccaccaccaccaccgccacctttgccagaccccacacccccggagccagaggaggagatcctgggatcagatgatgaggagcaagaggaccctgcggactactgcaaaggtggatatcatccagtgaaaattggagacctcttcaatggccggtatcatgttattagaaagcttggatgggggcacttctctactgtctggctgtgctgggatatgcaggggaaaagatttgttgcaatgaaagttgtaaaaagtgcccagcattatacggagacagccttggatgaaataaaattgctcaaatgtgttcgagaaagtgatcccagtgacccaaacaaagacatggtggtccagctcattgacgacttcaagatttcaggcatgaatgggatacatgtctgcatggtcttcgaagtacttggccaccatctcctcaagtggatcatcaaatccaactatcaaggcctcccagtacgttgtgtgaagagtatcattcgacaggtccttcaagggttagattacttacacagtaagtgcaagatcattcatactgacataaagccggaaaatatcttgatgtgtgtggatgatgcatatgtgagaagaatggcagctgaggccactgagtggcagaaagcaggtgctcctcctccttcagggtctgcagtgagtacggctccacagcagaaacctataggaaaaatatctaaaaacaaaaagaaaaaactgaaaaagaaacagaagaggcaggctgagttattggagaagcgcctgcaggagatagaagaattggagcgagaagctgaaaggaaaataatagaagaaaacatcacctcagctgcaccttccaatgaccaggatggcgaatactgcccagaggtgaaactaaaaacaacaggattagaggaggcggctgaggcagagactgcaaaggacaatggtgaagctgaggaccaggaagagaaagaagatgctgagaaagaaaacattgaaaaagatgaagatgatgtagatcaggaacttgcgaacatagaccctacgtggatagaatcacctaaaaccaatggccatattgagaatggcccattctcactggagcagcaactggacgatgaagatgatgatgaagaagactgcccaaatcctgaggaatataatcttgatgagccaaatgcagaaagtgattacacatatagcagctcctatgaacaattcaatggtgaattgccaaatggacgacataaaattcccgagtcacagttcccagagttttccacctcgttgttctctggatccttagaacctgtggcctgcggctctgtgctttctgagggatcaccacttactgagcaagaggagagcagtccatcccatgacagaagcagaacggtttcagcctccagtactggggatttgccaaaagcaaaaacccgggcagctgacttgttggtgaatcccctggatccgcggaatgcagataaaattagagtaaaaattgctgacctgggaaatgcttgttgggtgcataaacacttcacggaagacatccagacgcgtcagtaccgctccatagaggttttaataggagcggggtacagcacccctgcggacatctggagcacggcgtgtatggcatttgagctggcaacgggagattatttgtttgaaccacattctggggaagactattccagagacgaagaccacatagcccacatcatagagctgctaggcagtattccaaggcactttgctctatctggaaaatattctcgggaattcttcaatcgcagaggagaactgcgacacatcaccaagctgaagccctggagcctctttgatgtacttgtggaaaagtatggctggccccatgaagatgctgcacagtttacagatttcctgatcccgatgttagaaatggttccagaaaaacgagcctcagctggcgaatgccttcggcatccttggttgaattcttagcaaattctaccaatattgcattctgagctagcaaatgttcccagtacattggacctaaacggtgactctcattctttaacaggattacaagtgagctggcttcatcctcagacctttattttgctttgaggtactgttgtttgacattttgctttttgtgcactgtgatcctggggaagggtagtcttttgtcttcagctaagtagtttactgaccattttcttctggaaacaataacatgtctctaagcattgtttcttgtgttgtgtgacattcaaatgtcatttttttgaatgaaaaatactttcccctttgtgttttggcaggttttgtaactatttatgaagaaatattttagctgagtactatataatttacaatcttaagaaattatcaagttggaaccaagaaatagcaaggaaatgtacaattttatcttctggcaaagggacatcattcctgtattatagtgtatgtaaatgcaccctgtaaatgttactttccattaaatatgggagggggactcaaatttcagaaaagctaccaagtcttgagtgctttgtagcctatgttgcatgtagcggactttaactgctccaaggagttgtgcaaacttttcattccataacagtcttttcacattggattttaaacaaagtggctctgggttataagatgtcattctctatatggcactttaaaggaagaaaagatatgtttctcattctaaaatatgcattataatttagcagtcccatttgtgattttgcatatttttaaaagtacttttaaagaagagcaatttccctttaaaaatgtgatggctcagtaccatgtcatgttgcctcctctgggcgctgtaagttaagctctacatagattaaattggagaaacgtgttaattgtgtggaatgaaaaaatacatatatttttggaaaagcatgatcatgcttgtctagaacacaaggtatggtatatacaatttgcagtgcagtgggcagaatacttctcacagctcaaagataacagtgatcacattcattccataggtagctttacgtgtggctacaacaaattttactagctttttcattgtctttccatgaaacgaagttgagaaaatgattttccctttgcaggttgcacacagttttgtttatgcatttccttaaaattaattgtagactccaggatacaaaccatagtaggcaatacaattttagaatgtaatatatagaggtatatttagcctcttttagaagtcagtggattgaatgtctttttattttaaattttacattcattaaggtgcctcgtttttgactttgtccattaacatttatccatatgcctttgcaataactagattgtgaaaagctaacaagtgttgtaacaataatccattgtttgaggtgcttgcagttgtcttaaaaattaaagtgttttggtttttttttttcc

SEQ ID NO: 420 - DNA, 696 bp, Artificial
  cDNA Sequence
atgaagaggcggcggcgccggcgcccggtcgccccggccacggccgcccggggcggcgactttagggcagaagacggggctgggttggaggcgcgggaggagaaggtggtgtactcgcggtcgcaactgtcgctggctgacagcaccaaggcgctgggcgacgccttcaagctcttcatgccccgcagcacggagttcatgagctcggacgcggagctctggagcttcctctgcagcctcaagcaccagttctccccgcacatcctgcgcagcaaggacgtctacggctactcctcctgccgggccctggtacccgaccccccggggccccctacagcccgcggccaggcgcgccggccggttccgcgcgcagcggccaggaggaggcgccgcggagcccgggcggccgctgcccgcaggaggaagccccggccgccacccccaccgccgccgccccccgaggagagctgcccggccaagcccgtggcccccgggccctgcttcgggggccgcaccttggaggagatctggagggcggccaccccgacgctgaccaccttccccaccatccgcgtcggcagcgacgtgtggggcgagcgcagcctggcggcagcgcggcgcagggcgcgccaggtcctgcgagtgaacctggaacccatggtgaggctccgccgcttcccggtgccccgggcatga

SEQ ID NO: 421 - DNA, 4648 bp, Artificial
  cDNA Sequence
ggagtttctctctgtggccaccaccgccccaggcccacagcaagtactgcctggctactgccagtgttcactcaaggaccaagggctcttcattcagtgtttgattggagcatatgatcaacaaatatgggaaaaatctgttgaacagagagaaatcaaggggctaaggaataaaccaaagaaaacagcacatgtgaaaccagacctcatagatgttgatcttgtaagagggtctgcatttgcaaaggcaaagcctgaaagtccttggacttctctgaccagaaagggaattgttcgagttgtatttttcccctttttcttccggtggtggttacaagtaacatcaaaggtcatctttttctggcttcttgtcctttatcttcttcaagttgctgcaatagtattattctgctccacttctagcccacacagcatacctctgacagaggtgattgggccgatatggctgatgctgctcctgggaactgtgcattgccagattgtttccacaagaacacccaaacctcctctaagtacagggggtaaaagaagaaggaaattaagaaaagcagcccatttggaagtacatagggaaggagatggttctagtaccacagataacacacaagagggagcagttcagaaccacggtacaagcacctctcacagcgttggcactgtcttcagagatctctggcatgctgctttctttttatcaggatcaaagaaagcaaagaattcaattgataaatcaactgaaactgacaatggctatgtatcccttgatgggaagaagactgttaaaagcggtgaagatggaatacaaaaccatgaacctcagtgtgaaactattcgaccagaagagacagcctggaacacaggaacactgaggaatggtcctagcaaagatacccaaaggacaataacaaatgtctctgatgaagtctccagtgaggaaggtcctgaaacaggatactcattacgtcgtcatgtggacaggacttctgaaggtgttcttcggaatagaaagtcacaccattataagaaacattaccctaatgaggacgcccctaaatcgggtactagttgcagctctcgctgttcaagttccagacaggattctgagagtgcaaggccagaatctgaaacagaagatgtgttatgggaagacttgttacattgtgcagaatgccattcatcttgtaccagtgagacagatgtggaaaatcatcagattaatccatgtgtgaaaaaagaatatagagatgacccttttcatcagagtcatttgccctggctccatagttcccacccaggattagaaaaaataagtgctatagtatgggaaggtaatgattgtaagaaagcagacatgtctgtacttgaaatcagtggaatgataatgaacagagtgaacagccatataccaggaataggataccagatttttggaaatgcagtctctctcatactgggtttaactccatttgttttccgactttctcaagctacagacttggaacaactcacagcacattctgcttcagaactttatgtgattgcatttggttctaatgaagatgtcatagttctttctatggttataataagttttgtggttcgcgtgtctcttgtgtggattttcttttttttgctctgtgtagcagaaagaacttataaacagcgattactttttgcaaaactctttggacatttaacatctgcaaggagggctcgaaaatctgaggttcctcatttccggttgaagaaagtacagaatataaaaatgtggctatctctccgttcctatcttaagcgtcgaggtcctcagcgatcagttgatgtaatagtttcatctgctttcttattgactatctcagttgtatttatctgttgtgcccagctacttcatgtacacgagatcttccttgattgtcactacaattgggaattggtaatctggtgcatctcgttaacactttttctcctaagatttgttacccttggatcagaaacaagtaaaaaatatagtaatacctcaatattacttactgaacagataaacctctacttgaaaatggagaaaaaacctaacaaaaaggaggaactgacactagtgaataatgttttaaaactggctactaaactgctaaaggagttggacagtccttttagattatatgggcttacaatgaatccgctgctttataacatcacccaggttgttatcctgtcagctgtttctggtgttatcagtgacttgcttggatttaatttaaagctatggaagattaagtcatgacaattcaaagaaaagaagatgtagcctcttttccagaataagagtactgactaagctgcctgaaagcttgtcactgattctttgcttcaggagtctcagctagggagttgaagtgtttacatcagactgtcttgtgcaattcttatatttattttactggttcacttttttttacatttattttagtctttatatttttatttttaagcattgatgtacttagttgttgaaagggtgatgaaactgatatccagatacttgagatcctggtaattggtcataaataattggcaaaataacaaattgtgaaaatagaagccattgctcagcaccgtttctccatcaatgccgtgaacttgccttacttgaggaaaaattctttaactttggaatattgcattgaactcagctatacacataaaacattttctttggtaaatcaagatccagtcagggtttctcttgaattattttggaacaatgccaggatccaaactgattaagttacagtttaagcacccttcagtattaatatatacggtattatataacaggtcaacaagtgctctttgatgataaaacttgtaatagagcaataattgtaaatggttaccatactgtaagatattttgataaaaattaactagtaatacttgtatttatttgaaacactgggctgtttgcacagctccaactgtgcatgctcaaaatgtgcactttttaaaattgttacttttaatgcgtatctttatatgggatctgttatagtatactagggcatgatatggtatccttttgagtgaggtatatactcatctcacaagtgaagtgcctactgatattactaaagtacattatgtttactcaagtaaataattttctccccatggtacactctagtgtaggctattcataccacactgaaatgaacaactgaagaataaggctaagaaccaataaaatatttctctaattgctagttgtaaaactgtatccaaattttcagaaaagacagcttcagcttgcaaattctatcctctaaacttatctggtgcattctccccaccccacccccattatataagggctattttagatgcttttaacctccccaacaaataatttgccaagtgtccaatgagaacttatcatgttggtgtgttaggtaaatcgggcaaatatgatagtgtcttacattgggccttgattttaagttgttatatttgtacaatcgagtattttagaaattacatgaaacatgaaacagtttttgcaattttttttaaactgggcatctggtttctaaaaatttatttgaaacaatctagaattttcttggtgcaaagtgtatcatgtggaatatcctcatatttttaccatattttaagaactttaagacgattaattgtaaataatttatttgattggtgcagttctaatccctaaatcataatcttaaaatcaggaatgtgtggagaacagagccatgtcatatcactttgctcttaccattccttttgatcagcctcaattcagcctcattgtgtagtatgttttttctttctatgaaaaacaacagaaagcatttcattttatttgcctatgttcaaatatgtttaataatgaccaaagtgcattctgagttttttcaaggaatgtaatactggagctttaagaacatacttagtttctcatgtgaaaacttaggctttgtctgatgtttttccttcctctattgtctaatgttgaggttgtttttaggaattatgttttataaactttttcaatataaggtacatgcctatacagaacttaacattttgcacagaatatatcaaatatattttgagaaaaaaagtacggcatgagttctgttaggaataaaagatgaaactattgtatctcacaaaaaatcttatttcagaatggaaatatttttgagaaaagtagctgagtatactggtttaagaaaatgcttgttttagattgaggttaacttagagttgggagttgatttattaagtacagtatacctctcaacagtttataaataatatgttgaattatgtcagtgtgggcagcagtagaatactaaaaggaaaatgtcatgttaagcaatttcagaacattaactgaactattttcaaagcagaaaaattgacattgctgcctttaagaataccatgaatgtaagaaattgaaagaaattgtaaaatatcacataatatagaaatggcagttcaaagagaattgtggcagatgttgtgtgtgaactgttgtttctttgccacatgtgttgtatttgaaagttttacagtaagtttaaaataaaacattctgtgactg

SEQ ID NO: 422 - DNA, 5554 bp, Artificial
  cDNA Sequence
cggctcggccgcggggcgcgcaggcggctgctgggcggcctcggtgcgcgcctcccgccttcccagagacgtggcgcgaggcccgggccctgagcacctatcgcggggatccccggcgccaggagggggtgcagccggtgggcagcgccgcgcagggaggggccgcagcatcctcgccccccagcgcgcccgggcccgagaggaggaggccggggctctccgggcctcccgccgcttagcctgatgctggaaggacgaaggtgagtgaagatggcagagaggacgtgaccagcactcacccttgtccacctgcccagtggcaccgccatgcagaagcccagcggcctgaagccccccggccgtggggggaagcactccagccccatgggccggacatctactgggtcagcttcatcctcggcggcggtggccgctagctccaaggaaggctccccactgcacaaacagtcatctggaccctcctcctccccggccgcagctgctgcccccgagaagccgggccccaaggcggcggaagtgggggatgacttcctgggggactttgtggtgggcgagcgggtgtgggtgaacggcgtgaagccaggcgtggtgcagtatctgggagagacgcagttcgcaccgggccagtgggctggcgtggtgctggacgacccggtgggcaagaatgatggcgcggtgggcggcgtgcgctacttcgagtgcccggccctccagggtatcttcacgcggccctccaagctgacccggcagcccacggccgagggctcggggagtgatgcccactccgtggagtcgctgactgcccagaacctgtcattgcattcgggcacggccacgcccccgctgaccagccgcgtcatccccctgcgggagagcgtcctcaacagctccgtgaagactggcaacgagtcgggatccaacctctcagacagcggctctgtgaagcggggcgaaaaggacctgcgcctgggggaccgcgtgctggttggcgggacgaagactggcgtggtgcggtacgtgggggagacagactttgccaagggcgagtggtgtggcgtggagctggacgagccccttgggaagaatgatggggcggtggcgggcaccaggtacttccagtgcccacccaagtttggtctcttcgcgcccatccacaaagtgatccgtatcggcttcccatctaccagcccagccaaggccaagaagaccaagcgtatggccatgggtgtgtcagcactgacccacagtcccagcagttcctccatcagctccgtcagctctgtggcctcctccgtggggggtcggcccagccgcagtggcctgctcacggagacctcttcacgctacgcccgcaagatctcgggcaccacggccttgcaggaggcactgaaggagaagcagcagcacattgagcagctgctggctgaacgagacctggaacgggctgaggtggccaaggccacaagccacatctgcgaggtggagaaggagattgccctgctcaaggcacagcatgagcagtatgttgcagaagccgaggagaagctgcagcgagcccggctgctcgtggagagcgtgcggaaagagaaggtggacctgtccaaccagctggaggaggagaggaggaaggtggaggatctgcagttccgcgtggaggaggagtccatcaccaagggagacctggagacccagacgcagctggagcacgcgcgcattggggagctggaacagagcctgctactggagaaggcgcaggccgagcggctgctccgagaattagcggacaacaggctgaccacagtggccgagaagtcgcgcgtgctgcagctggaggaggagctcaccctgcgccgaggtgaaatcgaggagctccagcagtgcctgttgcactcgggtcccccacctccggaccacccagacgccgccgagatcctgcggctacgggagcggctgctctcggccagcaaggaacaccagagggagagtggggtgctgcgggataaatacgagaaggccctgaaggcctaccaggcggaggtggacaagctccgcgcggccaacgagaagtacgcacaggaggtggcgggcctgaaggacaaggttcagcaggccaccagcgagaacatggggctaatggacaactggaaatccaagctggactcgctggcctcggaccaccagaagtccctggaggacctcaaagccaccctgaactcgggcccaggcgcccagcagaaggagatcggcgagctgaaggcagtgatggagggcatcaagatggagcaccagctggagctgggtaacttgcaggccaagcatgacctggagaccgccatgcacgtgaaggagaaggaggccctgcgagagaagctgcaggaggcccaggaggagctggctgggctgcagcggcactggcgggcccagctggaggtgcaagccagccagcaccggctggagctgcaggaggcccaggaccagcgccgggatgccgagctgcgtgtgcacgagctggaaaaactggacgtggagtaccggggccaggcgcaggctatcgagttcctcaaggagcagatctcgctggccgagaagaagatgttggactacgagcggctgcagcgggcagaagcccagggcaaacaggaggtcgagagtttgcgggagaagctcctggtggctgagaacagactccaggcggtcgaggccctgtgctcctcccagcacacccacatgattgagtcgaatgacatttcagaggagacgatcaggacgaaggaaactgtggagggcctgcaggacaagctgaacaagagggacaaagaggtgacagccttgacctcccagaccgagatgctcagggcccaagtaagtgcgctggagagcaagtgtaagtcaggcgagaagaaggtggacgccctcctgaaggagaagcggcgcctggaggcagagctggagaccgtgtcccggaagacccatgacgcctcgggccagctagtcctcatcagccaggagctgctgcggaaggagcggagcctgaacgaactgcgggtgttgctgctggaggccaatcgtcactccccagggccggagagggacctgagccgtgaggtacacaaggctgagtggcggatcaaggagcagaaactcaaggatgacatccggggcctgcgtgaaaagctgaccgggctggacaaagagaaatccctgtcggatcagaggcgctactccctcatcgaccggtcctcggcgcccgagcttctgcggctgcagcaccagctgatgagcacggaggacgccctgcgggatgcgctggaccaggctcagcaggtggagaagctgatggaggccatgaggagctgccctgacaaggcccagaccatcggcaattccggttctgcaaacggcatccaccagcaggacaaagctcagaaacaagaggacaagcactgatcctgaggggatactgtggagcagcccagtccacaccagagccccacgcggctgcccggcagtacctcctccaggcaggagccgggactgtcactttggagacaaaacagtgtttgtaacaataacgtactcaccgccgcggacaatcccccaccccgatccctcgccagaccaggacgcttcctcaagcccagccttctacagagagtgtgaacggtacagccccggcctgacccggggaccttcagcctggacacccggcagcttctggagtttgtcagtggaggcagaggggatccggccaggcccctctgtccagaaggagctgccctgaggaccatcttagcggccctgtcctctttttccgcccattctccctcgggtctccccagaggggccggcgggggctggggagggggtaagtttatccatgcagacaccaagggggagcatccagtctttaagagccaagtgggggccccttttccgaagccacttccaggccaaggcagtcgccagggcttcttgtccccaccttctgaaccttcttcaaacagtagtacaagctcccctcagccagcctgcctgcccagcgaggcccccaggttcaaggtgttggcgggggcggagggcaggggaacgggatccttctcccgctgcccaccaacaccaacacacacacacctctaagctgctggccgaagatgtcaccaaggccaaagacacagtattatgaaggtttggaaacccctctcctcacctcccaccgtgaccttgggcaaaccctggctcggagcccagggcagaggcagctcagagtggaggctctaggcaggtttgacaaaggtcagtaatacggtttcccctggggttgaccagatgttccaaaatatctgcatccacctggagatgcagctaagtgggtccttatgtacacaccacgttcacacacacacagagggaccacgtgtgcacgcatgaccgtgtgggtggcggcgtttgctgtgaaccacgctcaggccacacagagacacatacttggtttctgggactgagacccaggcctggcaggaccgtgcctacagatactgcaaacgttcctacagcctagaggtgcgtatacacacccaagtacacgcagccaggcattcaggggtgtgtttgccacatggagcatcccttcctggtcttgccaggcacctgcacagagcgtctccagccccatctcctaacgggggctgggggtaagagaaatctaactgcgctcccccaacccctcgccctgccatcttcccctcaagcctgctaagttatcccaggcctgtgcgtggtggaaaaagccagccttggccctgcagcctccacctcgccgctgggggaccaacaggttgcttacagctttgcaccccggcatcagcacaggggtccctgccccaccctccggcagctcagggagtgttttcctgtgaggcctcccccatcagtggaccagagggagaagcccgatgccccatcccggctttcccgtaacgcacaggacacgtgtgcaattcataggaacggcccagatcgccctcatgagtgccacctggtacaggtaggtggcgctcacgttcctgcccaaatgcagcccatcggggagtcacagtcagtccccccggcccccctcccagtccctgttggctttcggtagctctcgcatgcagttctattaacagccgtctagaagcgatgctttagtggcctaacccagggtcaaatacagctctttctagcaaaatcaggcagctctgccccatcggtaggggcaccgattagtctactaacagccagaggtccatctagcagggtgccgggaggagctgagcccccggaggtgggctcctggtgacgggtgtccaagaagcggtttccttgggagcttctgcctccgtgggcctctcagcccgccccgtgtggccgcccgggtgtggctcagccatgtcccctccccaggtccttcattcacccctcccctccccacagtggaattgttgaagtgtggcgagtctgtgctcgggacaataaagcttgtgacaggtccagg

SEQ ID NO: 423 - DNA, 5449 bp, Artificial
  cDNA Sequence
cggctcggccgcggggcgcgcaggcggctgctgggcggcctcggtgcgcgcctcccgccttcccagagacgtggcgcgaggcccgggccctgagcacctatcgcggggatccccggcgccaggagggggtgcagccggtgggcagcgccgcgcagggaggggccgcagcatcctcgccccccagcgcgcccgggcccgagaggaggaggccggggctctccgggcctcccgccgcttagcctgatgctggaaggacgaaggtgagtgaagatggcagagaggacgtgaccagcactcacccttgtccacctgcccagtggcaccgccatgcagaagcccagcggcctgaagccccccggccgtggggggaagcactccagccccatgggccggacatctactgggtcagcttcatcctcggcggcggtggccgctagctccaaggaaggctccccactgcacaaacagtcatctggaccctcctcctccccggccgcagctgctgcccccgagaagccgggccccaaggcggcggaagtgggggatgacttcctgggggactttgtggtgggcgagcgggtgtgggtgaacggcgtgaagccaggcgtggtgcagtatctgggagagacgcagttcgcaccgggccagtgggctggcgtggtgctggacgacccggtgggcaagaatgatggcgcggtgggcggcgtgcgctacttcgagtgcccggccctccagggtatcttcacgcggccctccaagctgacccggcagcccacggccgagggctcggggagtgatgcccactccgtggagtcgctgactgcccagaacctgtcattgcattcgggcacggccacgcccccgctgaccagccgcgtcatccccctgcgggagagcgtcctcaacagctccgtgaagactggcaacgagtcgggatccaacctctcagacagcggctctgtgaagcggggcgaaaaggacctgcgcctgggggaccgcgtgctggttggcgggacgaagactggcgtggtgcggtacgtgggggagacagactttgccaagggcgagtggtgtggcgtggagctggacgagccccttgggaagaatgatggggcggtggcgggcaccaggtacttccagtgcccacccaagtttggtctcttcgcgcccatccacaaagtgatccgtatcggcttcccatctaccagcccagccaaggccaagaagaccaagcgtatggccatgggtgtgtcagcactgacccacagtcccagcagttcctccatcagctccgtcagctctgtggcctcctccgtggggggtcggcccagccgcagtggcctgctcacggagacctcttcacgctacgcccgcaagatctcgggcaccacggccttgcaggaggcactgaaggagaagcagcagcacattgagcagctgctggctgaacgagacctggaacgggctgaggtggccaaggccacaagccacatctgcgaggtggagaaggagattgccctgctcaaggcacagcatgagcagtatgttgcagaagccgaggagaagctgcagcgagcccggctgctcgtggagagcgtgcggaaagagaaggtggacctgtccaaccagctggaggaggagaggaggaaggtggaggatctgcagttccgcgtggaggaggagtccatcaccaagggagacctggagctgaccacagtggccgagaagtcgcgcgtgctgcagctggaggaggagctcaccctgcgccgaggtgaaatcgaggagctccagcagtgcctgttgcactcgggtcccccacctccggaccacccagacgccgccgagatcctgcggctacgggagcggctgctctcggccagcaaggaacaccagagggagagtggggtgctgcgggataaatacgagaaggccctgaaggcctaccaggcggaggtggacaagctccgcgcggccaacgagaagtacgcacaggaggtggcgggcctgaaggacaaggttcagcaggccaccagcgagaacatggggctaatggacaactggaaatccaagctggactcgctggcctcggaccaccagaagtccctggaggacctcaaagccaccctgaactcgggcccaggcgcccagcagaaggagatcggcgagctgaaggcagtgatggagggcatcaagatggagcaccagctggagctgggtaacttgcaggccaagcatgacctggagaccgccatgcacgtgaaggagaaggaggccctgcgagagaagctgcaggaggcccaggaggagctggctgggctgcagcggcactggcgggcccagctggaggtgcaagccagccagcaccggctggagctgcaggaggcccaggaccagcgccgggatgccgagctgcgtgtgcacgagctggaaaaactggacgtggagtaccggggccaggcgcaggctatcgagttcctcaaggagcagatctcgctggccgagaagaagatgttggactacgagcggctgcagcgggcagaagcccagggcaaacaggaggtcgagagtttgcgggagaagctcctggtggctgagaacagactccaggcggtcgaggccctgtgctcctcccagcacacccacatgattgagtcgaatgacatttcagaggagacgatcaggacgaaggaaactgtggagggcctgcaggacaagctgaacaagagggacaaagaggtgacagccttgacctcccagaccgagatgctcagggcccaagtaagtgcgctggagagcaagtgtaagtcaggcgagaagaaggtggacgccctcctgaaggagaagcggcgcctggaggcagagctggagaccgtgtcccggaagacccatgacgcctcgggccagctagtcctcatcagccaggagctgctgcggaaggagcggagcctgaacgaactgcgggtgttgctgctggaggccaatcgtcactccccagggccggagagggacctgagccgtgaggtacacaaggctgagtggcggatcaaggagcagaaactcaaggatgacatccggggcctgcgtgaaaagctgaccgggctggacaaagagaaatccctgtcggatcagaggcgctactccctcatcgaccggtcctcggcgcccgagcttctgcggctgcagcaccagctgatgagcacggaggacgccctgcgggatgcgctggaccaggctcagcaggtggagaagctgatggaggccatgaggagctgccctgacaaggcccagaccatcggcaattccggttctgcaaacggcatccaccagcaggacaaagctcagaaacaagaggacaagcactgatcctgaggggatactgtggagcagcccagtccacaccagagccccacgcggctgcccggcagtacctcctccaggcaggagccgggactgtcactttggagacaaaacagtgtttgtaacaataacgtactcaccgccgcggacaatcccccaccccgatccctcgccagaccaggacgcttcctcaagcccagccttctacagagagtgtgaacggtacagccccggcctgacccggggaccttcagcctggacacccggcagcttctggagtttgtcagtggaggcagaggggatccggccaggcccctctgtccagaaggagctgccctgaggaccatcttagcggccctgtcctctttttccgcccattctccctcgggtctccccagaggggccggcgggggctggggagggggtaagtttatccatgcagacaccaagggggagcatccagtctttaagagccaagtgggggccccttttccgaagccacttccaggccaaggcagtcgccagggcttcttgtccccaccttctgaaccttcttcaaacagtagtacaagctcccctcagccagcctgcctgcccagcgaggcccccaggttcaaggtgttggcgggggcggagggcaggggaacgggatccttctcccgctgcccaccaacaccaacacacacacacctctaagctgctggccgaagatgtcaccaaggccaaagacacagtattatgaaggtttggaaacccctctcctcacctcccaccgtgaccttgggcaaaccctggctcggagcccagggcagaggcagctcagagtggaggctctaggcaggtttgacaaaggtcagtaatacggtttcccctggggttgaccagatgttccaaaatatctgcatccacctggagatgcagctaagtgggtccttatgtacacaccacgttcacacacacacagagggaccacgtgtgcacgcatgaccgtgtgggtggcggcgtttgctgtgaaccacgctcaggccacacagagacacatacttggtttctgggactgagacccaggcctggcaggaccgtgcctacagatactgcaaacgttcctacagcctagaggtgcgtatacacacccaagtacacgcagccaggcattcaggggtgtgtttgccacatggagcatcccttcctggtcttgccaggcacctgcacagagcgtctccagccccatctcctaacgggggctgggggtaagagaaatctaactgcgctcccccaacccctcgccctgccatcttcccctcaagcctgctaagttatcccaggcctgtgcgtggtggaaaaagccagccttggccctgcagcctccacctcgccgctgggggaccaacaggttgcttacagctttgcaccccggcatcagcacaggggtccctgccccaccctccggcagctcagggagtgttttcctgtgaggcctcccccatcagtggaccagagggagaagcccgatgccccatcccggctttcccgtaacgcacaggacacgtgtgcaattcataggaacggcccagatcgccctcatgagtgccacctggtacaggtaggtggcgctcacgttcctgcccaaatgcagcccatcggggagtcacagtcagtccccccggcccccctcccagtccctgttggctttcggtagctctcgcatgcagttctattaacagccgtctagaagcgatgctttagtggcctaacccagggtcaaatacagctctttctagcaaaatcaggcagctctgccccatcggtaggggcaccgattagtctactaacagccagaggtccatctagcagggtgccgggaggagctgagcccccggaggtgggctcctggtgacgggtgtccaagaagcggtttccttgggagcttctgcctccgtgggcctctcagcccgccccgtgtggccgcccgggtgtggctcagccatgtcccctccccaggtccttcattcacccctcccctccccacagtggaattgttgaagtgtggcgagtctgtgctcgggacaataaagcttgtgacaggtccagg

SEQ ID NO: 424 - DNA, 3262 bp, Artificial
  cDNA Sequence
gcgccgagccggtttccccgccggtgtccgagaggcgcccccggcccggccgcccccagccccagccccgccgggccccgccccccgtcgagtgcatgaggttgacgctactttgttgcacctggagggaagaacgtatgggagaggaaggaagcgagttgcccgtgtgtgcaagctgcggccagaggatctatgatggccagtacctccaggccctgaacgcggactggcacgcagactgcttcaggtgttgtgactgcagtgcctccctgtcgcaccagtactatgagaaggatgggcagctcttctgcaagaaggactactgggcccgctatggcgagtcctgccatgggtgctctgagcaaatcaccaagggactggttatggtggctggggagctgaagtaccaccccgagtgtttcatctgcctcacgtgtgggacctttatcggtgacggggacacctacacgctggtggagcactccaagctgtactgcgggcactgctactaccagactgtggtgacccccgtcatcgagcagatcctgcctgactcccctggctcccacctgccccacaccgtcaccctggtgtccatcccagcctcatctcatggcaagcgtggactttcagtctccattgaccccccgcacggcccaccgggctgtggcaccgagcactcacacaccgtccgcgtccagggagtggatccgggctgcatgagcccagatgtgaagaattccatccacgtcggagaccggatcttggaaatcaatggcacgcccatccgaaatgtgcccctggacgagattgacctgctgattcaggaaaccagccgcctgctccagctgaccctcgagcatgaccctcacgatacactgggccacgggctggggcctgagaccagccccctgagctctccggcttatactcccagcggggaggcgggcagctctgcccggcagaaacctgtcttgaggagctgcagcatcgacaggtctccgggcgctggctcactgggctccccggcctcccagcgcaaggacctgggtcgctctgagtccctccgcgtagtctgccggccacaccgcatcttccggccgtcggacctcatccacggggaggtgctgggcaagggctgcttcggccaggctatcaaggtgacacaccgtgagacaggtgaggtgatggtgatgaaggagctgatccggttcgacgaggagacccagaggacgttcctcaaggaggtgaaggtcatgcgatgcctggaacaccccaacgtgctcaagttcatcggggtgctctacaaggacaagaggctcaacttcatcactgagtacatcaagggcggcacgctccggggcatcatcaagagcatggacagccagtacccatggagccagagagtgagctttgccaaggacatcgcatcagggatggcctacctccactccatgaacatcatccaccgagacctcaactcccacaactgcctggtccgcgagaacaagaatgtggtggtggctgacttcgggctggcgcgtctcatggtggacgagaagactcagcctgagggcctgcggagcctcaagaagccagaccgcaagaagcgctacaccgtggtgggcaacccctactggatggcacctgagatgatcaacggccgcagctatgatgagaaggtggatgtgttctcctttgggatcgtcctgtgcgagatcatcgggcgggtgaacgcagaccctgactacctgccccgcaccatggactttggcctcaacgtgcgaggattcctggaccgctactgccccccaaactgccccccgagcttcttccccatcaccgtgcgctgttgcgatctggaccccgagaagaggccatcctttgtgaagctggaacactggctggagaccctccgcatgcacctggccggccacctgccactgggcccacagctggagcagctggacagaggtttctgggagacctaccggcgcggcgagagcggactgcctgcccaccctgaggtccccgactgagccagggccactcagctgcccctgtccccacctctggagaatccacccccaccagattcctccgcgggaggtggccctcagctgggacagtggggacccaggcttctcctcagagccaggccctgacttgccttctcccaccccgtggaccgcttcccctgccttctctctgccgtggcccagagccggcccagctgcacacacacaccatgctctcgccctgctgtaacctctgtcttggcagggctgtcccctcttgcttctccttgcatgagctggagggcctgtgtgagttacgcccctttccacacgccgctgccccagcaaccctgttcacgctccacctgtctggtccatagctccctggaggctgggccaggaggcagcctccgaaccatgccccatataacgcttgggtgcgtgggagggcgcacatcagggcagaggccaagttccaggtgtctgtgttcccaggaaccaaatggggagtctggggcccgttttccccccagggggtgtctaggtagcaacaggtatcgaggactctccaaacccccaaagcagagagagggctgatcccatggggcggaggtccccagtggctgagcaaacagccccttctctcgctttgggtcttttttttgtttctttcttaaagccactttagtgagaagcaggtaccaagcctcagggtgaagggggtcccttgagggagcgtggagctgcggtgccctggccggcgatggggaggagccggctccggcagtgagaggataggcacagtggaccgggcaggtgtccaccagcagctcagcccctgcagtcatctcagagccccttcccgggcctctcccccaaggctccctgcccctcctcatgcccctctgtcctctgcgttttttctgtgtaatctattttttaagaagagtttgtattattttttcatacggctgcagcagcagctgccaggggcttgggattttatttttgtggcgggcgggggtgggagggccattttgtcactttgcctcagttgagcatctaggaagtattaaaactgtgaagctttctcagtgcactttgaacctggaaaacaatcccaacaggcccgtgggaccatgacttagggaggtgggacccacccacccccatccaggaaccgtgacgtccaaggaaccaaacccagacgcagaacaataaaataaattccgtactccccaccc

SEQ ID NO: 425 - DNA, 1498 bp, Artificial
  cDNA Sequence
gtcacagccagggagggcagcggggcgcaccaggccgaaggctcacgccacagggagggcagctaggacatggggggaagcgcgttaaaccagggagtcctggaaggggacgacgcccccggccagtccctgtacgagcggttaagtcagaggatgctggacatctcgggggaccggggcgtgctgaaggacgtcatccgagaaggagctggagacctagtggcgcctgatgcttcggtgctagtgaaatactcgggatacctggaacacatggacagacccttcgattctaattactttaggaaaactcctcggctaatgaaacttggagaggatattacactgtggggcatggagctgggccttctgagcatgcggagaggagagctggccaggtttctgttcaaaccgaactacgcctatggaacgctgggctgccctcccttgatccccccaaacaccactgtcctgtttgagattgagctgcttgacttcctggactgtgctgagtcagacaagttttgtgctctctcagctgagcagcaagaccaatttccacttcagaaggtcctgaaagtggcagctacggaacgggagtttggcaactaccttttccgccagaatcgtttctatgatgccaaagtgagatataaaagggccctgttgcttctgcgccggcgatcagcaccccctgaagagcagcacctggtggaggccgccaagcttcctgttctcctgaacctgtcctttacatacctgaagctagaccgacccaccatagccctgtgctatggagagcaggctttgatcattgaccaaaagaatgccaaggccctcttcaggtgtggacaggcttgtcttctcctgactgagtatcaaaaggcccgggattttctagttcgagcccagaaggagcaacccttcaatcatgacatcaataatgagctgaagaaactggctagctgttacagggactatgtggataaagagaaagaaatgtggcaccgcatgttcgcgccctgtggcgatggttctacagcaggagaaagttgaaggttcttcacctaccaacgaggggagagagctgtggttctccatcattgggggagtggaagggagctcccagcgcagccgtggcagccaccttccaggagcaggggctggaatgtcctgtggccgcatctctcatggacgcggctgaaacgtgttttcacaggtgctgttttctgttttccgtgttcgtaacagaagggaggggaaagcgcagctactgacaagtagaacactgctactttttttaaggcagtttcttgtttttttagacggaattagtccttggcttccctcccagtcccagccctgcttccggctgcgaatgtccctgagtcaacaccaatagagattgctttgtgtattttgtagggttctctgttttgaagacagaattatgttacaaatgtttttgttgtaaataaataaaacacttccttgtccttgc

SEQ ID NO: 426 - DNA, 2265 bp, Artificial
  cDNA Sequence
atggcgggtctgacggcggcggccccgcggcccggagtcctcctgctcctgctgtccatcctccacccctctcggcctggaggggtccctggggccattcctggtggagttcctggaggagtcttttatccaggggctggtctcggagcccttggaggaggagcgctggggcctggaggcaaacctcttaagccaggacctcaccccatcctcccctccgcagggctcggcgccttccccgcagttacctttccgggggctctggtgcctggtggagtggctgacgctgctgcagcctataaagctgctaaggctggcgctgggcttggtggtgtcccaggagttggtggcttaggagtgtctgcaggtgcggtggttcctcagcctggagccggagtgaagcctgggaaagtgccgggtgtggggctgccaggtgtatacccaggtggcgtgctcccaggagctcggttccccggtgtgggggtgctccctggagttcccactggagcaggagttaagcccaaggctccaggtgtaggtggagcttttgctggaatcccaggagttggaccctttgggggaccgcaacctggagtcccactggggtatcccatcaaggcccccaagctgcctggtggctatggactgccctacaccacagggaaactgccctatggctatgggcccggaggagtggctggtgcagcgggcaaggctggttacccaacagggacaggggttggcccccaggcagcagcagcagcggcagctaaagcagcagcaaagttcggtgctggagcagccggagtcctccctggtgttggaggggctggtgttcctggcgtgcctggggcaattcctggaattggaggcatcgcaggcgttgggactccagctgcagctgcagctgcagcagcagccgctaaggcagccaagtatggagctgctgcaggcttagtgcctggtgggccaggctttggcccgggagtagttggtgtcccaggagctggcgttccaggtgttggtgtcccaggagctgggattccagttgtcccaggtgctgggatcccaggtgctgcggttccaggggttgtgtcaccagaagcagctgctaaggcagctgcaaaggcagccaaatacggggccaggcccggagtcggagttggaggcattcctacttacggggttggagctgggggctttcccggctttggtgtcggagtcggaggtatccctggagtcgcaggtgtccctggtgtcggaggtgttcccggagtcggaggtgtcccgggagttggcatttcccccgaagctcaggcagcagctgccgccaaggctgccaagtacggagtggggaccccagcagctgcagctgctaaagcagccgccaaagccgcccagtttgggttagttcctggtgtcggcgtggctcctggagttggcgtggctcctggtgtcggtgtggctcctggagttggcttggctcctggagttggcgtggctcctggagttggtgtggctcctggcgttggcgtggctcccggcattggccctggtggagttgcagctgcagcaaaatccgctgccaaggtggctgccaaagcccagctccgagctgcagctgggcttggtgctggcatccctggacttggagttggtgtcggcgtccctggacttggagttggtgctggtgttcctggacttggagttggtgctggtgttcctggcttcggggcaggtgcagatgagggagttaggcggagcctgtcccctgagctcagggaaggagatccctcctcctctcagcacctccccagcaccccctcatcacccagggtacctggagccctggctgccgctaaagcagccaaatatggagcagcagtgcctggggtccttggagggctcggggctctcggtggagtaggcatcccaggcggtgtggtgggagccggacccgccgccgccgctgccgcagccaaagctgctgccaaagccgcccagtttggcctagtgggagccgctgggctcggaggactcggagtcggagggcttggagttccaggtgttgggggccttggaggtatacctccagctgcagccgctaaagcagctaaatacggtgctgctggccttggaggtgtcctagggggtgccgggcagttcccacttggaggagtggcagcaagacctggcttcggattgtctcccattttcccaggtggggcctgcctggggaaagcttgtggccggaagagaaaatga

SEQ ID NO: 427 - DNA, 2055 bp, Artificial
  cDNA Sequence
atggcgggtctgacggcggcggccccgcggcccggagtcctcctgctcctgctgtccatcctccacccctctcggcctggaggggtccctggggccattcctggtggagttcctggaggagtcttttatccaggggctggtctcggagcccttggaggaggagcgctggggcctggaggcaaacctcttaagccaggacctcaccccatcctcccctccgcagggctcggcgccttccccgcagttacctttccgggggctctggtgcctggtggagtggctgacgctgctgcagcctataaagctgctaaggctggcgctgggcttggtggtgtcccaggagttggtggcttaggagtgtctgcaggtgcggtggttcctcagcctggagccggagtgaagcctgggaaagtgccgggtgtggggctgccaggtgtatacccaggtggcgtgctcccaggagctcggttccccggtgtgggggtgctccctggagttcccactggagcaggagttaagcccaaggctccaggtgtaggtggagcttttgctggaatcccaggagttggaccctttgggggaccgcaacctggagtcccactggggtatcccatcaaggcccccaagctgcctggtggctatggactgccctacaccacagggaaactgccctatggctatgggcccggaggagtggctggtgcagcgggcaaggctggttacccaacagggacaggggttggcccccaggcagcagcagcagcggcagctaaagcagcagcaaagttcggtgctggagcagccggagtcctccctggtgttggaggggctggtgttcctggcgtgcctggggcaattcctggaattggaggcatcgcaggcgttgggactccagctgcagctgcagctgcagcagcagccgctaaggcagccaagtatggagctgctgcaggcttagtgcctggtgggccaggctttggcccgggagtagttggtgtcccaggagctggcgttccaggtgttggtgtcccaggagctgggattccagttgtcccaggtgctgggatcccaggtgctgcggttccaggggttgtgtcaccagaagcagctgctaaggcagctgcaaaggcagccaaatacggggccaggcccggagtcggagttggaggcattcctacttacggggttggagctgggggctttcccggctttggtgtcggagtcggaggtatccctggagtcgcaggtgtccctggtgtcggaggtgttcccggagtcggaggtgtcccgggagttggcatttcccccgaagctcaggcagcagctgccgccaaggctgccaagtacgggttagttcctggtgtcggcgtggctcctggagttggcgtggctcctggtgtcggtgtggctcctggagttggcttggctcctggagttggcgtggctcctggagttggtgtggctcctggcgttggcgtggctcccggcattggccctggtggagttgcagctgcagcaaaatccgctgccaaggtggctgccaaagcccagctccgagctgcagctgggcttggtgctggcatccctggacttggagttggtgtcggcgtccctggacttggagttggtgctggtgttcctggacttggagttggtgctggtgttcctggcttcggggcagtacctggagccctggctgccgctaaagcagccaaatatggagcagcagtgcctggggtccttggagggctcggggctctcggtggagtaggcatcccaggcggtgtggtgggagccggacccgccgccgccgctgccgcagccaaagctgctgccaaagccgcccagtttggcctagtgggagccgctgggctcggaggactcggagtcggagggcttggagttccaggtgttgggggccttggaggtatacctccagctgcagccgctaaagcagctaaatacggagtggcagcaagacctggcttcggattgtctcccattttcccaggtggggcctgcctggggaaagcttgtggccggaagagaaaatga

SEQ ID NO: 428 - DNA, 1932 bp, Artificial
  cDNA Sequence
atggcgggtctgacggcggcggccccgcggcccggagtcctcctgctcctgctgtccatcctccacccctctcggcctggaggggtccctggggccattcctggtggagttcctggaggagtcttttatccaggggctggtctcggagcccttggaggaggagcgctggggcctggaggcaaacctcttaagccagggctcggcgccttccccgcagttacctttccgggggctctggtgcctggtggagtggctgacgctgctgcagcctataaagctgctaaggctggcgctgggcttggtggtgtcccaggagttggtggcttaggagtgtctgcaggtgcggtggttcctcagcctggagccggagtgaagcctgggaaagtgccgggtgtggggctgccaggtgtatacccaggtggcgtgctcccaggagctcggttccccggtgtgggggtgctccctggagttcccactggagcaggagttaagcccaaggctccaggagttggaccctttgggggaccgcaacctggagtcccactggggtatcccatcaaggcccccaagctgcctggctatgggcccggaggagtggctggtgcagcgggcaaggctggttacccaacagggacaggggttggcccccaggcagcagcagcagcggcagctaaagcagcagcaaagttcggtgctggagcagccggagtcctccctggtgttggaggggctggtgttcctggcgtgcctggggcaattcctggaattggaggcatcgcaggcgttgggactccagctgcagctgcagctgcagcagcagccgctaaggcagccaagtatggagctgctgcaggcttagtgcctggtgggccaggctttggcccgggagtagttggtgtcccaggagctggcgttccaggtgttggtgtcccaggagctgggattccagttgtcccaggtgctgggatcccaggtgctgcggttccaggggttgtgtcaccagaagcagctgctaaggcagctgcaaaggcagccaaatacggggccaggcccggagtcggagttggaggcattcctacttacggggttggagctgggggctttcccggctttggtgtcggagtcggagccgaagctcaggcagcagctgccgccaaggctgccaagtacgggttagttcctggtgtcggcgtggctcctggagttggcgtggctcctggtgtcggtgtggctcctggagttggcttggctcctggagttggcgtggctcctggagttggtgtggctcctggcgttggcgtggctcccggcattggccctggtggagttgcagctgcagcaaaatccgctgccaaggtggctgccaaagcccagctccgagctgcagctgggcttggtgctggcatccctggacttggagttggtgtcggcgtccctggacttggagttggtgctggtgttcctggacttggagttggtgctggtgttcctggcttcggggcagtacctggagccctggctgccgctaaagcagccaaatatggagcagcagtgcctggggtccttggagggctcggggctctcggtggagtaggcatcccaggcggtgtggtgggagccggacccgccgccgccgctgccgcagccaaagctgctgccaaagccgcccagtttggcctagtgggagccgctgggctcggaggactcggagtcggagggcttggagttccaggtgttgggggccttggaggtatacctccagctgcagccgctaaagcagctaaatacggtgctgctggccttggaggtgtcctagggggtgccgggcagttcccacttggaggagtggcagcaagacctggcttcggattgtctcccattttcccaggtggggcctgcctggggaaagcttgtggccggaagagaaaatga

SEQ ID NO: 429 - DNA, 1803 bp, Artificial
  cDNA Sequence
gtccctggggccattcctggtggagttcctggaggagtcttttatccaggggctggtctcggagcccttggaggaggagcgctggggcctggaggcaaacctcttaagccaggacctcaccccatcctcccctccgcagggctcggcgccttccccgcagttacctttccgggggctctggtgcctggtggagtggctgacgctgctgcagcctataaagctgctaaggctggcgctgggcttggtggtgtcccaggagttggtggcttaggagtgtctgcaggtgcggtggttcctcagcctggagccggagtgaagcctgggaaagtgccggggcctgcaaggcctgccttcctacactcactgctttgtcccccggcaggagctcggttccccggtgtgggggtgctccctggagttcccactggagcaggagttaagcccaaggctccaggtgtaggtggagcttttgctggaatcccaggagttggaccctttgggggaccgcaacctggagtcccactggggtatcccatcaaggcccccaagctgcctggtggctatggactgccctacaccacagggaaactgccctatggctatgggcccggaggagtggctggtgcagcgggcaaggctggttacccaacagggacaggggttggcccccaggcagcagcagcagcggcagctaaagcagcagcaaagttcggtgctggagcagccggagtcctccctggtgttggaggggctggtgttcctggcgtgcctggggcaattcctggaattggaggcatcgcaggcgttgggactccagctgcagctgcagctgcagcagcagccgctaaggcagccaagtatggagctgctgcaggcttagtgcctggtgggccaggctttggcccgggagtagttggtgtcccaggagctggcgttccaggtgttggtgtcccaggagctgggattccagttgtcccaggtgctgggatcccaggtgctgcggttccaggggttgtgtcaccagaagcagctgctaaggcagctgcaaaggcagccaaatacggggccaggcccggagtcggagttggaggcattcctacttacggggttggagctgggggctttcccggctttggtgtcggagtcggaggtatccctggagtcgcaggtgtccctggtgtcggaggtgttcccggagtcggaggtgtcccgggagttggcatttcccccgaagctcaggcagcagctgccgccaaggctgccaagtacggtgctgcaggagcaggagtgctgggtgggctagtgccaggtgccccaggcgcagtcccaggtgtgccgggcacgggaggagtgccaggagtggggaccccagcagctgcagctgctaaagcagccgccaaagccgcccagtttgctcttctcaatcttgcagggttagttcctggtgtcggcgtggctcctggagttggcgtggctcctggtgtcggtgtggctcctggagttggcttggctcctggagttggcgtggctcctggagttggtgtggctcctggcgttggcgtggctcccggcattggccctggtggagttgcagctgcagcaaaatccgctgccaaggtggctgccaaagcccagctccgagctgcagctgggcttggtgctggcatccctggacttggagttggtgtcggcgtccctggacttggagttggtgctggtgttcctggacttggagttggtgctggtgttcctggcttcggggcagtacctggagccctggctgccgctaaagcagccaaatat

SEQ ID NO: 430 - DNA, 1458 bp, Artificial
  cDNA Sequence
atggcgggtctgacggcggcggccccgcggcccggagtcctcctgctcctgctgtccatcctccacccctctcggcctggaggggtccctggggccattcctggtggagttcctggaggagtcttttatccagttacctttccgggggctctggtgcctggtggagtggctgacgctgctgcagcctataaagctgctaaggctggtgctggagcagccggagtcctccctggtgttggaggggctggtgttcctggcgtgcctggggcaattcctggaattggaggcatcgcagctgcagcagcagccgctaaggcagccaagtatggagctgctgcaggcttagtgcctggtgggccaggctttggcccgggagtagttggtgtcccaggagctggcgttccaggtgttggtgtcccaggagctgggattccagttgtcccaggtgctgggatcccaggtgctgcggttccaggggttgtgtcaccagaagcagctgctaaggcagctgcaaaggcagccaaatacggggccaggcccggagtcggagttggaggcattcctacttacggggttggagctgggggctttcccggctttggtgtcggagtcggaggtatccctggagtcgcaggtgtccctggtgtcggaggtgttcccggagtcggaggtgtcccgggagttggcatttcccccgaagctcaggcagcagctgccgccaaggctgccaagtacgggttagttcctggtgtcggcgtggctcctggagttggcgtggctcctggtgtcggtgtggctcctggagttggcttggctcctggagttggcgtggctcctggagttggtgtggctcctggcgttggcgtggctcccggcattggccctggtggagttgcagctgcagcaaaatccgctgccaaggtggctgccaaagcccagctccgagctgcagctgggcttggtgctggcatccctggacttggagttggtgtcggcgtccctggacttggagttggtgctggtgttcctggacttggagttggtgctggtgttcctggcttcggggcagtacctggagccctggctgccgctaaagcagccaaatatggagcagcagtgcctggggtccttggagggctcggggctctcggtggagtaggcatcccaggcggtgtggtgggtgactggctgggtgcacccaccatcaacctggttgacctgtcatggccgcctgtgccctgcctccacccccatcctacactcccccagggcgtgcggggctgtgcagactggggtgccaggcatctcctccccacccggggtgtccccacatgcagtactgtataccccccatccctccctcggtccactgaacttcagagcagttcccattcctgccccgcccatctttttgtgtctcgctgtgatagatcaataaatattttattttttgtcctg

SEQ ID NO: 431 - DNA, 2484 bp, Artificial
  cDNA Sequence
cggcaaatggcggacttcgacacctacgacgatcgggcctacagcagcttcggcggcggcagagggtcccgcggcagtgctggtggccatggttcccgtagccagaaggagttgcccacagagcccccctacacagcatacgtaggaaatctacctttcaatacggttcagggcgacatagatgctatctttaaggatctcagcataaggagtgtacggctagtcagagacaaagacacagataaatttaaaggattctgctatgtagaattcgatgaagtggattcccttaaggaagccttgacatacgatggtgcactgttgggcgatcggtcacttcgtgtggacattgcagaaggcagaaaacaagataaaggtggctttggattcagaaaaggtggaccagatgacagaggcttcagggatgacttcttagggggcaggggaggtagtcgcccaggcgaccggcgaacaggcccccccatgggcagccgcttcagagatggccctcccctccgtggatccaacatggatttcagagaacccacagaagaggaaagagcacagagaccacgactccagcttaaacctcgaacagtcgcgacgcccctcaatcaagtagccaatcccaactctgctatcttcgggggtgccaggcctagagaggaagtcgttcaaaaggagcaagaatgagcctgcggttgggagggaatggggcgtggggggttagagcaggaccacagcctggtgagtccccgggcagccgtcctgcagccgccactcctgcgcctgccattggcctcctcacagcggaaacacagcttgtgagtgcatgtcagctgttaacaagtggtttttagtacattctgggctttgctgtatctatctagtgcctgtttgtgcgtttttttctttcttccgctgcttccccattttccttctgtcctttttctcctgctccttgttttcccagcagcacatggggttcctcggaggagcagaggtggccgccgtgggggggcgtttgggctgcggtgctgcgtcatttttcctttgctttctctttactttagacactggcccaactccaggcgtttcctttcattccctcagtgcttctcttctgacctgcatgttgagttctgtattgctggggcttccaacaaaaaccagagtcactgacagagggaacagcagagaccttgttggtattcagctgtgatggatatagagaatcagaggcaccttgttttcacaactaggataaaaatatctgcagggtcctttccattcctatttagagggagtcctggctccatgaccccctcccgagtggactgtccaagcagataggctcacacgagaaacagtgaggctgaaagggggggctatggaagagcggtagggagtccacggagaagatgcagtgaatgcttgcatgcattcacacgtgtgtgtgtcccagctagttcactcctttcgccgtgcgtggtggaggctggcctctctggctgggtgcagtgaatggccagcgggtttcttttctgctgggccaaggcgctttgggggtggagggggtggtgctggtgctgcactgggctgactgcggcgctgacgcagcgtttccccccatccctgttgcctgtgtgttgtgtggatctgttcctagtataggcaacataatgagatactgtgcttcccacctccccttcagttcagagccaaaatgggtctagaatctggcactttactcatttcctttgataaattgtactatgcagagctgtcaggaaccttcagatagcagtagaggactgcagctgtctaggtctgcggccacatcttggggacacactggactgttcccatgtgcagggttcagcagttatgtgggagtgctaggggttaggcttttgagcttgaacgcctgcgtgtgaacagatgaaaaatccttcagtacccaagtcccagtctgtcctatggggagcagtttgggggcggccggcagcaggagcctgggaaagaggccctcgccaggtgatggcagggccagggtggcctggggcacccagcggaatgtgcttagtatttggtcaccagccgtcatcctgggcttttcctactgtgtcttgttacaaggcctcagcaatccacagaactctctctccttccttccacctgtcagcttctctgcttctgagataagaaccatttgtgtaacaccaacacttaacttcagaaagacatgcattatgtggtgtaatcaaacccgatgctttcagatgacctacttacatcttcaatgtggataagataaagaacaaaacacatgcatctaaactgctgggcaatccagttgacttttaaatgtaagaatggaattccaaacacttaacacattcagctatatgacagaaagtaaatctatggatatggtattttgtgaatgatcttttaaataaaagaaaaccttacgtaatattt

SEQ ID NO: 432 - DNA, 2546 bp, Artificial
  cDNA Sequence
gacggcaaatggcggacttcgacacctacgacgatcgggcctacagcagcttcggcggcggcagagggtcccgcggcagtgctggtggccatggttcccgtagccagaaggagttgcccacagagcccccctacacagcatacgtaggaaatctacctttcaatacggttcagggcgacatagatgctatctttaaggatctcagcataaggagtgtacggctagtcagagacaaagacacagataaatttaaaggattctgctatgtagaattcgatgaagtggattcccttaaggaagccttgacatacgatggtgcactgttgggcgatcggtcacttcgtgtggacattgcagaaggcagaaaacaagataaaggtggctttggattcagaaaaggtggaccagatgacagaggaatgggtagctctcgagaatctagaggtggatgggattcccgggatgacttcaattctggcttcagggatgacttcttagggggcaggggaggtagtcgcccaggcgaccggcgaacaggcccccccatgggcagccgcttcagagatggccctcccctccgtggatccaacatggatttcagagaacccacagaagaggaaagagcacagagaccacgactccagcttaaacctcgaacagtcgcgacgcccctcaatcaagtagccaatcccaactctgctatcttcgggggtgccaggcctagagaggaagtcgttcaaaaggagcaagaatgagcctgcggttgggagggaatggggcgtggggggttagagcaggaccacagcctggtgagtccccgggcagccgtcctgcagccgccactcctgcgcctgccattggcctcctcacagcggaaacacagcttgtgagtgcatgtcagctgttaacaagtggtttttagtacattctgggctttgctgtatctatctagtgcctgtttgtgcgtttttttctttcttccgctgcttccccattttccttctgtcctttttctcctgctccttgttttcccagcagcacatggggttcctcggaggagcagaggtggccgccgtgggggggcgtttgggctgcggtgctgcgtcatttttcctttgctttctctttactttagacactggcccaactccaggcgtttcctttcattccctcagtgcttctcttctgacctgcatgttgagttctgtattgctggggcttccaacaaaaaccagagtcactgacagagggaacagcagagaccttgttggtattcagctgtgatggatatagagaatcagaggcaccttgttttcacaactaggataaaaatatctgcagggtcctttccattcctatttagagggagtcctggctccatgaccccctcccgagtggactgtccaagcagataggctcacacgagaaacagtgaggctgaaagggggggctatggaagagcggtagggagtccacggagaagatgcagtgaatgcttgcatgcattcacacgtgtgtgtgtcccagctagttcactcctttcgccgtgcgtggtggaggctggcctctctggctgggtgcagtgaatggccagcgggtttcttttctgctgggccaaggcgctttgggggtggagggggtggtgctggtgctgcactgggctgactgcggcgctgacgcagcgtttccccccatccctgttgcctgtgtgttgtgtggatctgttcctagtataggcaacataatgagatactgtgcttcccacctccccttcagttcagagccaaaatgggtctagaatctggcactttactcatttcctttgataaattgtactatgcagagctgtcaggaaccttcagatagcagtagaggactgcagctgtctaggtctgcggccacatcttggggacacactggactgttcccatgtgcagggttcagcagttatgtgggagtgctaggggttaggcttttgagcttgaacgcctgcgtgtgaacagatgaaaaatccttcagtacccaagtcccagtctgtcctatggggagcagtttgggggcggccggcagcaggagcctgggaaagaggccctcgccaggtgatggcagggccagggtggcctggggcacccagcggaatgtgcttagtatttggtcaccagccgtcatcctgggcttttcctactgtgtcttgttacaaggcctcagcaatccacagaactctctctccttccttccacctgtcagcttctctgcttctgagataagaaccatttgtgtaacaccaacacttaacttcagaaagacatgcattatgtggtgtaatcaaacccgatgctttcagatgacctacttacatcttcaatgtggataagataaagaacaaaacacatgcatctaaactgctgggcaatccagttgacttttaaatgtaagaatggaattccaaacacttaacacattcagctatatgacagaaagtaaatctatggatatggtattttgtgaatgatcttttaaataaaagaaaaccttacgtaatattt

SEQ ID NO: 433 - DNA, 2654 bp, Artificial
  cDNA Sequence
aggcagcggctgtggagcgcggcggggcggctccgcccagggcagcccgggctgggccaaggagcgagctctcccttctcctgctctcagcctcagtgatcaaggcttcagtgaactgcactggagctcccagcgggggatcttgtcccctgtcccgacttttgtgctgcacattggatctggtgacactcaggaaatgcttgtctccggctgttaaggaataatttcagagtactatggatcatgctgaagaaaatgaaatccttgcagcaacccagaggtactatgtggaaaggcctatctttagtcatccggtcctccaggaaagactacacacaaaggacaaggttcctgattccattgcggataagctgaaacaggcattcacatgtactcctaaaaaaataagaaatatcatttatatgttcctacccataactaaatggctgccagcatacaaattcaaggaatatgtgttgggtgacttggtctcaggcataagcacaggggtgcttcagcttcctcaaggcttagcctttgcaatgctggcagctgtgcctccaatatttggcctgtactcttcattttaccctgttatcatgtattgttttcttggaacctccagacacatatccataggtccttttgctgttattagcctgatgattggtggtgtagctgttcgattagtaccagatgatatagtcattccaggaggagtaaatgcaaccaatggcacagaggccagagatgccttgagagtgaaagtcgccatgtctgtgaccttactttcaggaatcattcagttttgcctaggtgtctgtaggtttggatttgtggccatatatctcacagagcctctggtccgtgggtttaccaccgcagcagctgtgcatgtcttcacctccatgttaaaatatctgtttggagttaaaacaaagcggtacagtggaatcttttccgtggtgtatagtacagttgctgtgttgcagaatgttaaaaacctcaacgtgtgttccctaggcgtcgggctgatggtttttggtttgctgttgggtggcaaggagtttaatgagagatttaaagagaaattgccggcgcctattcctttagagttctttgcggtcgtaatgggaactggcatttcagctgggtttaacttgaaagaatcatacaatgtggatgtcgttggaacacttcctctagggctgctacctccagccaatccggacaccagcctcttccaccttgtgtacgtagatgccattgccatagccatcgttggattttcagtgaccatctccatggccaagaccttagcaaataaacatggctaccaggttgacggcaatcaggagctcattgccctgggactgtgcaattccattggctcactcttccagaccttttcaatttcatgctccttgtctcgaagccttgttcaggagggaaccggtgggaagacacagcttgcaggttgtttggcctcattaatgattctgctggtcatattagcaactggattcctctttgaatcattgccccaggctgtgctgtcggccattgtgattgtcaacctgaagggaatgtttatgcagttctcagatctcccctttttctggagaaccagcaaaatagagctgaccatctggcttaccacttttgtgtcctccttgttcctgggattggactatggtttgatcactgctgtgatcattgctctgctgactgtgatttacagaacacagagtccaagctacaaagtccttggaaagcttcctgaaactgatgtgtatattgatatagacgcatatgaggaggtgaaagaaattcctggaataaaaatatttcaaataaatgcaccaatttactatgcaaatagcgacttgtatagcaatgcattaaaacgaaagactggagtgaacccagcagtcatcatgggagcaaggagaaaggccatgcggaagtacgctaaggaagtcggaaatgcaaatatggccaacgcaactgttgtcaaagcagatgcagaagtagatggagaggatgctaccaagcctgaagaagaggatggtgaagtaaaatatcccccaatagtgatcaaaagcacatttcctgaggaaatgcaaagatttatgcccccaggggataacgtccacactgtcattttggatttcactcaagtcaattttattgattctgttggagtgaaaactctggcagggattgtaaaagaatatggagacgtcggtatatatgtatacttagcaggatgcagtgcacaagttgtgaatgacctcactcggaatagattttttgaaaatcctgccctatgggagctgctgttccacagcattcatgatgcagttttaggcagccaacttagagaggcacttgctgaacaggaagcctcggctcccccttcccaggaggacttggagcccaatgccactcctgccactcctgaggcatagatgaggacctcaccctaggatggggttataagcctctcatgaagttcataatttacacgttttaaatactagacgctagatttttttttctaagggtgaatactagtagtccaggcttgatttggagggtgaatgacgcctagcaagatgtattgtacttgtgtttttttaattgaatacttc

SEQ ID NO: 434 - DNA, 1789 bp, Artificial
  cDNA Sequence
atggggcggggcctctgggaggcgtggcctccggccggctcctctgctgttgccaagggaaactgccgcgaggaggcggaaggagcagaggaccggcagccggcgtcgaggcggggcgcgggaacgacggcggccatggcggcctcggggcccgggtgtcgcagctggtgcttgtgtcccgaggtgccatccgccaccttcttcactgcgctgctctcgctgctggtttccgggcctcgcctgttcctgctgcagcagcccctggcgccctcgggcctcacgctgaagtccgaggcccttcgcaactggcaagtttacaggctggtaacctacatctttgtctacgagaatcccatctccctgctctgcggcgctatcatcatctggcgctttgctggcaatttcgagagaaccgtgggcaccgtccgccactgcttcttcaccgtgatcttcgccatcttctccgctatcatcttcctgtcattcgaggctgtgtcatcactgtcaaagctgggggaagtggaggatgccagaggtttcaccccagtggcctttgccatgctgggagtcaccaccgtccgttctcggatgaggcgggccctggtgtttggcatggttgtgccctcagtcctggttccgtggctcctgctgggtgcctcgtggctcattccccagacctctttcctcagtaatgtctgcgggctgtccatcgggctggcctatcacctactgctattccatcgacctctcagagcgagtggcactgaagctcgatcagaccttccccttcagcctgatgaggaggatatccgtgttcaagtacgtctcagggtcttcagccgagaggagggcagcccagagccggaaactgaacccggtgcctggctcctaccccacacagagctgccaccctcacctgtccccaagccaccctgtgtcccagacgcagcacgccagtggtcagaagctggcctcctggcctgcacccccgggcacatgcccaccttgcctccgtaccagcctgcctccggcctgtgctatgtgcagaaccactttggtccaaaccccacctcctccagtgtctacccagcttctgcgggcacctccctgggcatccagccccccacgcctgtgaacagccctggcacggtgtattctggggccttgcaccaggggctgcaggctccaaggagtcctccagggtccccatgccctgagagaatttctagggaagtcatctcacttggccttctgaaggtcctccctaagagtctcctgacaaaagttacttattgaacacctctatgtgccaggctctgtgttgggtactttgatcaatgcccctgtttcagtctcatctgtactcacggcagccctgtggagtacggtgtactggcccagcttacagatgcagaaagcgagacgttctgccatcagataaagtcacgtggctctttagtaacacggacaaggctcctcgccaaggaactcgtggcagaagagggcagcagttggcagtagctgccgatgtctgtccccagctccaccattcctccctgtggctgtgccgtgctcgtggtttcagtgtccgtgtgtccatgtgtctgcccttcaggagctcgcagctggtgtgcttggcggtcccaggcctgtgtagtgtctctcccctgctgcgggcgcccccaccccgattcctctccccagaagcggtgggatgggcccccatgaactgcagcagcatgctgaggtgtccatgttgtctgcctttgtataaagaaacagcctctga

SEQ ID NO: 435 - DNA, 240 bp, Artificial
  cDNA Sequence
atggcggcctcggggcccgggtgtcgcagctggtgcttgtgtcccgaggtgccatccgccaccttcttcactgcgctgctctcgctgctggtttccgggcctcgcctgttcctgctgcagcagcccctggcgccctcgggcctcacgctgaagtccgaggcccttcgcaactggcaagccactatggaaggaggggtcaggattacagcagaggagactggcacacagagtgttaagtga

SEQ ID NO: 436 - DNA, 360 bp, Artificial
  cDNA Sequence
atggcaggcctgatgaccatagtaaccagccttctgttccttggtgtctgtgcccaccacatcatccctacgggctctgtggtcatcccctctccctgctgcatgttctttgtttccaagagaattcctgagaaccgagtggtcagctaccagctgtccagcaggagcacatgcctcaaggcaggagtgatcttcaccaccaagaagggccagcagttctgtggcgaccccaagcaggagtgggtccagaggtacatgaagaacctggacgccaagcagaagaaggcttcccctagggccagggcagtggctgtcaagggccctgtccagagatatcctggcaaccaaaccacctgctaa

SEQ ID NO: 437 - DNA, 2430 bp, Artificial
  cDNA Sequence
ctcctaacagtttcatgatcaacatgggagactcccacgtggacaccagctccaccgtgtccgaggcggtggccgaagaagtatctcttttcagcatgacggacatgattctgttttcgctcatcgtgggtctcctaacctactggttcctcttcagaaagaaaaaagaagaagtccccgagttcaccaaaattcagacattgacctcctctgtcagagagagcagctttgtggaaaagatgaagaaaacggggaggaacatcatcgtgttctacggctcccagacggggactgcagaggagtttgccaaccgcctgtccaaggacgcccaccgctacgggatgcgaggcatgtcagcggaccctgaggagtatgacctggccgacctgagcagcctgccagagatcgacaacgccctggtggttttctgcatggccacctacggtgagggagaccccaccgacaatgcccaggacttctacgactggctgcaggagacagacgtggatctctctggggtcaagttcgcggtgtttggtcttgggaacaagacctacgagcacttcaatgccatgggcaagtacgtggacaagcggctggagcagctcggcgcccagcgcatctttgagctggggttgggcgacgacgatgggaacttggaggaggacttcatcacctggcgagagcagttctggccggccgtgtgtgaacactttggggtggaagccactggcgaggagtccagcattcgccagtacgagcttgtggtccacaccgacatagatgcggccaaggtgtacatgggggagatgggccggctgaagagctacgagaaccagaagcccccctttgatgccaagaatccgttcctggctgcagtcaccaccaaccggaagctgaaccagggaaccgagcgccacctcatgcacctggaattggacatctcggactccaaaatcaggtatgaatctggggaccacgtggctgtgtacccagccaacgactctgctctcgtcaaccagctgggcaaaatcctgggtgccgacctggacgtcgtcatgtccctgaacaacctggatgaggagtccaacaagaagcacccattcccgtgccctacgtcctaccgcacggccctcacctactacctggacatcaccaacccgccgcgtaccaacgtgctgtacgagctggcgcagtacgcctcggagccctcggagcaggagctgctgcgcaagatggcctcctcctccggcgagggcaaggagctgtacctgagctgggtggtggaggcccggaggcacatcctggccatcctgcaggactgcccgtccctgcggccccccatcgaccacctgtgtgagctgctgccgcgcctgcaggcccgctactactccatcgcctcatcctccaaggtccaccccaactctgtgcacatctgtgcggtggttgtggagtacgagaccaaggctggccgcatcaacaagggcgtggccaccaactggctgcgggccaaggagcctgccggggagaacggcggccgtgcgctggtgcccatgttcgtgcgcaagtcccagttccgcctgcccttcaaggccaccacgcctgtcatcatggtgggccccggcaccggggtggcacccttcataggcttcatccaggagcgggcctggctgcgacagcagggcaaggaggtgggggagacgctgctgtactacggctgccgccgctcggatgaggactacctgtaccgggaggagctggcgcagttccacagggacggtgcgctcacccagctcaacgtggccttctcccgggagcagtcccacaaggtctacgtccagcacctgctaaagcaagaccgagagcacctgtggaagttgatcgaaggcggtgcccacatctacgtctgtggggatgcacggaacatggccagggatgtgcagaacaccttctacgacatcgtggctgagctcggggccatggagcacgcgcaggcggtggactacatcaagaaactgatgaccaagggccgctactccctggacgtgtggagctaggggcctgcctgccccacccaccccacagactccggcctgtaatcagctctcctggctccctcccgtagtctcctgggtgtgtttggcttggccttggcatgggcgcaggcccagtgacaaagactcctctgggcctggggtgcatcctcctcagcccccaggccaggtgaggtccaccggcccctggcagcacagcccagggcctgcatgggggcaccgggctccatgcctctggaggcctctggccctcggtggctgcacagaagggctctttctctctgctgagctgggcccagcccctccacgtgatttccagtgagtgtaaataattttaaataacctctggcccttggaataaagttctgttttctgt

SEQ ID NO: 438 - DNA, 6075 bp, Artificial
  cDNA Sequence
cgttggccgggcccgggggaggaggggaatctcccgccatttttcaataatttcctccggtgctgctgaggaggagtcgtgactgccggccgccgggacccgaagcggaggtcggcggggggctgctgggaggcgcggcggtgtgcgcgggagctctgcgccgtggcgttccgctccatgactgtcgcgcggccgcgccggcggtgagggagccggagttcgcgccgccctctcacccctcccttcccccaccccacccccgggcgcctggcgctcgctccgggccgcggggcctagtgctgcgccgcggggccggccccagcagccgccagtccccaccgccgccgccgcgatggcgccgctcctgggccgcaagcccttcccgctggtgaagccgttgcccggagaggagccgctcttcaccatcccgcacactcaggaggccttccgcacccgggaagagtatgaagcccgcttggaaaggtacagtgagcgcatttggacgtgcaagagtactggaagcagtcagctaacacacaaggaagcctgggaggaagaacaggaagttgctgagcttttgaaggaggagtttcctgcctggtatgagaagcttgttctggaaatggttcaccataacacagcctccttagagaagttagtagatactgcttggttggagatcatgaccaaatatgctgtgggagaagagtgtgacttcgaggttgggaaggagaaaatgctcaaggtgaagattgtgaagattcatcctttggagaaagtggatgaagaggccactgagaagaaatctgatggtgcctgtgattctccatcaagtgacaaagagaactccagtcagattgctcaggaccatcagaagaaggagacagttgtgaaagaggatgaaggaaggagagagagtattaatgacagagcacgtagatcgccacgaaaacttcctacttcattaaaaaaaggagaaaggaaatgggctcctccaaaatttctgcctcacaaatatgatgtgaaactacaaaatgaagataagatcatcagtaacgtgccagcagacagcttgattcgtacagagcgcccaccaaataaggagatagttcgatactttatacggcataatgcattacgagctggtactggtgaaaatgcaccttgggtcgtagaagatgaattggtgaagaaatactctctgcccagcaagttcagtgactttttacttgatccatacaagtatatgactctcaacccttctactaagaggaagaatactggatccccagacaggaagccctcaaagaaatccaagacagacaactcttctcttagttcaccactaaatcctaagttatggtgtcacgtacacttgaagaagtcattgagtggctcgccactcaaagtgaagaactcaaagaattccaaatctcctgaagaacatctagaagaaatgatgaagatgatgtcgcccaataagctgcacactaactttcacattcctaaaaaaggcccacctgccaagaaaccagggaagcacagtgacaagcctttgaaggcaaagggcagaagcaaaggcatcctgaatggacagaaatccacagggaattccaaatctcccaaaaaaggactgaagactcctaaaaccaaaatgaagcagatgactttgttggatatggccaaaggcacgcagaagatgacacgagccccacggaattctgggggtacacctaggacctctagtaaacctcataaacatctgcctcctgcagccctacacctcattgcatactacaaagaaaacaaagacagggaggacaagaggagcgccctgtcctgtgttatctccaaaacagctcgtcttctctctagtgaagatagagctcgtctcccagaagaattgcgaagtcttgttcaaaaacgctatgaacttctagagcacaaaaagaggtgggcttctatgtctgaagaacaacggaaagaatatttgaaaaagaaacgggaggagctgaaaaagaagttgaaggaaaaagccaaagaacgaagagagaaagaaatgcttgagagattagaaaaacagaagcggtatgaggaccaagagttaactggcaaaaaccttccagcattcagattggtggatacccctgaagggctgcccaacacgctgtttggggatgtggccatggtggtggaattcttgagctgttattctgggctacttttaccagatgctcagtatcctattactgctgtgtcccttatggaagccttgagtgcagataagggtggctttttataccttaacagggtgttggtcatcctcttacagaccctcctacaagatgagatagcagaagactatggtgaattgggaatgaagctgtcggaaatccccttgactctgcattctgtttcagagctggtgcggctctgcttgcgcagatctgatgttcaggaggaaagcgagggctcagacacagatgacaataaagattcagctgcatttgaggataatgaggtacaagatgagttcctagaaaagctggagacctctgaattttttgagctgacgtcagaggagaagctacagatcttgacagcactgtgccaccggatcctcatgacatactcagtgcaagaccacatggagaccagacagcagatgtctgcagagttgtggaaggaacggcttgctgtgttgaaggaagaaaatgataagaagagagcagagaaacagaaacggaaagaaatggaagccaaaaataaagaaaatggaaaagttgagaatgggttaggcaaaactgataggaaaaaagaaattgtgaagtttgagccccaagtagatacagaagctgaagacatgattagtgctgtgaagagcagaaggttgcttgccattcaagctaagaaggaacgggaaatccaggaaagagaaatgaaagtgaaactggaacgccaagctgaagaagaacgaatacggaagcacaaagcagctgctgagaaagctttccaggaagggattgccaaggccaaactagtcatgcgcaggactcctattggcacagatcgaaaccataatagatactggctcttctcagatgaagttccaggattattcattgaaaaaggctgggtacatgacagcattgactaccgattcaaccatcactgcaaagaccacacagtctctggtgatgaggattactgtcctcgcagtaagaaagcaaacttaggtaaaaatgcaagcatgaacacacaacatggaacagcaacagaagttgctgtagagacaaccacacccaaacaaggacagaacctatggtttttatgtgatagtcaaaaggagctggatgagttgctaaactgtcttcaccctcagggaataagagaaagtcaacttaaagagagactagagaagaggtaccaggacattattcactctattcatctagcacggaagccaaatttgggtctaaaatcttgtgatggcaaccaggagcttttaaacttccttcgtagtgatctcattgaagttgcaacaaggttacaaaaaggaggacttggatatgtggaagaaacatcagaatttgaagcccgggtcatttcattagagaaattgaaggattttggtgagtgtgtgattgcccttcaggccagtgtcataaagaaatttctccaaggcttcatggctcccaagcaaaagagaagaaaactccaaagtgaagattcagcaaaaactgaggaagtggatgaagagaagaaaatggtagaggaagcaaaggttgcatctgcactggagaaatggaagacagcaatccgggaagctcagactttctccaggatgcacgtgctgcttgggatgcttgatgcctgtatcaagtgggatatgtccgcagaaaatgctaggtgcaaagtttgtcgaaagaaaggtgaggatgacaaattgatcttgtgtgatgagtgtaataaagccttccacctgttttgtctgaggccggccctctatgaagtaccagatggtgagtggcagtgcccagcttgccagcccgctactgccaggcgcaactcccgtggcaggaactatactgaagagtctgcttctgaggacagtgaagatgatgagagtgatgaagaggaggaggaggaagaagaggaggaggaggaagaagattatgaggtggctggtttgcgattgagacctcgaaagaccatccggggcaagcacagcgtcatcccccctgcagcaaggtcaggccggcgcccgggtaagaagccacactctaccaggaggtctcagcccaaggcaccacctgtggatgatgctgaggtggatgagctggtgcttcagaccaagcggagctcccggaggcaaagcctggagctgcagaagtgtgaagagatcctccacaagatcgtgaagtaccgcttcagctggcccttcagggagcctgtgaccagagatgaggccgaggactactatgatgtgatcacgcaccccatggactttcagacagtgcagaacaaatgttcctgtgggagctaccgctctgtgcaggagtttcttactgacatgaagcaagtgtttaccaatgctgaggtttacaactgccgtggcagccatgtgctaagctgcatggtgaagacagaacagtgtctagtggctctgttgcataaacaccttcctggccacccatatgtccgcaggaagcgcaagaagtttcctgataggcttgctgaagatgaaggggacagtgagccagaggccgttggacagtccaggggacgaagacagaagaagtagagaggcagggccgtggtgacagtatcagtgagtgccatacagaattgtgtattcaccagcatcatgaaacagttgtggtcttttgagttgatcttggcagagtaaagggacgtgtcctggagccattcctgaatctccccttctttgtgacagctcctcccacccccccaaaaaataaaaaaaccacaaaaaacaaaaaaacaaaactaaggcacttcacttagagactggagtcctgcttataatcatgcatataacctttactttgatggatctggccagaggggtgttggagcccagcccacccacataccagtcaagctcttaggggagcagaagaaaagcaggaagaatttaaatgtttaattttttttttaaattgacttttctagttattaaaagttgcttgtttcagcagtgatattgtataaagaacatcttgtaagatactcctgacatcttgctttagcacatgtacagtacagtttctatgataatgtgtttgctctaacttccctggcttctccttcagcccatccactctcctctagagcagttgggttggaggctcattgaggcaagcagcaacattggagggggagcagggcagtgctgtgtctgctgcctcccatgcccgttctgacctcagccttggaactcctcaagaacctgaagaagagcggcagagaagctctgagagccccttcccccacaacaaatctagctctagttgttatatttaggcaaaactttgtagtcttctttcccttttatgatggattttgataaaagtacaaaacagggtttttcttttttatcacctttgaatttggaaattttgagcacccaagctcttctgtacctatttaaagtccaccaaggggactgcagctcctagaacatgagaatcaagcctcttaattttaaactgcggaatgtggcctctgcttcctccgtcctcctgcccaaggacgacgaggattgctccagggctgctgggtagtttaccgtcccttctataggcatggagttggcactgacatcacagcttcataaccccaccaccgccagcttcccctgcctcctacatccagtctgttcttgttcatagtgagaatcctgtgttcccacttcagtgacacctgaattgtttgttgttgttttttttttttattgtcttcaaagaggaagggccccattaaagggtgaacttgtaataaattggaatttcaaataaacctcatgtacttgtgtttataaagaagaaacca

SEQ ID NO: 439 - DNA, 1692 bp, Artificial
  cDNA Sequence
ggtggcgggaagaggaggcgcgagaatggaggtggaggccgtctgtggtggcgcgggcgaggtggaggcccaggactctgaccctgcccctgccttcagcaaggcccccggcagcgccggccactacgaactgccgtgggttgaaaaatataggccagtaaagctgaatgaaattgtcgggaatgaagacaccgtgagcaggctagaggtctttgcaagggaaggaaatgtgcccaacatcatcattgcgggccctccaggaaccggcaagaccacaagcattctgtgcttggcccgggccctgctgggcccagcactcaaagatgccatgttggaactcaatgcttcaaatgacaggggcattgacgttgtgaggaataaaattaaaatgtttgctcaacaaaaagtcactcttcccaaaggccgacataagatcatcattctggatgaagcagacagcatgaccgacggagcccagcaagccttgaggagaaccatggaaatctactctaaaaccactcgcttcgcccttgcttgtaatgcttcggataagatcatcgagcccattcagtcccgctgtgcagtcctccggtacacaaagctgaccgacgcccagatcctcaccaggctgatgaatgttatcgagaaggagagggtaccctacactgatgacggcctagaagccatcatcttcacggcccagggagacatgaggcaggcgctgaacaacctgcagtccaccttctcaggatttggcttcattaacagtgagaacgtgttcaaggtctgtgacgagccccacccactgctggtaaaggagatgatccagcactgtgtgaatgccaacattgacgaagcctacaagattcttgctcacttgtggcatctgggctactcaccagaagatatcattggcaacatctttcgagtgtgtaaaactttccaaatggcagaatacctgaaactggagtttatcaaggaaattggatacactcacatgaaaatagcggaaggagtgaactctcttttgcagatggcaggcctcctggcaaggctgtgtcagaagacaatggccccggtggccagttagagcagagacttcactgactgacttacaggtgccctattctgaggtacaggagccgcggctttctgatgggggaaaatgccgccttaggctggagccaacatgactgtcctttaaactccagtggctggccaggcacggtagctcacgcctgtaatcccaacactttgggaggccgaggcaggtggatcacctgaggtcagaagttcaagaccagcctggccaacatggggaaaccctgtctttactaaaaatataaaaattagctgggtgtggtggcgggcacctgtaatcccagctactcgggaggctgtggcaggagaatcgcttgaacccaggaggtggaggttgcagtgagccaagatcacaccattgcactccagcctgggcgacagagtctccatctggggaaaaaaattaaataaataaactcccgtgacttgcatgtttgcttctgggacgtctgtgccccgcaagtgtttgagtttggcctccaccccattgatgcggtgacggggcggaaaggcgcagagaagctgagggcggtctctgatctgtgtgtgggttgacattttagctaataaagccttgcagtgtttgttggc

SEQ ID NO: 440 - DNA, 1409 bp, Artificial
  cDNA Sequence
cgagaatggaggtggaggccgtctgtggtggcgcgggcgaggtggaggcccaggactctgaccctgcccctgccttcagcaaggcccccggcagcgccggccactacgaactgccgtgggttgaaaaatataggccagtaaagctgaatgaaattgtcgggaatgaagacaccgtgagcaggctagaggtctttgcaagggaaggaaatgtgcccaacatcatcattgcgggccctccaggaaccggcaagaccacaagcattctgtgcttggcccgggccctgctgggcccagcactcaaagatgccatgttggaactcaatgcttcaaatgacagcatgaccgacggagcccagcaagccttgaggagaaccatggaaatctactctaaaaccactcgcttcgcccttgcttgtaatgcttcggataagatcatcgagcccattcagtcccgctgtgcagtcctccggtacacaaagctgaccgacgcccagatcctcaccaggctgatgaatgttatcgagaaggagagggtaccctacactgatgacggcctagaagccatcatcttcacggcccagggagacatgaggcaggcgctgaacaacctgcagtccaccttctcaggatttggcttcattaacagtgagaacgtgttcaaggtctgtgacgagccccacccactgctggtaaaggagatgatccagcactgtgtgaatgccaacattgacgaagcctacaagattcttgctcacttgtggcatctgggctactcaccagaagatatcattggcaacatctttcgagtgtgtaaaactttccaaatggcagaatacctgaaactggagtttatcaaggaaattggatacactcacatgaaaatagcggaaggagtgaactctcttttgcagatggcaggcctcctggcaaggctgtgtcagaagacaatggccccggtggccagttagagcagagacttcactgactgacttacaggtgccctattctgaggtacaggagccgcggctttctgatgggggaaaatgccgccttaggctggagccaacatgactgtcctttaaactccagtggctggccaggcacggtagctcacgcctgtaatcccaacactttgggaggccgaggcaggtggatcacctgaggtcagaagttcaagaccagcctggccaacatggggaaaccctgtctttactaaaaatataaaaattagctgggtgtggtggcgggcacctgtaatcccagctactcgggaggctgtggcaggagaatcgcttgaacccaggaggtggaggttgcagtgagccaagatcacaccattgcactccagcctgggcgacagagtctccatctggggaaaaaaattaaataaataaactcccgtgacttgc

SEQ ID NO: 441 - DNA, 2319 bp, Artificial
  cDNA Sequence
attatcttgctccctgtctattggagtgtatctctcttcctctctgtgtgactttttgtgtttatgtgtgtgtttagtgtgtgtccatattttcctgttctcttgtgtctctctgctgtgtctctctctttttctttctgttttttgagacggagtctccctctgtcacccaggctggagtgcagtggtgcgatctcggctcactgcaacctctgcttctgaggttcaaacgattctcctgcctcagcctcccgagtagctggaattacagacacatgccaccatgcccagctaattttgtatttttaatagagacggggtttcaccattgatccacccgcctcggcctcccaaagtttttggattacaggtgtgagccacctcgcccggtcctatctctctttcttctctttctccctctcactttgtttctcttctctctctctctcccgcctccttcccccgtctcccctcccttccccccaccgccctcttcatagctgagcctgtccggcagtgcggcggatgtacggatgattcagtggctggcaggaagcccgccctgcccgcccgccagtgtcagtggtgttggcatcagcttgggcaggtgtgcgggctcaggatggggcggccgtggtgaggaaccctggactctcagcatcacaagaggcaacaccaggagccaacatgagctcggggactgaactgctgtggcccggagcagcgctgctggtgctgttgggggtggcagccagtctgtgtgtgcgctgctcacgcccaggtgcaaagaggtcagagaaaatctaccagcagagaagtctgcgtgaggaccaacagagctttacggggtcccggacctactccttggtcgggcaggcatggccaggacccctggcggacatggcacccacaaggaaggacaagctgttgcaaccccagcctggaggatccagcatcttccaggtaccagaacttcagcaaaggaagcagacacgggtcggaggaagcctacatagaccccattgccatggagtattacaactgggggcggttctcgaagcccccagaagagccgatgatgatgccaattcctacgagaatgtgctcatttgcaagcagaaaaccacagagacaggtgcccagcaggagggcataggtggcctctgcagaggggacctcagcctgtcactggccctgaagactggccccacttctggtctctgtccctctgcctccccggaagaagatgaggaatctgaggattatcagaactcagcatccatccatcagtggcgcgagtccaggaaggtcatggggcaactccagagagaagcatcccctggcccggggaagcccagacgaggaggacggggaaccggattacgtgaatggggaggtggcagccacagaagcctagggcagaccaagaagaaaggagccaaggcaaagagggaccactgtgctcatggacccatcgctgccttccaaggaccatttcccagagctactcaacttttaagcccctgccatggttgctcctggaaggagaaccagccaccctgaggaccacctggccatgcgtgcacagcctgggaaaagacagttactcacgggagctgcaggcccgtcaccaagccctctcccgacccaggctttgtggggcaggcacctggtaccaagggtaacccggctcctggtatggacggatgcgcaggatttaggataagctgtcacccagtccccataacaaaaccactgtccaacactggtatctgtgttcttttgtgctatgaatttggattcctaattgctattgttggttgctggggttttaaatgattgataagcttgtacagttaacttatagagggggagccatatttaacattctggatttcagagtagagatttctgtgttgtctcctagaaagcattacatgtagtttatttcagcatccttgttgggtggggccctggctctcttcccctttggtgggacctcccctttctttgggcttcagttcactcaggaagaaatgaggctgtcgccatctttatgtgcttccagtggaaatgtcacttgctacagacaatagtgcatgagagtctagagaagtagtgaccagaacagggcagagtaggtcccctccatggccctgaatcctcctctgctccagggctggcctctgcagagctgattaaacagtgttgtgactgtctcatgggaagagctggggcccagagggaccttgagtcagaaatgttgccagaaaaagtatctcctccaaccaaaacatctcaataaaaccattttagttg

SEQ ID NO: 442 - DNA, 1753 bp, Artificial
  cDNA Sequence
cagtgcggcggatgtacggatgattcagtggctggcaggaagcccgccctgcccgcccgccagtgtcagtggtgttggcatcagcttgggcaggtgtgcgggctcaggatggggcggccgtggtgaggaaccctggactctcaggcatcacaagaggcaacaccaggagccaacatgagctcggggactgaactgctgtggcccggagcagcgctgctggtgctgttgggggtggcagccagtctgtgtgtgcgctgctcacgcccaggtgcaaagaggtcagagaaaatctaccagcagagaagtctgcgtgaggaccaacagagctttacggggtcccggacctactccttggtcgggcaggcatggccaggacccctggcggacatggcacccacaaggaaggacaagctgttgcaattctaccccagcctggaggatccagcatcttccaggtaccagaacttcagcaaaggaagcagacacgggtcggaggaagcctacatatgatgatgccaattcctacgagaatgtgctcatttgcaagcagaaaaccacagagacaggtgcccagcaggagggcataggtggcctctgcagaggggacctcagcctgtcactggccctgaagactggccccacttctggtctctgtccctctgcctccccggaagaagatgaggaatctgaggattatcagaactcagcatccatccatcagtggcgcgagtccaggaaggtcatggggcaactccagagagaagcatcccctggcccggtgggaagcccagacgaggaggacggggaaccggattacgtgaatggggaggtggcagccacagaagcctagggcagaccaagaagaaagggagccaaggcaaagagggaccactgtgctcatggacccatcgctgccttccaaggaccatttcccagagctactcaacttttaagcccctgccatggttgctcctggaaggagaaccagccaccctgaggaccacctggccatgcgtgcacagcctgggaaaagacagttactcacgggagctgcaggcccgtcaccaagccctctcccgacccaggctttgtggggcaggcacctggtaccaagggtaacccggctcctggtatggacggatgcgcaggatttaggataagctgtcacccagtccccataacaaaaccactgtccaacactggtatctgtgttcttttgtgctatgaatttggattcctaattgctattgttggttgctggggttttaaatgattgataagcttgtacagttaacttatagagggggagccatatttaacattctggatttcagagtagagatttctgtgttgtctcctagaaagcattacatgtagtttatttcagcatccttgttgggtggggccctggctctcttcccctttggtgggacctcccctttctttgggcttcagttcactcaggaagaaatgaggctgtcgccatctttatgtgcttccagtggaaatgtcacttgctacagacaatagtgcatgagagtctagagaagtagtgaccagaacagggcagagtaggtcccctccatggccctgaatcctcctctgctccagggctggcctctgcagagctgattaaacagtgttgtgactgtctcatgggaagagctggggcccagagggaccttgagtcagaaatgttgccagaaaaagtatctcctccaaccaaaacatctcaataaaaccattttagttg

SEQ ID NO: 443 - DNA, 534 bp, Artificial
  cDNA Sequence
agggccgtctcagtctcataaaaggggatcaggcaggaggagtttgggagaaacctgagaagggcctgatttgcagcatcatgatgggcctctccttggcctctgctgtgctcctggcctccctcctgagtctccaccttggaactgccacacgtgggagtgacatatccaagacctgctgcttccaatacagccacaagccccttccctggacctgggtgcgaagctatgaattcaccagtaacagctgctcccagcgggctgtgatattcactaccaaaagaggcaagaaagtctgtacccatccaaggaaaaaatgggtgcaaaaatacatttctttactgaaaactccgaaacaattgtgactcagctgaattttcatccgaggacgcttggaccccgctcttggctctgcagccctctggggagcctgcggaatcttttctgaaggctacatggacccgctggggaggagagggtgtttcctcccagagttactttaataaaggttgttcatagagttgacttgttcat

SEQ ID NO: 444 - DNA, 5374 bp, Artificial
  cDNA Sequence
ccgcggcgccgggacagccccgggactctgccaggtggatgttgtgcgtagccggagccaggttgaagagagaactcgatgccaccgcaacggtattggcgaaccggcaggatgaaagtgagcagtccagaaagcggcttatcgaacagagccgggagttcaagaagaacactccagaggatttgcgcaagcaggtagcgccgctgctgaagagtttccaaggagagattgatgcactgagtaaaagaagcaaggaagctgaagcagctttcttgaatgtctacaaaagattgattgacgtcccagatcccgtaccagctttggatctcggacagcaactccagctcaaagtgcagcgcctgcacgatattgaaacagagaaccagaaacttagggaaactctggaagaatacaacaaggaatttgctgaagtgaaaaatcaagaggttacgataaaagcacttaaagagaaaatccgagaatatgaacagacactgaagaaccaagccgaaaccatagctcttgagaaggaacagaagttacagaatgactttgcagaaaaggagagaaagctgcaggagacacagatgtccaccacctcaaagctggaggaagctgagcataaggttcagagcctacaaacagccctggaaaaaactcgaacagaattatttgacctgaaaaccaaatacgatgaagaaactactgcaaaggccgacgagattgaaatgatcatgacggaccttgaaagggcaaaccagagggcagaggtggctcagagagaggcggagaccttaagggaacagctctcatcggccaatcactccctccagctggcctcacagatccagaaggcaccagacgtggagcaggccatagaggtgctgacccgctccagcctagaagttgagttggccgccaaggagcgggagatcgcacagctggtggaggacgtgcagagactccaggccagcctcaccaagctgcgggagaattcggccagccagatctcacagcttgagcagcagctgagcgccaaaaacagcacactcaaacaactggaagaaaaactcaaaggccaggctgactatgaagaggtgaagaaagagctgaacattctgaagtccatggagtttgcaccgtccgagggcgctgggacacaggatgcggccaagcccctggaggtgctgttgctggagaagaaccgctcgctgcagtccgagaacgccgcgctgcgcatctccaacagcgacctgagcgggtcagccaggaggaaagggaaagaccagcctgaaagtcggcgcccgggatctttgccggccccccctccttctcagttgccccgcaacccgggggagcaggcttccaatactaatggtacacaccagttctcaccagcggggttaagtcaagactttttcagctcatccctggcaagccccagcctacccctggcttctacaggaaaatttgcactaaactctcttctccagcggcagctaatgcagtccttctactccaaggctatgcaggaagccggaagcacaagcatgattttttcaacaggtccatacagcacaaactccatatcttcccaaagtccattacaacaaagcccagatgtcaatggcatggccccatcccccagccagtcagaaagtgctgggagcgtctccgagggcgaggagatggacactgcagaaatcgcccggcaggtcaaagagcagctgattaagcacaatatcggacaacgtattttcggacattatgtgttgggactgtctcaagggtccgtgagcgagattctggcccggcccaagccatggaataaactgactgttcgtggcaaggagccatttcacaagatgaaacagttcctctccgatgagcagaacatcctggccctccgtagcatccaaggcagacaaagagagaatccaggccagagcctgaacagactatttcaggaagtaccgaaacgaagaaatgggtctgaaggtaacatcaccacccggatccgagcctcggagactggctctgatgaagccatcaagtccatcctagagcaagccaagagggagctccaagtgcagaaaactgcagagccggcccagccttcctccgcatccggcagcgggaactctgatgacgccatccgctccatcctgcagcaagcccgccgggagatggaggcccagcaggctgccctcgaccctgccttaaagcaggcaccactgtcccagagtgacatcaccatcctcacccccaagcttctgtccacctcgcccatgcccaccgtgtccagctacccacctctcgccatctccctgaagaagccctccgcagctcctgaggccggtgcctctgctctgccgaaccccccggccctcaaaaaggaggcccaggacgcccccgggctggacccccagggagcagccgattgtgcacaaggggtcctgagacaggtgaaaaatgaggtgggccgcagcggtgcctggaaggaccactggtggagcgcggtgcagccggagagaagaaatgccgcctcctccgaggaggccaaggccgaagaaacgggcggcgggaaagagaagggcagcggtggcagcggaggtggcagccagcctcgggccgagcgcagtcagctccagggaccctcgtcgtcagagtactggaaggagtggcccagcgctgagtccccatactcccagagctcagagctgagtctgaccggggccagccgcagcgagacaccacagaacagccccctgccatcctccccgatcgtgcccatgtccaagcccaccaagccctcggtccccccgctgacccccgagcagtacgaggtctacatgtaccaggaggtggacaccatcgagctcacccggcaggttaaggaaaagctggccaagaacggcatctgccagagaatcttcggggagaaggtgctgggcctgtcccagggcagcgtcagcgacatgctgtcccgaccgaagccatggagcaagctgacgcagaaaggccgagaacccttcatccggatgcagctctggctgaacggcgagctaggccagggtgttctacccgtccagggccagcagcaagggccagtcctccactccgtgacatcgctccaggacccgctgcagcagggctgtgtgagctcagaaagcactccaaagacctccgccagctgcagccctgcccctgagtccccgatgagttccagtgagtcggtgaagagcctgaccgagctggtccagcagccctgtccccccatcgaggcgagcaaggacagcaagccaccagagcccagtgacccgccagcatccgactcccagcccacaaccccgctgcctctctccggacactcggccctcagcatccaagaattagtagccatgtccccggagctggacacctacggcataaccaagcgggtgaaggaggtgctgacggacaacaacctcggccagcgcttatttggggagaccatcttagggctcacccaaggctctgtctctgacctccttgcccgccccaaaccctggcataagctcagtctgaaaggacgagagcccttcgtccggatgcagctgtggctgaacgaccccaacaatgtggagaagctgatggacatgaaacggatggagaagaaagcctacatgaagcggcggcacagctcagtcagtgacagccagccctgcgaaccgccctctgtcggcaccgagtacagccagggcgccagcccccagccccagcaccagctgaagaaaccccgggtggtgctggctccggaggagaaggaggcgctgaaacgagcgtatcagcaaaagccatacccgtcaccaaaaaccatcgaagacctcgccacccagctcaacctgaaaaccagcaccgtcatcaactggttccacaactacaggtctcggatccgcagagaactgttcattgaggaaattcaggccgggagtcagggccaggcgggcgccagcgactcaccctcggcccgcagcggccgggcggcgcccagctcggagggcgacagctgcgacggcgtggaggccactgagggcccaggcagcgccgacaccgaggagcccaagtctcagggagaggccgagcgggaggaggtgccgcggccggcggagcagacggagccgccgccctcggggaccccgggcccggacgacgcccgcgacgacgaccacgagggaggccccgtggaaggcccggggcccctgcccagccccgcctccgcgaccgccaccgccgcgcccgcggcccccgaggacgccgctacctcagccgccgccgcgccgggggagggccccgcggccccgagctccgcgccgccgcccagcaacagcagcagcagcagcgccccccgcaggcccagctcgctgcagagccttttcggcctccccgaggccgcgggcgcccgggactcgcgcgacaaccccctgcgcaagaagaaggccgcgaacttgaacagcatcatccaccgcctggagaaggccgccagccgggaggaacctatcgaatgggagttctgaggggccgcggccctggggcgggcagccaggctgggccgcaagggcctggacggggtcggacggggcaggcgctgcggacaccgtggcctgggcttggcccgcggcctgcaccgaccccgggccggacctgagcccgcagcccagaccccctccacggtccgcggcctgcaccgacccgaggcccagatccaaggccgcggcccagacccactctgcggcccgggccgaccctgcggcctccaccaaccccgcggcccagacccagcccgcggcctggacccctggaccgctttgcgcacttaccgccctgcgggccacagggcaaaatcgccataggccaaggtgcatatagaaaacaaaggagcattaagcccaatctatgtcgtgttttcaaggaagaaaacggaaatgtgtggtcgagcttttttgtaccctgaagtgttttttttattgccctaagtgatttccacaggttctggaataactcttacagctttgccttgtgtcctcctgttccgtgtgggctttaaaagaaaaaaaatcaaacccacatattaaaagggggctttttatctgccatctaatggcttcagagcgataatacactattatcttcttaaaccaggaaaaaataaaagggggggtgggatttttcagaaaaattaaaaaagaaagtttttgtagctgttcagttgccactaagagattgcacagtcaaaacgactctaaacacactagtttggattcctaaatattttcaagaaaagaatcttctcgtttgaaactttgaattaaaataaaacacatttactccacat

SEQ ID NO: 445 - DNA, 2923 bp, Artificial
  cDNA Sequence
cgtctcaatatgtctcaagatggcggccaatgtgggatcgatgtttcaatattggaagcgctttgatttacagcagctgcagagagaactcgatgccaccgcaacggtattggcgaaccggcaggatgaaagtgagcagtccagaaagcggcttatcgaacagagccgggagttcaagaagaacactccagaggatttgcgcaagcaggtagcgccgctgctgaagagtttccaaggagagattgatgcactgagtaaaagaagcaaggaagctgaagcagctttcttgaatgtctacaaaagattgattgacgtcccagatcccgtaccagctttggatctcggacagcaactccagctcaaagtgcagcgcctgcacgatattgaaacagagaaccagaaacttagggaaactctggaagaatacaacaaggaatttgctgaagtgaaaaatcaagaggttacgataaaagcacttaaagagaaaatccgagaatatgaacagacactgaagaaccaagccgaaaccatagctcttgagaaggaacagaagttacagaatgactttgcagaaaaggagagaaagctgcaggagacacagatgtccaccacctcaaagctggaggaagctgagcataaggttcagagcctacaaacagccctggaaaaaactcgaacagaattatttgacctgaaaaccaaatacgatgaagaaactactgcaaaggccgacgagattgaaatgatcatgacggaccttgaaagggcaaaccagagggcagaggtggctcagagagaggcggagaccttaagggaacagctctcatcggccaatcactccctccagctggcctcacagatccagaaggcaccagacgtggagcaggccatagaggtgctgacccgctccagcctagaagttgagttggccgccaaggagcgggagatcgcacagctggtggaggacgtgcagagactccaggccagcctcaccaagctgcgggagaattcggccagccagatctcacagcttgagcagcagctgagcgccaaaaacagcacactcaaacaactggaagaaaaactcaaaggccaggctgactatgaagaggtgaagaaagagctgaacattctgaagtccatggagtttgcaccgtccgagggcgctgggacacaggatgcggccaagcccctggaggtgctgttgctggagaagaaccgctcgctgcagtccgagaacgccgcgctgcgcatctccaacagcgacctgagcggacgctgtgcagagctgcaagtccgtatcactgaggctgtggccacagccactgagcagagagagctgatcgcccgcctggagcaggacctgagcatcattcagtccatccagcggcccgatgccgagggtgccgctgagcaccgcctggagaagatcccagagcccatcaaagaggccactgccctattctacggacctgcagcaccagccagcggtgccctcccagagggccaggtggattcactgctttccatcatctccagccagagggagcgcttccgtgcccggaaccaggagcttgaggccgagaaccgcctggcccagcacaccctccaggccctgcagagtgagctggacagcctgcgcgccgacaacatcaagctctttgagaagatcaagttcctgcagagctaccctggccggggcagcggcagtgatgacacggagctgcggtactcgtcccagtacgaggagcgcctggaccccttctcctccttcagcaagcgggagcggcagaggaagtacctgagcttgagtccctgggacaaggccaccctcagcatggggcgtctggttctctccaacaagatggcgcgcaccatcggcttcttctacacactgttcctgcactgcctggtcttcctggtgctctacaagctggcatggagcgagagcatggagagggactgtgccaccttctgcgccaagaagttcgctgaccacctgcacaagttccacgagaatgacaacggggctgcggctggtgacttgtggcagtgataccccggggcctcccccgtgacagtgacggctgcgcctccaccccgactgctcagtgcatctaatcacttagactcccctgaagaatcccccatggaaactgcccttatccgctgtccagcagctgccagaggccccaggtcacctcgggtccccttgaaagaatgtctcggtcacatcaggcccgctaggtccagagagcgagcccccaatgcccggccaggctaagccgcagagaccctctcagcccccacctcaggttagggctctgcccgcagcctgacctctagccctggtggcagaggtccctcagctgcgaggctaattgggtgaccaccgattccagctgcggttaatccagcttgggcctgtctgcactgcgatcctcttgggctctcctaggatccccccatgccccgtaagaggtggaagacgcttccttccaggacagcaggctttgagtccagcacccccagcctgcctttgccaccagccccaccctgcagagtatatgaggcttgacagagtctgccccctcccccactgcaccccaagagagagagccccagccagcggaacagtttctattaccccctccctgcccccagacccatgtgatttctgctttcttctttagcaagatattctggtttctagataaggaagagtctctaatgagcccccgagccccagtctcttcagactcatggattggtctgaggggtctgaacgtctcctagccaatcagaactggctgtggaccaccctagcacggccacctctcagggccactggcaggccttcctgagttagatttgtagttgcatatttagctttgcacatttgaaataaaccacggttgcagcc

SEQ ID NO: 446 - DNA, 2155 bp, Artificial
  cDNA Sequence
gagcgcacgcgtacacgcgtgcgcaggggaagaccgagtgccaggggctgaaccgcagggaagggggcgcggcgcacgcagtatggcgcccaacatctacttggttcgccagcggatcagtcgactcggccagaggatgtccggcttccagatcaacctcaacccgctcaaggagccactcggcttcatcaaggtcctcgagtggattgcttctatctttgcttttgccacctgtggaggttttaagggccaaacagaaattcaagtgaattgtcctcctgcagttactgagaataaaactgttacagctacttttggttatccattcaggttgaatgaggcatcatttcagccacctccaggtgtaaacatatgtgatgtaaattggaaagattacgtcctcataggcgattactcttcttctgcacaattctatgttacctttgcagtctttgtgttcctgtactgcattgctgcccttctgctttatgttggctacacgagtctgtatctggatagtcgtaaacttcctatgatagactttgttgttacacttgttgccacttttttgtggttggtgagcacttcagcctgggctaaagctctgacagatattaaaatagctactggtcacaatattattgatgaacttccgccttgtaagaagaaagcagtactgtgttactttggctctgtgaccagtatgggatccctaaatgtatctgtgatatttggctttctaaatatgatactctggggaggaaatgcttggtttgtgtacaaggagaccagcctacacagtccatcaaatacatctgcccctcatagccaaggaggtattccacctcctaccggaatataattaaagggagaaatacactgtatgaagtatatgttgatactatgacatgttgccaacaccttgagaagcattatttgtttctaataaaagtaatggctttgtcaatatattggtgggtttaaaactttgctgcttttttacataaagcctgtgcctttcctagaaagttaagatgtaaatgtattctcacatgtaaatttgaaagttcaggggtctattatgaaatgatacacatttttaaatgaaccataatttttttcactaagctgtttgccttccaaagtgtttacaccttaagccttaacatgtatcttcattcagaaaacagttatattgtcataccatagtaggaagaaaaacctttatttggaatatacactactgtaagtttgtacagatcatatacctaccacctgtctttgcttaaagagccttgattacataaatatgtaggaaaaaacatattgagttcaaaatttatatctaacattgtttatgttatgatttttttttaattgcaaagactaggtgtatatttttttctgtttttctaaatgacccgtggtacttaataggtgtactaaaattgtgttgggagcagggatttggaaatttctgagagatgtgtagttaatttagtaattctgtttcatgagatatgatctgttatgctagtggtttaataggcttgctatgtaagtagaacgtggctcaactagatatctttatatgtatgggcattactcttagtgatatttgtttcctgtcctttgttgctcatgctgtttaagtgcaggctgagacccagcctctttgtaagtacagtaaaataatccaccgttttttacagaccctagtcaaagggttaaaaaaattaagattgctttccatgtttgaaatttaccattgagagtcaatgaagttgctattttgagtttagcattgatattgtgaaaataagtgcaatttggatttcatgtttcttaatattcattcttgtttcacaaatgaatgattaaggaattatgcatcataaaggaacctaagtgaggtatatgatgagtgtattgtctttgcacacacatataggtatattctgaatacaagcttattcacattttgcttcctaatctttttgttgtacagggattcaggtttcttattcttacaacatgattgtttatatgtgaagcacatcttgctgttgccttatttttgatgcttttattcatgacaagaattgtcaatataagaatgtatatcttttttgcaaccaatttaataaaggagttg

SEQ ID NO: 447 - DNA, 1949 bp, Artificial
  cDNA Sequence
tataacgtgagggctgaatgcagcccattctctggagaacttcctcacacaccgcagcaaagagaagactgaaagacaaacctgggtgcagccagagaggtccagatagatgagcttgtggcatccattccccaagttcagcctagggactccacgtaccccagctgggtctcattgttccagaactgcattagttaagattacccagacttggatttcaaaggaatactttcattgttccgtctgtaacacgaagtaattggggccagctggatgtcaggatgcgtgtggttaccattgtaatcttgctctgcttttgcaaagcggctgagctgcgcaaagcaagcccaggcagtgtgagaagccgagtgaatcatggccgggcgggtggaggccggagaggctccaacccggtcaaacgctacgcaccaggcctcccgtgtgacgtgtacacatatctccatgagaaatacttagattgtcaagaaagaaaattagtttatgtgctgcctggttggcctcaggatttgctgcacatgctgctagcaagaaacaagatccgcacattgaagaacaacatgttttccaagtttaaaaagctgaaaagcctggatctgcagcagaatgagatctctaaaattgagagtgaggcgttctttggtttaaacaaactcaccaccctcttactgcagcacaaccagatcaaagtcttgacggaggaagtgttcatttacacacctctcttgagctacctgcgtctttatgacaacccctggcactgtacttgtgagatagaaacgcttatttcaatgttgcagattcccaggaaccggaatttggggaactacgccaagtgtgaaagtccacaagaacaaaaaaataaaaaactgcggcagataaaatctgaacagttgtgtaatgaagaagaaaaggaacaattggacccgaaaccccaagtgtcagggagacccccagtcatcaagcctgaggtggactcaactttttgccacaattatgtgtttcccatacaaacactggactgcaaaaggaaagagttgaaaaaagtgccaaacaacatccctccagatattgttaaacttgacttgtcatacaataaaatcaaccaacttcgacccaaggaatttgaagatgttcatgagctgaagaaattaaacctcagcagcaatggcattgaattcatcgatcctgccgcttttttagggctcacacatttagaagaattagatttatcaaacaacagtctgcaaaactttgactatggcgtattagaagacttgtattttttgaaactcttgtggctcagagataacccttggagatgtgactacaacattcactacctctactactggttaaagcaccactacaatgtccattttaatggcctggaatgcaaaacgcctgaagaatacaaaggatggtctgtgggaaaatatattagaagttactatgaagaatgccccaaagacaagttaccagcatatcctgagtcatttgaccaagacacagaagatgatgaatgggaaaaaaaacatagagatcacaccgcaaagaagcaaagcgtaataattactatagtaggataaggtagaaattgttctgattgtaattagttttgtattttctatactggtgttagaaaacatatgtttacatttgattaactgtgttgcctatttatgcagggtaatccagctaaaggaagctttctttaattataagtattattgtgactattatagtaatcaagagaatgctatcatcctgcttgcctgtccatttgtggaacagcatctggtgatatgcaattccacactggtaacctgcagcagttgggtcctaatgatggcattagactttcataatgtcctgtataaatgtttttactgcttttagaaaataaagaaaaaaaacttggttcatgttta

SEQ ID NO: 448 - DNA, 3144 bp, Artificial
  cDNA Sequence
gcctggctccctctcgctgagacacacatacactcacacatacacaacccggcaggctcgtctgaacttgaagacaccccacattccaagatgcccgaggttcctgggaatgcctggggttcttcgatccggaaaatcctaccggcatcctcctagggagggattattattattatttttctttaatctggaagagaagagaacaagttgtgcttttccccccttcttcttgctaaatgccatggatataactgaataagcggctcagggctttccccgcgtggacgtccgaggccaccatctgcctgcattcgccggagccgccggagggtttagctcgagtctgtctcgggcggggaaggatgcgtggccgagccggggagcccgggcgccccgcggagccggcctcggtgccacccagccgggggtagatgctgcctcgcccaggcgctgagtgaccagaccatggagaccctgcttggtggcctgctagcgtttggcatggcgtttgccgtggtcgacgcctgccccaagtactgtgtctgccagaatctgtctgagtcactggggaccctgtgcccctccaaggggctgctctttgtaccccctgatattgaccggcggacagtggagctgcgcctgggcggcaacttcatcatccacatcagccgccaggactttgccaacatgacggggctggtggacctgaccctgtccaggaacaccatcagccacatccagcccttttcctttctggacctcgagagcctccgctccctgcatcttgacagcaatcggctgccaagccttggggaggacaccctccggggcctggtcaacctgcagcaccttatcgtgaacaacaaccagctgggcggcatcgcagatgaggcttttgaggacttcctgctgacattggaggatctggacctctcctacaacaacctccatggcctgccgtgggactccgtgcgacgcatggtcaacctccaccagctgagcctggaccacaacctgctggatcacatcgccgagggcacctttgcagacctgcagaaactggcccgcctggatctcacctccaatcggctgcagaagctgccccctgatcccatctttgcccgctcccaggcttcggctttgacagccacaccctttgccccacccttgtcctttagttttgggggtaacccacttcactgcaattgtgagcttctctggctgcggaggctcgagcgggacgatgacctggaaacctgtggctccccagggggcctcaagggtcgctacttctggcatgtgcgtgaggaggagtttgtgtgcgagccgcctctcatcacccagcacacacacaagttgctggttctggagggccaggcggccacactcaagtgcaaagccattggggaccccagcccccttatccactgggtagcccccgatgaccgcctggtagggaactcctcaaggaccgctgtctatgacaatggcaccctggacatcttcatcaccacatctcaggacagtggtgccttcacctgcattgctgccaatgctgccggagaggccacggccatggtggaggtctccatcgtccagctgccacacctcagcaacagcaccagccgcactgcaccccccaagtcccgcctctcagacatcactggctccagcaagaccagccggggaggtggaggcagtgggggcggagagcctcccaaaagccccccggaacgggctgtgcttgtgtctgaagtgaccaccacctcggccctggtcaagtggtctgtcagcaagtcagcaccccgggtgaagatgtaccagctgcagtacaactgctctgacgatgaggtactgatttacaggatgatcccagcctccaacaaggccttcgtggtcaacaacctggtgtcagggactggctacgacttgtgtgtgctggccatgtgggatgacacagccacgacactcacggccaccaacatcgtgggctgcgcccagttcttcaccaaggctgactacccgcagtgccagtccatgcacagccagattctgggcggcaccatgatcctggtcatcgggggcatcatcgtggccacgctgctggtcttcatcgtcatcctcatggtgcgctacaaggtctgcaaccacgaggcccccagcaagatggcagcggccgtgagcaatgtgtactcgcagaccaacggcgcccagccaccgcctccaagcagcgcaccagccggggccccgccgcagggcccgccgaaggtggtggtgcgcaacgagctcctggacttcaccgccagcctggcccgcgccagtgactcctcttcctccagctccctgggcagtggggaggctgcggggctgggacgggccccctggaggatcccaccctccgccccgcgccccaagcccagccttgaccgcctgatgggggccttcgcctccctggacctcaagagtcagagaaaggaggagctgctggactccaggactccagccgggagaggggctgggacgtcggcccggggccaccactcggaccgagagccactgctggggccccctgcggcccgggccaggagcctgctccccttgccgttggagggcaaggccaaacgcagccactccttcgacatgggggactttgctgctgcggcggcgggaggggtcgtgccgggcggctacagtcctcctcggaaggtctcgaacatctggacgaagcgcagcctctctgtcaacggcatgctcttgccctttgaggagagtgacctggtgggggcccgggggacttttggcagctccgaatgggtgatggagagcacggtctaggtgggggtgggcatgctccctttcctgtgcgcagggtgggagaaggggaaagaatctcactggcaagtgtttgtggagtttccatggtgatgtttacatccagggacagtttcgtctccctgtcaatggcctcgtgtccccccctaccccgcaacacccacatcacctccccaccacccggccggggtgtgctcagggaatgtggactcgctcaaatgccggactgagccctgagtgtttggaaaggcgagactccgcctttctaatcacaaatgtagcctacaagcaagcggctttggattgcttatg

SEQ ID NO: 449 - DNA, 2744 bp, Artificial
  cDNA Sequence
gaatgcgagaaagtgaagtcaaattcggacttgtaggcgatcagggctgaagacgctgattagagagaaaacagagggtgatggtggctgcacgtggggaatgggtgacatctcccagggggaatgagcacaaggcccagatcggaaaccccaaactcagattttaaggtttggacaagaagtacctgaggagtggaggagtgagaaagaagtgccagagagcctgaggaggaaaatcagcagactggcattatgaagaatgttgtcagaagtagggagtaggcactagtcacctaagataaggagctggattctgcccaagggcactgttatgtggtatacttgttacatgtcctgaggatccgctgaggtatttagagggaatgatcatggttataatcaaaagtggtcttcagaatcttctttgatgactccggaattgatgataaaagcctgtagcttttatactggacatttagtaaagactcatttttgcacttggagagacatagctcgtacaaatgaaaatgtcgtcctggctgaaaaaatgaacagagcagtgacatgctacaatttcagacttcaaaaatctgtatttcatcactggcactcttatatggaagaccagaaagaaaaacttaaaaatattctattgcggatacaacagatcatctattgtcacaagctaaccattatcctaacaaaatggcggaatacagcaagacataagagtaaaaagaaagaagatgagctgatattaaaacatgaacttcaattgaaaaaatggaaaaataggttaatactcaaaagagctgctgcagaagaatccaattttcctgaacgaagttcttctgaagtctttcttgtagatgagactctaaaatgtgacatttcactgttacctgaaagagcaatattacagattttcttctacctcagtttaaaagatgtgataatatgtggtcaagttaatcatgcctggatgttgatgacacaactaaactcactgtggaatgctattgatttttcctcagtgaaaaatgtgattccagataaatatatagtgtctactttgcaaaggtggcgtttaaatgtgctgcgtttgaattttcgtggttgtcttctccgacccaaaactttcagatctgtcagccactgtaggaacttgcaagagttgaatgtctctgactgcccaacattcacagatgaatcaatgagacacatttctgagggctgcccgggggtcctgtgtctcaatctgtctaacacaactatcaccaacaggacgatgcgactcctgccgaggcacttccacaacttacagaatcttagtttggcttattgcagacggttcacagacaaaggcttacagtacctgaacttggggaatggatgccacaagctcatctatctggacctctctggctgcacccagatttcagtccaaggcttcaggtacattgcaaacagctgcactggaattatgcatcttaccattaatgacatgccaactctgacggacaactgtgtaaaagtaggtattgaaaaatgctctcgtattacatcgctggttttcactggtgcaccgcatatctccgattgtactttcagagctctttctgcttgtaaactcagaaagatccgatttgaaggaaataaaagggttactgatgcatccttcaaatttatagacaagaattatccaaatctcagtcacatttatatggctgactgcaagggaataacagacagcagcctcagatccctttcacctttgaagcaactgactgtgttgaatttggcaaattgtgtaagaattggtgatatgggactaaagcaatttcttgatggtcctgcaagcatgaggataagagagctaaatttaagcaactgtgtgcggctaagtgatgcctctgttatgaaactatctgagcgctgccctaatttaaactacttgagtttacgaaattgtgaacatttgactgcccaaggaattggatatattgtaaacatcttttccttggtatcaatagatctctctggaacagacatctctaatgagggtttgaatgtgctttccagacataaaaaattgaaggaactttctgtatctgaatgttatagaatcactgatgatggaattcaggcattctgcaaaagctcactgatcttggaacatttggatgtctcttattgctcccagctgtcagatatgattatcaaagcactggccatttactgcattaacctcacatctctcagcattgctggctgtccaaagattactgactcagcaatggagatgttatcggcaaaatgccattacctgcacattttggatatctctggttgtgtcttgcttactgaccaaatccttgaggaccttcagataggctgcaaacaactccggatccttaagatgcaatactgcacaaatatttccaagaaggcagctcaaagaatgtcatctaaagttcagcagcaggaatacaacactaatgaccctccacgttggtttggctatgatagggaaggaaaccctgttacagagcttgacaacataacatcatctaaaggagccttagaattaacagtgaaaaagtcaacatacagcagtgaagaccaagcagcgtgaccttcagcctcaagcaggaagaacaaaaaatcaagaacttggcaagttttctccatttgttgcaagtatgtttactagctgaatctcaataacaatgtaaacaagcaac

SEQ ID NO: 450 - DNA, 1959 bp, Artificial
  cDNA Sequence
gcccggcccctagtcccagcgcggggagggtactatcgcagcttctccgtcaggccttgggccatggcctcgctacgcaatgccaacccgaggctgaagaactacttcaaggagaactacattcctcaggtctgcgaggcactgttatgtggtatacttgttacatgtcctgaggatccgctgaggtatttagagggaatgatcatggttataatcaaaagtggtcttcagaatcttctttgatgactccggaattgatgataaaagcctgtagcttttatactggacatttagtaaagactcatttttgcacttggagagacatagctcgtacaaatgaaaatgtcgtcctggctgaaaaaatgaacagagcagtgacatgctacaatttcagacttcaaaaatctgtatttcatcactggcactcttatatggaagaccagaaagaaaaacttaaaaatattctattgcggatacaacagatcatctattgtcacaagctaaccattatcctaacaaaatggcggaatacagcaagacataagagtaaaaagaaagaagatgagctgatattaaaacatgaacttcaattgaaaaaatggaaaaataggttaatactcaaaagagctgctgcagaagaatccaattttcctgaacgaagttcttctgaagtctttcttgtagatgagactctaaaatgtgacatttcactgttacctgaaagagcaatattacagattttcttctacctcagtttaaaagatgtgataatatgtggtcaagttaatcatgcctggatgttgatgacacaactaaactcactgtggaatgctattgatttttcctcagtgaaaaatgtgattccagataaatatatagtgtctactttgcaaaggtggcgtttaaatgtgctgcgtttgaattttcgtggttgtcttctccgacccaaaactttcagatctgtcaacagcagcctcagatccctttcacctttgaagcaactgactgtgttgaatttggcaaattgtgtaagaattggtgatatgggactaaagcaatttcttgatggtcctgcaagcatgaggataagagagctaaatttaagcaactgtgtgcggctaagtgatgcctctgttatgaaactatctgagcgctgccctaatttaaactacttgagtttacgaaattgtgaacatttgactgcccaaggaattggatatattgtaaacatcttttccttggtatcaatagatctctctggaacagacatctctaatgagggtttgaatgtgctttccagacataaaaaattgaaggaactttctgtatctgaatgttatagaatcactgatgatggaattcaggcattctgcaaaagctcactgatcttggaacatttggatgtctcttattgctcccagctgtcagatatgattatcaaagcactggccatttactgcattaacctcacatctctcagcattgctggctgtccaaagattactgactcagcaatggagatgttatcggcaaaatgccattacctgcacattttggatatctctggttgtgtcttgcttactgaccaaatccttgaggaccttcagataggctgcaaacaactccggatccttaagatgcaatactgcacaaatatttccaagaaggcagctcaaagaatgtcatctaaagttcagcagcaggaatacaacactaatgaccctccacgttggtttggctatgatagggaaggaaaccctgttacagagcttgacaacataacatcatctaaaggagccttagaattaacagtgaaaaagtcaacatacagcagtgaagaccaagcagcgtgaccttcagcctcaagcaggaagaacaaaaaatcaagaacttggcaagttttctccatttgttgcaagtatgtttactagctgaatctcaataacaatgtaaacaagc

SEQ ID NO: 451 - DNA, 381 bp, Artificial
  cDNA Sequence
tcagcccctggggtagatcccagccccccgcataggtccttttgctggaaaaggaagatggagtggtgggacaaatctgaggagtcgttggaggaggagccacggaaggtgctcgcccctgagcctgaggagatctgggtggcggagatgctgtgtggcctcaagatgaagctgaagcgacggcgagtgtcgctcgtgctccctgagcaccacgaggccttcaacaggctgcttgaggatcctgtcattaaaagattcctggcctgggacaaaggtctgagggtgtcggacaagtatctcctggctatggtcatagtgtatcagccgggccggcctcccctcctggcaataccaatgcattcatttcttcctggctctgtg

SEQ ID NO: 452 - DNA, 1075 bp, Artificial
  cDNA Sequence
cgcttcctgcgcctcttcaggtcaccgcttgctctagttcccaggctttggcctctagtggatgagaatcaccgagtctgcggggctggacgctgaccgcccgggccagcacctaggcgggcgggagctgtgcggcccagggttcgcgcgggccgggtagaggctcgagccgggacccccgagcgtgaaccccggagccagcggcgctggggccagaggggccaggcgggaggtggtggcggaggcgaaggggcgacgggacctgggcctggcccgtgtgtgtcctcggcggcctggcgccggccgtcgctgtacggtgagccccagggaggcggatctgggccccgagaaggacacccgcctggatttgccccgtccggcccgggcccctcgggagcagaacagccttggtgaggtggacgggaggggacttcgcgagcagacgcgcgcgccagcgacagcaccgccccggcctctcgggagccgtggggcagaggctgcagagccccaggagggtctatcagccacagtctctgcaagtttccaagagcagcagaaaatgaacacattgcaggggccagtgtcattcaaagatgtggctgtggatttcacccaggaggagtggtggcaactggaccctgatgagaagataacatacggggatgtgatgttggagaactacagccatctagtttccctggtccttcttcttttcccattaacaagatatgatatcaccaagccaaacgtcatcattaagttggagcagggagaggagctgtggataacgggaggtgaatttccatgtcaacatagtccagaacctgctaaggccatcaaacctattgatcggaagtcagtccatcagatttgctctgggccggtggtactgagtctaagcactgcggtgaagaagatagtaggaaacagtctggatgctggtgccactaatattgatctaaagcttaaggactatggaatggatctcattgaagtttcaggcaatggatgtggggtagaagaagaaaacttcgaaggcttaatctctttcagctctgaaacatcacacatctaa

SEQ ID NO: 453 - DNA, 1146 bp, Artificial
  cDNA Sequence
tgcatccttggagagagctgagagctcgaggtacagaacctgctaaggccatcaaacctattgatcggaagtcagtccatcagatttgctctgggccggtggtactgagtctaagcactgcggtgaagaagatagtaggaaacagtctggatgctggtgccactaatattggatctaaagcttaaggactatggaatggatctcattgaagtttcaggcaatggatgtggggtagaagaagaaaacttcgaaggcttaagtaaggtcaccatttctacctgccacgtatcggcgaaggttgggactcaactggtgtttttgatcacgatgggaaaatcatccagaaaaccccctacccccaccccagagggaccacagtcagcgtgaagcagttattttctacgctacctgtgcgccataaggaatttcaaaggaatattaagaagtacagaacctgctaaggccatcaaacctattgatcggaagtcagtccatcagatttgctctgggccggtggtactgagtctaagcactgcggtgaagaagatagtaggaaacagtctggatgctggtgccactaatattgatctaaagcttaaggactatggaatggatctcattgaagtttcaggcaatggatgtggggtagaagaagaaaacttcgaaggcttaactctgaaacatcacacatctaagattcaagagtttgccgacctaactcgggttgaaacttttggctttcgggggaaagctctgagctcactttgtgcactgagtgatgtcaccatttctacctgccacgtatcggcgaaggttgggactcgactggtgtttgatcacgatgggaaaatcatccagaaaaccccctacccccaccccagagggaccacagtcagcgtgaagcagttattttctacgctacctgtgcgccataaggaatttcaaaggaatattaagaagaaacgtgcctgcttccccttcgccttctgccgtgattgtcagtttcttgagggctccccagccatgcttcctgtacagcctgcaaaactgactcctagaagtaccccaccccacccctgctccttggaggacaacgtgatcactgtattcagctctgtcaagaatggtccaggttcttctagatga

SEQ ID NO: 454 - DNA, 703 bp, Artificial
  cDNA Sequence
gagagctgagagctcgaggtgagctgggctcgcggtcgcccctctcgctcgccctctttgagaaccacggcttccgacctccctggaaatggggggaacatggccgaggcgcgtgggaggccgcctcgtggaggccccggagcggcatcctcagcgccccagcgatccggtgcccattagaacctgctaaggccatcaaacctattgatcggaagtcagtccatcagatttgctctgggccggtggtactgagtctaagcactgcggtgaagaagatagtaggaaacagtctggatgctggtgccactaatattgatctaaagcttaaggactatggaatggatctcattgaagtttcaggcaatggatgtggggtagaagaagaaaacttcgaaggcttaatctctttcagctctgaaacatcacacatctaagattcaagagtttgccgacctaactcgggttgaaacttttggctttcgggggaaagctctgagctcactttgtgcactgagtgatgtcaccatttctacctgccacgtatcggcgaaggttgggactcgactggtgtttgatcacgatgggaaaatcatccagaaaaccccctacccccaccccagagggaccacagtcagcgtgaagcagttattttctacgctacctgtgcgccataaggaatttcaaaggaatattaagaaggtac

SEQ ID NO: 455 - DNA, 240 bp, Artificial
  cDNA Sequence
atgcccggcagacccctaccgacggcggcattccattctggggccacgaggaggcactcatcgtttcgttccaaccgccgccaacggccctggccctcgcgagctctggaactacagaggtcgcacggtgagttgccaggtgtggcccgtaatcggagcgcacaaaacatgatgggacacgtaacgggaccacacagggcacattgggcacttgcaggggcgcgaggtggcggcacgtaa

SEQ ID NO: 456 - DNA, 4590 bp, Artificial
  cDNA Sequence
ggagatctgaagccgagcaacttgcccaagtccttcttcttttcccattaacaagatatgatatcaccaagccaaacgtcatcattaagttggagcagggagaggagctgtggataacgggaggtgaatttccatgtcaacatagtccagggattgtgggactttaccaaatcggtttgtaataacacctagaagacgctatccgatccatcaggcccagtattcctgtctgggggtacttcccaccgtgtgctggaatggttatcacaagaaggctgtgctgtcccctcgcaactccaggatggtgtgtagcccagtgactgtgaggatcgcccctcctgacagaagattttcgcgttctgcgataccagagcagataatcagctcaacactgtcctcaccatcaagtaacgccccagacccatgtgcaaaggagacagtactgagtgccctcaaagagaaggagaagaaaaggacagtggaggaagaagaccaaatattccttgatggccaggaaaataaaagaaggcgccatgatagcagtggcagtggacattcagcatttgagcccctggtggccaatggagtccccgcttcttttgtgcctaagcctgggtctctgaagagaggcctcaattctcagagctcagatgaccacttgaataagagatcccgaagctcttccatgagctccttgacaggcgcttacgcaagtggcatccctagctccagccgcaatgccattaccagttcctacagctccactcgaggcatctcacagctctggaagagaaatggccccagttcatcacccttctctagcccagcctcctcccgctcccagacaccggagaggccagcaaagaaaataagagaagaggagctgtgtcatcattccagttcttcaactccattggcagcagacagggagtcccagggagaaaaggctgcagatacaaccccaaggaagaaacaaaactcgaattctcagtctacacctggcagctctgggcagcgtaagcggaaagttcagctgctgccttctcggcgaggggaacagctgaccttgcctccacctccccagcttggctattcgatcactgccgaggacctagacttagagaagaaggcttcattacagtggttcaaccaggccttggaggacaagagcgatgctgcctcgaactctgtcactgagaccccacctatcactcagccttcatttacctttaccctgcctgctgctgcacctgcctccccacccacctccctcctggccccaagcaccaacccactgttagagagcttgaagaagatgcagactcccccgagcctgccaccctgcccagaatctgctggagcagcaaccactgaggccctctcacctccaaagacacccagcctcctacccccgctgggtttatcacagtcagggccgccagggctgctccccagcccctcctttgactccaaacccccgaccactttgctggggctgatccctgctccatccatggtaccagccactgacaccaaggcacctccaacccttcaggcagagacggctaccaaaccccaagccacatctgccccgtcccccgcccccaagcaaagcttcctgtttggaacacagaacacctcaccttccagccctgccgcccctgctgcatcttcagcacctcccatgttcaagcccattttcacggctccacccaagagtgagaaggaaggccccacaccgcctggcccttcagtcacagccacagcgccctccagctcctccctccccacgaccaccagcaccacagccccgaccttccagcctgtctttagcagcatggggccacctgcatctgtgcccttgcctgctcccttcttcaagcagacaactactcccgccactgctcccaccacaactgccccgctcttcactggcctggccagcgccacctctgctgtggctcccatcacctctgccagtccatccacagactctgcttcgaagcctgcgtttggctttggcataaacagtgtgagcagcagcagtgtgagtaccacgaccagcaccgccactgccgcctcacagcctttcctcttcggggcgccccaggcctctgctgccagcttcaccccggccatgggctccatattccagtttggcaaacctcctgccttgcccacaaccaccacagtcaccaccttcagccagtccctgcacactgccgtgccaacggccaccagcagcagcgctgccgactttagtggttttggcagcaccctcgccacctccgccccggccaccagcagccagcccactctgacgttcagtaacacgagcacccccacgttcaacattccctttggctcaagcgccaagtccccgctcccatcatatccgggagccaacccccagcccgcatttggggccgctgaggggcagccaccgggggccgccaagccggcccttgcccccagctttggcagctctttcacttttggaaactctgcagccccggctgctgcacccacacctgcacctccgtccatgatcaaggtcgtgcctgcgtacgtgcctacgcccatccatcctatctttggcggtgccacgcactcggcgtttgggttgaaagccacggcttcggccttcggcgctcccgccagctcacagcccgcctttggcggctccactgctgtcttcttcggtgcagccaccagctccggctttggagccaccacccagaccgccagcagcgggagcagcagctcggtgtttggcagcacaacaccatcacccttcacgtttgggggttcggcagcccccgctggcagtgggagctttgggatcaatgtggccaccccaggctccagcaccaccaccggagctttcagctttggagcaggacagagtgggagcacagccacctccacccccttcgcagggggcttaggtcagaacgccctgggcaccaccggccagagcacaccgtttgccttcaacgtgagcagcacaactgagagcaaacctgtgtttggaggcaccgccacccccacctttggtctgaacacccctgcgcctggagtgggcacatcaggcagcagcctctcctttggggcatcctcagcacccgcccaaggctttgttggtgttgcacctttcggatcggcggccctttcattttccattggtgcgggatccaagaccccaggggctcgacagcgactgcaggcccgaaggcagcacacccgcaaaaagtagcctttgtcccctgtccctgttccccccaccccttccctaaatctggaccttggcacctgctaggaagagccttggacccttccagttgcgtaaagcaaacctaccccggatctctggcttcagccgccagggggcagtggcagccctggggccctttcccttctggaggaagcacaagcctcagggaaggggaagcaggatgcggagggccaaagcccgggacctctacttgaacagttctactggggaggctggagaactaaggaaacacctgtacatagtgtccgctgccctgactcccgcttagcacacccttaggcaggcgccccttccacctttccccgagaccgtcgtcgctggagggggcagggtccagcccgcctggatcggtggtgtgcacctgatgggatttgggaaatgggctatccgtaaagctttatcttgcttggcttagctgtgagaagtggttctcttcctctggtcccttctggggactctgtttccccatttcttgctgctgtgtccctcaccagttccttgcaggattccttcgtttttaaatgcccttgaatctagctttgccttggagaccccagtgggtgctgctcctgccgttttcttcctgccaagcctgaatcaatgtttcatctccaaccctctgccagtttggcccctcagagcttggtggctcaagactgttagcctggcagagccaggggtgaagggagaagctcttggagcaggcaggatgcccaccgctgcttcagctgcctcctcgcccagctaccctttggccccattgggccctcgtctgcctctccaggattgtatgtttcaagccttgtcctgtgttcctttgtctgacgctctgtgtattgctctttgaatcgagtttggaggaagagttgagttgtatgagtggcggcatgttggtagtgccggacttcctgtttcaagttttctggggcctcgctaattgaatgtggaaagtagcaccacttgacggctacaagtgccgactcctgaattttcccatggtgttctgacttcaagggctggcagccagggagaatgggcccaggggaagcaaagacctcttccctctgccgtttctgtcccacttaactgacctcactggaggctacatcacccaaagtagatgttagaaaacctaaattaatgaaccatatttttaaaatcctatttttcccaaacagggccctctgcagcccatcctttccttccgtccttctgaaaccacataccccaggcccaagcgccttgctgccacgcccaacctctttgggagaagtatgaatgcgtgtgtctaaatt

SEQ ID NO: 457 - DNA, 1350 bp, Artificial
  cDNA Sequence
gagcatgatggggcatgtgcgggagcgccaggcggggcatgtaaccagagcgtgcggggcatgatggggcacggacatggggggttaggtggggcacgtaattggagctcgcggggcaggatggggcatctaactggagcgacagagagcacgatggggcacttacaggggccggaggctggcccgggcagtgagtgtggatggcttggcaggtgagcctgctggagctggaggactggcttcagtgtcccatctgcctggaggtcttcaaggagtccctaatgctacagtgcggccactcctactgcaagggctgcctggtttccctgtcctaccacctggacaccaaggtgcgctgccccatgtgctggcaggtggtggacggcagcagctccttgcccaacgtctccctggcctgggtgatcgaagccctgaggctccctggggacccggagcccaaggtctgcgtgcaccaccggaacccgctcagccttttctgcgagaaggaccaggagctcatctgtggcctctgcggtctgctgggctcccaccaacaccacccggtcacgcccgtctccaccgtctgcagccgcatgaaggaggagctcgcagccctcttctctgagctgaagcaggagcagaagaaggtggatgagctcatcgccaaactggtgaaaaaccggacccgaatcgtcaatgagtcggatgtcttcagctgggtgatccgccgcgagttccaggagctgcgccacccggtggacgaggagaaggcccgctgcctggaggggatagggggtcacacccgtggcctggtggcctccctggacatgcagctggagcaggcccagggaacccgggagcggctggcccaagccgagtgtgtgctggaacagttcggaaatgaggaccaccatgagttcatctggaagttccactccatggcctccaggtaataaccttggagagagctcagccagggtctggtggctgcgggcacgggcatctcagctccactggttcctccattcagcttaaccagcgcctcccaagcagctgcctatagctggctctataactgagcctggggaagatagaggaaagtcacgtccctgccttcaagggtctcgcagacaggtggggaggcagatggtgaactgtgggtacctagaacagcagaagttcactcaagctacagaaatactagaggagggtagctcatgcctgcaatcccagtactttgggaggccaaggcaggagtattgctggaggccgggagttcgagaccagcctggccaatgtagtaacacccccgtctctacaaaaaatacaaaaataaaaaaattagttggg

SEQ ID NO: 458 - DNA, 1606 bp, Artificial
  cDNA Sequence
gcgctttgcgacagagccgtaaaggcgcgcgggaacatggggctgtacgctgcggtggcaggcgtgctggccggcgtggagagccgccagggctctatcaaggggctggtgtactccagcaacttccagaacgtgaagcagctgtacgcgctggtgtgcgaaacgcagcgctactccgccgtgctggatgccgtgatctccagcgccggcctcctcagtgcgaagaagctgcagccgcacctggccaaggtgctagtgtatgagttgttgggaaagggctttcgagggggtgggggccaatggaaggctctgttgggacggcaccaggcgaggtgttgagttggctcggctcaaggttcttcggggtgtgagctggcatgaggacctgttggaagtgggatccaggcctggtccagcctcccagctgcctcgatttgtgcgtgtgaacactctcaagacctgctccgtttatgtagttatttcaagagacaaggtttctcctatcagggtcgggcttccagcctcgatgacttacgagccctcaaggggaagcattttctcctggaccccttgatgccggagctgctggtgtttcccgcccagacagatctgcatgaacacccactgtaccgggccggacacctcattctgcaggacagggccagctgtctcccagccatgctgctggacccccgccaggctcccatgtcatggatgcctgtgccaccccaggcaataaagaccagtcacttggctgctcttctgaagaaccaagggaagatctttgcctttgacctggatgccaggcggctggcatccatggccacgctgctggcctgggctggcgtctcctgctgtgagctggctgaggaggacttcctggcggtctcccccttagatccgcgctatcgtgaggtccactatgtcctgctggatccttcctgcagtggctcgggtatgccgagcagacagctggaggagcccggggcagggacacctagcccggtgcgtctgcatgccctggcagggttccagcagcgagccctgtgccacgcgctcactttcccttccctgcagcggctcgtctactccatgtgctccctctgccaggaggagaatgaagacatggtacaagatgcgctgcagcagaacccgggcgccttcaggctagctcccgccctgcctgcccggccccaccgaggcctgagcacgttcccgggtgccgagcactgcctccgggcttcccccaagaccacgcttagcggtggcttcttcgttgctgtaattgaacgggtcgagatgccgacctcagcctcacaggccaaagcatcagcaccagaacgcacacccagcccagccccaaagagaaagaagagagcaaaaagctgcagccggtgcttgcacaccgccttgcacatagcagaggctccgggctcactccttcctggtgggaaaggaagatgcctgtcctctccgtggaagaccctgggccctcaccgcaggcagcagtttgcgttttgaaaggttattgggtcccttcctcgggctgtgttcttgctggtgagcaaaagtgttgcctgcagaaataaaatgcagaacgtactct

SEQ ID NO: 459 - DNA, 1534 bp, Artificial
  cDNA Sequence
gcgctttgcgacagagccgtaaaggcgcgcgggaacatggggctgtacgctgcggtggcaggcgtgctggccggcgtggagagccgccagggctctatcaaggggctggtgtactccagcaacttccagaacgtgaagcagctgtacgcgctggtgtgcgaaacgcagcgctactccgccgtgctggatgccgtgatctccagcgccggcctcctcagtgcgaagaagctgcagccgcacctggccaaggtgctagtgtatgagttgttgggaaagggctttcgagggggtgggggccaatggaaggctctgttgggacggcaccaggcgaggtgttgagttggctcggctcaaggttcttcggggtgtgagctggcatgaggacctgttggaagtgggatccaggcctggtccagcctcccagctgcctcgatttgtgcgtgtgaacactctcaagacctgctccgtttatgtagttatttcaagagacaaggtttctcctatcagggtcgggcttccagcctcgatgacttacgagccctcaaggggaagcattttctcctggaccccttgatgccggagctgctggtgtttcccgcccagacagatctgcatgaacacccactgtaccgggccggacacctcattctgcaggacagggccagctgtctcccagccatgctgctggacccccgccaggctcccatgtcatggatgcctgtgccaccccaggcaataaagaccagtcacttggctgctcttctgaagaaccaagggaagatctttgcctttgacctggatgccaggcggctggcatccatggccacgctgctggcctgggctggcgtctcctgctgtgagctggctgaggaggacttcctggcggtctcccccttagatccgcgctatcgtgaggtccactatgtcctgctggatccttcctgcagtggctcgggtatgccgagcagacagctggaggagcccggggcagggacacctagcccgcggctcgtctactccatgtgctccctctgccaggaggagaatgaagacatggtacaagatgcgctgcagcagaacccgggcgccttcaggctagctcccgccctgcctgcccggccccaccgaggcctgagcacgttcccgggtgccgagcactgcctccgggcttcccccaagaccacgcttagcggtggcttcttcgttgctgtaattgaacgggtcgagatgccgacctcagcctcacaggccaaagcatcagcaccagaacgcacacccagcccagccccaaagagaaagaagagagcaaaaagctgcagccggtgcttgcacaccgccttgcacatagcagaggctccgggctcactccttcctggtgggaaaggaagatgcctgtcctctccgtggaagaccctgggccctcaccgcaggcagcagtttgcgttttgaaaggttattgggtcccttcctcgggctgtgttcttgctggtgagcaaaagtgttgcctgcagaaataaaatgcagaacgtactct

SEQ ID NO: 460 - DNA, 963 bp, Artificial
  cDNA Sequence
gcccaagcaaagcaggatttcgttcagcactactcccagatcgttagggtgctgactgaggatgagatggggcacccagagacaggagatgctactgcccggctcaaggaggtcctggagtacaatgccattggaggcaagtatcaccgaggtttgatggtgctagtagcgttccgggagctggtggagccgaggaaactggatgctgatagtctccagtgggcaccgactgtgggctggtatgcgcaactgctgcaagctttcttcctggtggcagatgacattatggattcatcccttacctgccagggacagatctcctggtatcagaagctgggcatgggtttggatgccatcaatgatgctatccttctggaagcatgtatctactgcctgctgaagctgtattgccgggagcagccctattacctgaacctgatggagctcttccagcagaattcttatcagactgagattgggcagaccctcgacctcatcacaaccccccagggcaatgtggatcttcgcagatgcaccgaaaaaaggcacaaatctgttgtcaagtacaagacagctttctactccttctaccttcctgtagctgcagccatgtacatgtcaagaatggatgacaagaaggagcacaccagtgccaagaagatcctgctggagattcaagagttctttcagattcaggatgattaccttgacttctctggggaccccagtgtgactggcagagttggcaatgacttccaggacaacaaatgcagctggctggtggttcagtgtctgctacaggccactccagaacagtaccagatcctgaaggaaaattacaggcagaaggaggccgagaaggtggcccgggtgaaggcactatacgaggagctggatctgccagccgtgttcttgcagtatgagaaagacagttacagccacgttatgggtctcatcgaatag

SEQ ID NO: 461 - DNA, 1947 bp, Artificial
  cDNA Sequence
cagtgtggcagtggaggccgtcagattactgatacttatccttaagaacatggaaggggtgctgatggacgtggactgtgagagcgtctaccccattgtgtaggcctctaattgaggcctggcctctgctgtgggtgaatttctgtactggaaacttttctaccctgagtgcgagataagaacgatgggtggaagagagcaacgccagagcccaggtgcccagaggactttcttccagcttctgctgtccttctttgtggagagcaagctccacgaccacgctgcttacttagtagacaacctgtgggactgtgcagggactcagctgaaggactgggagggtctgacaagcctgctgctggagaaggaccagagcacgtgccacatggagccagggccagggaccttccacctcctagggtgaaaccaggagagattgcttgcttcacttgtacaagaatcggctcccagacacctgccactcgtgaatgcatctgataaactcactcacactgaggccttggggactgaggccctggcggatcacgggtgcccaggggctcggaggccgcctcctctgggaagcctgcccaggttccgctggactcccacaggcaatacccctgggccttcctcgcggcccctgttggccccaattcccccaccccctgcaaggtctgtgcctctcctgcagccccgccaccaactagggcgagaggagctcgcccccacccaaacgtattggttcgatgaaggaagggcccatggttctgccactggccctggacacccagtgctggtttcccgtggaagtccccctggactgagtggcggctgggtgctctagtgatttgcgacctggggcctctgactcccatcatgttgggaaagtcgttgaacctcaccggtgaaacgggcacagtgaagtcatttccccgaagtctcaggactctgtgtaaggctggggacaggggcttgttggggcctaagggcaccttgggaactgcaggagcccgttctgcctccataagacactcactcctggcagggtcccctctccgggcacagcccagatccacccccatcatccctctccatctgtggctccctgcccctcacagaggattcatcactctgttcagaatccccaggactccctagggaaggaggtcccagcctggcctcccaagaccgtgcttgcccaattccaggacttcctcacatggctcctacctccagcacagaagcggcactaaaccaggtggtcaatcagggagcaccaccgaggttctgaatggtccagggatgagcagtgatgcctcaagctaagccaatcaaagccttccctgggattgtctcaaggagtccgcagtgagattctgggtctcagtactgggaaagggtgaggctgaggctgcctgctgtcctgggggcctcaccctgccaccaacaggaagccacacagagggaagcagaaatgagacgcagccagtgagggcagggtacaaaggtgagatcccggagagacagatgctgggacatcatccttgggtactggttccaacagtgcctgcagatggagccaccctcggagagtccacaacagcagccaatccattctatgcgtgtctgagctactttaagtcgggtttttgactgtttgaatgagagtctcatcttggctaggcaccatggcgcaacaactggggaggtggaggtaggaagattgcttgaggccaagagtcccagagcagcctgggcaacctatcaagacgctgtctttacgaaaagaaaaaaaactagctaggtgtggtggtgcgtgcctgtggtcccagctactggggaggctgaggtgggaggattgcttgagcccaggaagtggaggctgcagtgacctatgatggcaccactgtactccagcctgggtgacagagcaagaccctgtct

SEQ ID NO: 462 - DNA, 1281 bp, Artificial
  cDNA Sequence
atggagctgagctataggctcttcatctgcctcctgctctggggtagtactgagctgtgctacccccaacccctctggctcttgcagggtggagccagccatcctgagacgtccgtacagcccgtactggtggagtgtcaggaggccactctgatggtcatggtcagcaaagacctttttggcaccgggaagctcatcagggctgctgacctcaccttgggcccagaggcctgtgagcctctggtctccatggacacagaagatgtggtcaggtttgaggttggactccacgagtgtggcaacagcatgcaggtaactgacgatgccctggtgtacagcaccttcctgctccatgacccccgccccgtgggaaacctgtccatcgtgaggactaaccgcgcagagattcccatcgagtgccgctaccccaggcagggcaatgtgagcagccaggccatcctgcccacctggttgcccttcaggaccacggtgttctcagaggagaagctgactttctctctgcgtctgatggaggagaactggaacgctgagaagaggtcccccaccttccacctgggagatgcagcccacctccaggcagaaatccacactggcagccacgtgccactgcggttgtttgtggaccactgcgtggccacaccgacaccagaccagaatgcctccccttatcacaccatcgtggacttccatggctgtcttgtcgacggtctcactgatgcctcttctgcattcaaagttcctcgacccgggccagatacactccagttcacagtggatgtcttccactttgctaatgactccagaaacatgatatacatcacctgccacctgaaggtcaccctagctgagcaggacccagatgaactcaacaaggcctgttccttcagcaagccttccaacagctggttcccagtggaaggctcggctgacatctgtcaatgctgtaacaaaggtgactgtggcactccaagccattccaggaggcagcctcatgtcatgagccagtggtccaggtctgcttcccgtaaccgcaggcatgtgacagaagaagcagatgtcaccgtggggccactgatcttcctggacaggaggggtgaccatgaagtagagcagtgggctttgccttctgacacctcagtggtgctgctgggcgtaggcctggctgtggtggtgtccctgactctgactgctgttatcctggttctcaccaggaggtgtcgcactgcctcccaccctgtgtctgcttccgaataaaagaag

SEQ ID NO: 463 - DNA, 465 bp, Artificial
  cDNA Sequence
atggtcaatcccaccgtgttctttgacattactattgagcccttgggctgcgtctccttcaagctgttagcagacagtgttgtaaagacagcagaaaactttcgttctctgagcactggagagaaaggatttggttataaggggttctttcacagaattactccagggattatgtgtcagggtggtaactttacacaccataatggcactggtggcaagtccatctatggggagaaattcgatgaagagaacctcatcctgaagcatacagatcctggcatcttgcccatggcagatgttggacccaacacaaatgcttcccagtttttcatctgcactgccaagactaagtggttagatggccagcatgtctttggcaaggtgaaagcgagcatgaatattgtggaggccatggagcgctacgagtccaggaatggcaagaccagcaagaagatcaccattgct

SEQ ID NO: 464 - DNA, 2614 bp, Artificial
  cDNA Sequence
ctgagagtcggagccacagccagagccctgcccaggccgagccggagctgcagcccgagcgcggtggtgccctcagccccgtcctcttgtcctcctcagcctcggtgccttggaatttgtgtcgctgagtcagcaagcctttcagatttgcccggtttttgttgtttgtggtttgtatcaagatgggaactcaaacaagtcattcctcctaaggagctggtgtcttcatccagaagggacagtttgtgccagctctccagagagaaaagatctgccggaggcgctgggcaatgaccccgggactccaggccagaggggtctgaagctgtttgggaaagcagcgggactccttgggaagatggccatggccccaagcccttccctggtgcaggtgtacaccagccccgcggctgtggccgtgtgggaatggcaggacgggctgggcacctggcacccctacagtgccaccgtctgcagcttcatcgagcagcagtttgtccagcagaagggccaacgttttgggcttgggagcctggcccacagcatccccttgggccaggcagacccctcgctggccccttacattattgacctccccagctggacccagttccgccaggacaccggcaccatgcgggctgtgcggagacacctgttcccccagcactcagcccctggccgaggtgtcgtctgggagtggctgagcgacgatggctcctggactgcctatgaagccagcgtctgtgactatctggagcagcaggtggccaggggcaaccagctcgtggacttggcccccctggggtacaactacactgtcaactacaccacccacacgcagaccaacaagacttccagcttctgccgcagcgtgcggcgccaagcagggccgccttacccggtgaccaccatcatcgctccgccgggccacacaggcgtcgcctgctcttgccaccagtgcctcagtggcagcagaactggccccgtgtcaggccgctaccgccactccatgaccaacctccctgcataccccgtcccccagcaccccccacacaggaccgcttctgtgtttgggacccaccaggcctttgcaccgtacaacaaaccctcactctccggggcccggtctgcgcccaggctgaacaccaccaacgcctggggcgcagctcctccttccctggggagccagcccctctaccgctccagcctctcccacctgggaccgcagcacctgcccccaggatcctccacctccggtgcagtcagtgcctccctccccagcggtccctcaagcagcccagggagcgtccctgccactgtgcccatgcagatgccaaagcccagcagagtccagcaggcgctcgcaggcatgacgagtgttctgatgtcagccattggactccctgtgtgtcttagccgcgcaccccagcccaccagccctcccgcctcccgtctggcttccaaaagtcacggctcagttaagagattgaggaaaatgtccgtgaaaggagcgaccccgaagccagagccagagccagagcaggtcataaaaaactacacggaagagctgaaagtgcccccagatgaggactgcatcatctgcatggagaagctgtccacagcgtctggatacagcgatgtgactgacagcaaggcaatcgggtccctagctgtgggccacctcaccaagtgcagccatgccttccacctgctgtgcctcctggccatgtactgcaacggcaataaggatggaagtctgcagtgtccctcctgcaaaaccatctatggagagaagacggggacccagccccagggaaagatggaggtattacggttccagatgtcgctccccggccacgaggactgcgggaccatcctcatagtttacagcattccccatggtatccagggccctgagcaccccaatcccggaaagccgttcactgccagagggtttccccgccagtgctaccttccagacaacgcccagggccgcaaggtcctagagctcctgaaggtggcctggaagaggcggctcatcttcacagtgggcacgtccagcaccacgggtgagacggacaccgtggtatggaacgagatccaccacaagacagagatggaccgcaacattacgggccacggctatcccgaccccaactacctgcagaacgtgctggctgagctggctgcccagggggtgaccgaggactgcctggagcagcagtgacctcgcaccccagcacgcccgcctctggtggccaccccgctgccccatggctggctgggtggccaggcaggaagtgcccagcccgagaggctgggaggtttgttgagggtgtggggtgtgccccacctgaagccggggctccccctgcctgcctctctctcctcctcccctctgggaattgggcagccctgggcagttgtactcatgggggcttaggatgcagctacctcagtgcgcagggcccgtctgtcctctgggggctgcttcgggcccgcggtgctcggggcctggtgtggggcgagtagagacttccccagcctggacgggcgtgggttctgggtcagcttcttttacctcaattttgtttgcaataaatgctctatagcc

SEQ ID NO: 465 - DNA, 744 bp, Artificial
  cDNA Sequence
atggtggaccgcgagcaactggtgcagaaagcccggctggccgagcaggcggagcgctacgacgacatggccgcggccatgaagaacgtgacagagctgaatgagccactgtcgaatgaggaacgaaaccttctgtctgtggcctacaagaacgttgtgggggcacgccgctcttcctggagggtcatcagtagcattgagcagaagacatctgcagacggcaatgagaagaagattgagatggtccgtgcgtaccgggagaagatagagaaggagttggaggctgtgtgccaggatgtgctgagcctgctggataactacctgatcaagaattgcagcgagacccagtacgagagcaaagtgttctacctgaagatgaaaggggactactaccgctacctggctgaagtggccaccggagagaaaagggcgacggtggtggagtcctccgagaaggcctacagcgaagcccacgagatcagcaaagagcacatgcagcccacccaccccatccgattaggcctggctcttaactactccgtcttctactatgagatccagaacgccccagagcaagcgtgccacttggccaagaccgcgttcgacgacgccatcgccgagcttgacaccctcaacgaggactcctacaaggactccacgctcatcatgcagctcctccgcgacaacctcacgctctggacgagcgaccagcaggacgacgatggcggcgaaggcaacaattaa

SEQ ID NO: 466 - DNA, 2800 bp, Artificial
  cDNA Sequence
ggggccgctccagctggtgccggccacctccactcccctttgcttcttgctgtccctaaggtcggatggggacaggctggggccaccagccagctccatggacagggactttgcctctgctcaccttccagctgtggaaagaaaagaagaaacgcctgtgttgatttccatttggaagatccttcctcctcctaaacttccaggggcagacaaagtgattcgatcttggattgactgtagaagaagggacagaaagagcccagaacattcccccagatgttccaactgtgacttctccctggcgccttgatgggagcatctgaaacacccttcaccatctagatgcacaaggaagcagagatgctaattggtccccagctggatgagaagcgctgggggtggaggttgggagatgggagtgctgcccctcccttcctcccccaagccctgtctttccttctcctcctgccactggccagcgccctacagcccactccactgccctttcaagagctgaggctggtggggggccccagccgctgccggggccgcctggaagtcatgcacggtggctcctggggcagcgtctgtgatgacgactgggacgtggtggacgccaacgtagtgtgtcgccagctgggctgtggcctggcactgcccgtgccacggccccttgcctttggccaaggccgaggccccatcctgctggacaacgtggagtgccgcgggcaggaagctgcgctgagcgagtgcggcagccgcggctggggcgtccacaattgctttcactacgaggatgtggctgtcctgtgtgatgaattcttgccaacgcagcccccaacaaggaagatgttaaccagtagagcacctcctacgacactgccgaatggaaaaagtgagggcagcgtacgcctggtagggggcgcgaacctgtgtcagggccgagtggagatcctgcacagtggcctgtggggcaccgtgtgtgacgacgactgggggctgccggatgccgctgtggtctgtcgtcagctgggctgcggggcggccatggccgccaccaccaacgccttcttcggctatggcaccggacacatcctgctggacaacgtgcactgcgaaggcggcgagccccgcctggcagcctgccagagcctgggctggggtgtgcacaactgcggccaccacgaggacgcgggcgcgctctgcgcaggcctgggtcccccaacgctcacagcactgccatcctcagccacaagagaggactgggcttggcagacagatccgtccgctacaggagttggcccccagccttcccgggagacagcactgctcaccaccgccgcctgggccgcggggaagaaaagtggacggctgcgactggtgggcggcccgggtccgtgccgcggccgcgtggaggtgttgcacgccgggggctggggcaccgtgtgcgacgatgactgggactttgcggacgcgcgcgtggcctgccgcgaagcgggctgcgggcctgcgctgggcgctacgggactgggccacttcggctacggccgcggccccgtgctgctggacaacgtgggctgcgccggcaccgaggctcgcctgagcgactgcttccacctgggctggggccagcacaactgcggccaccacgaggacgcgggagcgctctgcgcaggcccagaggagctgggactgcaagtccagcaggatggttctgagaccacgcgggtgcccactcctcggcccagggacgggcatctacgtctggtcaatggagcccaccgatgcgagggacgtgtagagctctacctagggcaacggtggggcactgtctgtgatgatgcttgggacctgcgggcagccggtgtcctgtgccgccagctgggctgtggccaggccctcgcagcccctggcgaggctcactttggcccaggccgaggccccattctcctggacaatgtcaagtgccgtggggaagaaagtgctctgctgctctgctctcatatccgctgggatgcccacaactgtgaccacagcgaggatgccagtgtcctgtgccagccttcatgacccagcccgctctgcagaccacctcttcttctgggagctgtgacctcccttcctcctccaggaagccctcctcttgtgatgactacagttcactttgcccctccttcccttgcctgggagagagcctacctagacagtgcagtcctgcttgggggagcctggctgtacccccgtccacttactgcgtgacctcagcctgtcatcgactgttgtgagcccaattcagtgaaagctcctgtggttttgctcagccaaaaccaaaacgaggggaagaggatgattcctaactcttctgtttggtggggctctttttatagcaccagactctgccttccttgacctagatccaggaggctcaggggctctttaaatggggtatctcctcttcccccaacccatcttgggatccccaagaagagggaaggcaggaggggcctacagctcctaccttgggccctcaggggctgcagaggaacctgggtccctgtcctgccctgctccgcgagggcctggactaactcagatggtgctcggctggacaaggggactgggggaggggccaaagcagggacagtggcccctccctgcagctggaaccagcatctctgatttatgccgtctccaccacagagcctccactttgcaggagtgaagaaccctgggggcctgtagccaccagttcataggtgccaagtcaataaagcattgtcccccgtctcttataactgca

SEQ ID NO: 467 - DNA, 1321 bp, Artificial
  cDNA Sequence
atgactgggactttgcggacgcgcgcgtggcctgccgcgaagcgggctgcgggcctgcgctgggcgctacgggacctggacaacgtgggctgcgccggcaccgaggctcgcctgagcgactgcttccacctgggctggggccagcacaactgcggccaccacgaggacgcgggagcgctctgcgcaggtgaggctgacagcgaaggcccagaggagctgggactgcaagtccagcaggatggttctgagaccacgcgggtgcccactcctcggcccagggacgggcatctacgtctggtcaatggagcccaccgatgcgagggacgtgtagagctctacctagggcaacggtggggcactgtctgtgatgatgcttgggacctgcgggcagccggtgtcctgtgccgccagctgggctgtggccaggccctcgcagcccctggcgaggctcactttggcccaggccgaggccccattctcctggacaatgtcaagtgccgtggggaagaaagtgctctgctgctctgctctcatatccgctgggatgcccacaactgtgaccacagcgaggatgccagtgtcctgtgccagccttcatgacccagcccgctctgcagaccacctcttcttctgggagctgtgacctcccttcctcctccaggaagccctcctcttgtgatgactacagttcactttgcccctccttcccttgcctgggagagagcctacctagacagtgcagtcctgcttgggggagcctggctgtacccccgtccacttactgcgtgacctcagcctgtcatcgactgttgtgagcccaattcagtgaaagctcctgtggttttgctcagccaaaaccaaaacgaggggaagaggatgattcctaactcttctgtttggtggggctctttttatagcaccagactctgccttccttgacctagatccaggaggctcaggggctctttaaatggggtatctcctcttcccccaacccatcttgggatccccaagaagagggaaggcaggaggggcctacagctcctaccttgggccctcaggggctgcagaggaacctgggtccctgtcctgccctgctccgcgagggcctggactaactcagatggtgctcggctggacaaggggactgggggaggggccaaagcagggacagtggcccctccctgcagctggaaccagcatctctgatttatgccgtctccaccacagagcctccactttgcaggagtgaagaaccctgggggcctgtagccaccagttcataggtgccaagtcaataaagcattgtcccccgtctctt

SEQ ID NO: 468 - DNA, 1937 bp, Artificial
  cDNA Sequence
aatttggaatcaataggcaggagtcattttcaaatcaagaaagatcagaatttggtaacagactggatgagactgataaaggagagcgcccacaatgactctcagggttccctggaagggacgggggcgggcatactgcggtgctacagaaggtggcagcagcaggtcccagggctccagttacagcagctcagacctgcactcatgccaaggactctcacagaccctttccctgcaatgatttcactgagtgcagactccagcaggtgcgcccacagcgcagctcctgccctcaggacctctcaggcagttgggggcagaggcacctctgtgcaggggcctgtgttcactcttctgcaaatggcgagtggcaggctgggaatgaacctcagggctgtgccttccttaagcctggactgttccactgtatcaacatacctgcctcacacaaacaattctaccagcacgggatcagtaatatttcatacatcagaggtgtgtgagaaactaattttgcctggaagaggggtcagggcaggctacagagaggaaggtgtgcacaggtgaggccttgaggggttgggaggcagggaggggagctgctttccaggcaaagggaacgaggagaagatttccacataaagatctgggccttggcacctcactcctggcagcctgtctgtaattcactctggtcacccctctgtggagcagtgtgcctgcctcagtcatctctgttgatgatttaagcctagcagccttcagccaaatgtggcaactgtgtaagccaatacccagctagctcctggaccactcggatgcccatcaacatgtacgaggctggggttacttctcctgggatcccagaaatcctcagatttgcacgcaatgcaaatgggcattcgggggggcctgtgggtggtcccgattctgttcttgggagcgggagtgaaaagcaagcctgtcgtggggaaactggcaccttcactggtggccacgctgctggggctgggcgtgaagctgcctccggcccttggagaggagtgtgagggaagggaggcggcagtgctttttatacacaggagctggaggagggtgatggcagcttggaggaagtcatcactgccatggtaggggggaaatctggaaatattgggcatgtggccctccccttcccaccgtaaccccaagctcctcagcccacttctttccaccaggcacctttgggcttccctctaggtggaacagccaagtcctgagtctctttgctcagaagctcaagtgattcaatttcttttctccaaactttcccaagactgcaatacctcttggaaaggacgtgaccaaatgtggctgagacacactgggcagagccgcactactcatttatgcaaaaccattactctggccgccgcatcagtctcccttccccttttcagcaatcatgtatcccattagcctgtttgattgccgctgctcacaaaggggcgccttcgctgaaccgtcttcaatggcctctggatctctcccctgagagaagccggctaatttggaatgtggtcgtgtgtatgaatccgacacagcctcagtcacaatcgggtgtccttttctgtagctgctgtttatgatcactttgccttgcctctctgggagccataattcaccacatactggagataggctgggtgttcttttccccgtgaatcctggacaggatgtacacaaatgtgctagccccttcttggtgaccaggctaattcctcagtggcttggtggctgctgcctctcattagagggattccctaagcactatttgcttgacaaattttcaaggtttttaaaagcagaagcctttgctaattttcccaagttggcctaagagtccactgtgaactgcagcagaaattggggaaatttaataaatgttgatcaatgac

SEQ ID NO: 469 - DNA, 13763 bp, Artificial
  cDNA Sequence
tcttcccggaggtcctccagataccgccggagtatgagtggccttcccaatctacaggaaacattaaaagagagacaggcaagatttagagaggcaagggaaagccgaagactgaaaattgacccttcatacaaatatatatttgaaattctagcagaaaatcttggcctggacatagtaactgttgaagaattaattttggattgcccatctaatgtggtcgaactattgctggagcaactaaaggggcaaaaatgatgaaattgtatatagacaatgcagccccggataaactaaaaggactgtgcatattttttgttcgttgccgtaatgatgttgctataaatgttaaaactattcaagaggaagcgctctttactgttctggatgcgtcgaaaggactcttaaatggaattagggatatgttggcaaatatatttctaccagctgttcttgcaacaaacaactggggtgctttaaaccagtccaagcagggagaatctgaaaaacatattttcactgaaaccatcaacagatatctttcatttttagatggtgctagaataagtattgagggaacagtgaagttaaagacaatagacaatgttaatttttccaaactgcacacctttgaagaagtaactgctgcagccagcaactcagaaactgttcatcagctggaggaagtgctgatggtatggtacaaacagatcgaacaggtacttattgagagtgagcagatgagaaaagaagctggtgattcaggtccactcactgaattggaacactggaaacgcatgtcagccaagttcaactatatcattgagcagattaaagggccaagttgtaaggctgtcataaatgtgctaaatgttgcacactccaaactgctaaagaattggcgtgatttggatgcaagaatcactgatacagcaaatgaatccaaagataatgtcagatatttgtatactttggaaaaagtgtgtcaacctctctataaccatgacctagtttccatggcacatggaatacaaaatttgattaatgccatcagaatgattcacggtgtgtcaaggtattataatacctcagagagaatgacctcattgtttatcaaggtaacaaatcaaatggtaacagcatgtaaagcatatattactgatggaggattaaaccatgtatgggatcaggaaacgccagttgtactaaagaaaattcaggactgcatttttctattcaaggaatatcaggcatcttttcataaaacaaggaaactgatttcagaatcctcaggggaaaaatcttttgaggtttcagaaatgtatatatttggaaaatttgaagctttttgcaaaagactggagaagattacagaaatgataactgttgtgcaaacatattcaaccttgagtaattctaccatagaaggaatagatattatggcaataaaattcagaaatatataccaaggggttaagaaaaagcaatatgacattctggatccaagaaggacagaatttgacacagatttcttagatttcatgacaaaaatcaatggtttagaggtacaaatacaggcatttatgaacagtagttttgggaaaatcttatcttctcagcaggctcttcagctacttcaaaggtttcagaagctgaacattccctgtctgggattagaaataaaccacacaatagagcgtattcttcagtactatgtggctgaacttgatgctactaagaaggcaagtctttatcattctcagaaagatgacccccctcttgctcgcaacatgccccctatagcaggaaaaatactctgggtgaggcagctctatcgccggataagtgagcccatcaattatttctttaaaaactcagacattttatcaagtccggacggtaaagctgtcatccgtcagtataacaagatctcctatgtgctggtggaattcgaggtggtctatcacacagcctggatcagagagatttcacagttgcattacgctttacaagccacgctttttgtgcgacatccagaaacagggaagttgctggttaatttcgatcccaaaattttggaagttgttcgggaaactaagtgtatgataaaaatgaagttggatgtaccagaacaggcaaagagattgctaaaattggaaagtaaattgaaagcagacaaactgtatttgcagggtcttctgcaatattatgatgagttatgtcaggaagtgccttctgtgtttgtcaatctgatgaccccaaaaatgaaaaaggtggaatctgtgttgaggcaaggactcacagtgttaacatggtcgtctttaacactggaaagcttctttcaagaagtcgaattagttttggatatgttcaatcaacttttaaagaagatcagtgacttgtgtgaaatgcatattgatacagttctgaaggagatagccaaaactgtgttgatttctctgcctgaaagtggtgctaccaaagtagaagatatgttgaccctcaatgagacatacacaaaagaatgggctgacattctaaaccacaaaagtaagcatgtggaagaagctgtcagagaacttatatcaatatttgagcagatttatgaagtgaaatacactgggaaagtaggaaaacagtcagaacagcggaaacacgttgtttttggaagtgaaacaggagagggtgaaaacaatgactatgaagctaatattgtgaatgagtttgatactcatgataaagaagatgaatttaaaaaggagtgtaaagaggtctttgcttttttctctcatcaattactagacagtcttcaaaaagctacacggttatctctggacacaatgaaaagaagaatatttgttgcaaggcaagttgaaaatatgctaattatcctttatgggcgaaagcagtcagaagatattatttcctttataaaaagtgaagtacatcttgcaattcctaatgtggtgatgattcctagtttggatgacattcaacaagccattaaccgtatgatccagttaaccctggaggtcagcagaggagtggctcactgggggcaacagcaaatccgtcccatcaagtctgtcattcccagccccaccactactgacgtgacccatcaaaacacaggaaaactgctgaagaaggaagaaagatcttttgaagaagctattcctgcgaggaagctgaagaatttttacccgggggtagcggagcacaaggatatttctaagttggtcctgctcctttcttcctctgtaaattccctaagaaaggcagctcatgaggccctgcaggactttcagaagtacaagactctctggacagaggaccgcgatgtgaaagtgaaggaatttttggctaacaacccctctctgactgaaatcagatcagaaattctacactatgctacttttgaacaggagattgatgagttgaagcctattattgttgtaggagcacttgaattacatacagagccgatgaaattggccttatccatcgaggccaaggcatggaagatgttactctgtcgatatctgaatgaagaatacaaaaagaaaatgtcatacatgatagcatttattaatgaatacttgaaaaagttatctagacctattcgtgatttagatgatgtcagatttgcaatggaagccttgtcttgcatacgtgataatgaaattcaaatggacatgactttgggaccaattgaagaagcctatgctattttaaacagatttgaagttgaagtaaccaaagaagaatcagaagcagttgataccttaagatattctttcaacaaattgcagagcaaagctgtttcagtacaagaggacctagttcaagtgcagccaaagtttaaaagcaatctacttgagtctgtggaagtttttcgtgaggacgtgataaactttgcagaagcatatgaattggaaggacctatggttccaaatataccaccccaagaagctagcaacaggctacagatatttcaggccagtttcgatgatctgtggaggaaatttgttacgtattcatctggtgaacaactttttggattgcctgtgactgattatgaggttttacacaaaaccagaaaagaactcaacttgctgcagaagctgtatggattgtatgacaccgtaatgagcagtattagtggttattatgaaatactttggggagatgtagatattgaaaaaattaatgcagaactgctggaatttcaaaacagatgtcgtaaacttccaaaaggacttaaagattggcaagcttttttggatctcaaaaagagaattgatgatttcagtgagtcatgtcctctactggaaatgatgaccaataaggccatgaaacagagacactgggatagaatctccgagttaactggaaccccatttgatgtggaatctgattctttttgccttagaaatatcatggaagcaccactccttaaacataaggatgatattgaggatatttgcatatctgccattaaggagaaggatatcgaagccaagctgactcaggtgattgagaattggaccaaccaaaatctgagttttgcagcatttaagggaaaaggagagctcctgctcaaaggaaccgaatcgggagaaattatcactttgatggaggatagtttaatggtcttagggtctttactcagcaacagatacaatgctccatttaaaaaaaatatccagaattgggtgtataaattgtccacttcctcagatataattgaagagtggctcgtagtacagaacctttgggtttatcttgaagccgtctttgtaggtggagatattgccaaacagctgcctcaggaagcaaaacgttttcagaatattgacaagtcttggataaaaataatgcagcgagctcatgagaatcccaatgtgattaattgctgtgttggagatgaaaccatgggacaacttttacctcatttacatgagcagttggaagtatgtcagaagtcactcacagggtatttggagaagaaacgattactgtttccaagattcttctttgtatctgatccagttctcctggaaattcttggacaagccagtgattcccacaccatacagccgcatctccctgcagtatctgacaacatcaatgaggtgacatttcatgcaaaagactatgatcgcatcatggccgtcatatcaagagaaggagaaaaaattgttttggataattctgttatggccaaaggtcctgtggagatttggctactggatttgttaaaaatgcagatgtcatcattacataatataattagatccgctttctatcaaatcagtgattcaggatttcaactcttaccattcctcagccactttccagcacaggttggacttctgggaattcagatgttgtggacacacgattcagaagaggctttacgtaatgcaaaagatgacaggaaaatcatgcaagtgaccaatcagaaatttttggatattctaaatactctcattagtcagacaacacatgatctaagcaagtttgatagagtgaagttcgagactctaattaccatccatgtgcatcagagagatatttttgatgacttggtaaaaatgcatatcaaatcacctactgactttgaatggctaaaacagagtagattttattttaaggaagatttggatcaaactgtggtgtctattacagatgttgattttatttaccaaaatgaatttctgggatgtactgatcgtcttgttatcactccattaacagatagatgctatatcacgttagctcaggccttgggcatgaacatgggaggtgctcccgcaggacctgctggcactggcaaaacagaaaccacaaaagacatgggaaggtgtttgggaaaatatgtggtcgtgttcaattgctcagatcaaatggatttcagaggcctaggaaggattttcaaaggcaagtgtcttgcacagtcgggttcctggggctgttttgatgagtttaacagaattgaattgcctgtattatcagtggcagcacaacaaatttatattgttttgacagcaagaaaagaaagaaagaaacagttcattttttctgatggtgattgtgttgatttaaatccagaatttggaatcttcttaacgatgaaccctggatatgctgggcgccaggaactaccagaaaacctaaaaatccagtttagaactgttgctatgatggttcctgatagacagatcattatgagagttaaacttgcaagctgtggttttcttgaaaatgttatcttggctcaaaaattttacgttctttacaaactctgtgaagagcaacttactaaacaggttcattatgactttggattgagaaatattctgtctgtattgaggactcttggatctcaaaaaagagccagaccagaagatagtgaattaagcattgtcatgagaggactaagagatatgaacctttccaaactggttgatgaagatgaacccctgttcctcagcttaatcaatgacctgttcccaggactgcaactggatagtaatacttatgcagaactgcaaaacgcagtagcccatcaggttcagatagagggtttgattaaccatccaccctggaacctgaaactcgtgcagttatatgagacgtctttggtacggcatggcttgatgactcttgggcccagtggttctggaaagacaaccgttatcacgattctaatgaaggcgcaaacagaatgcggaaggcctcatagagaaatgcgaatgaatccaaaagccattactgcacctcagatgtttggcagactggacactgctaccaatgactggacagatgggattttttctactctgtggagaaaaacattaaaagctaaaaaaggtgaaaacattttcctcattttagatggtcctgtggatgccatctggattgagaacttaaattccgttttggatgacaataaaactctgacgttagctaatggagatcgcattcccatggcccctagttgtaagcttctgtttgaagtccacaatatcgagaacgcctctcctgccacggtttctaggatgggcatggtctatatcagcagctctgctctcagctggaggccaatcttacaggcatggttgaagaaacgcactgcacaggaagctgctgtattcctgacactgtatgagaaagtctttgaagatacatacacatatatgaagctaaatctcaatcccaaaatgcagctcttggagtgcaactatattgtgcaatctctcaatcttctggaagggttaattccctccaaagaagaaggcggtgtttcctgtgtcgaacatcttcataaattatttgtgtttggcctaatgtggagtttaggagcccttctggaattagaaagcagagaaaagcttgaagccttcttacggcagcatgaaagcaagttggacttaccagaaatacctaaaggctcaaatcaaaccatgtatgagttttatgttactgattatggtgattgggagcactggaataagaaacttcagccttattattatccaactgacagtattccggaatattcatcaattttggttccaaatgttgacaatattagaacaaattttttgatagacaccattgcaaaacaacataaagctgttttgctcacaggagagcagggaactgcaaaaactgtcatggttaaggcctatttgaaaaaatatgatcctgaagtacagctatccaaaagtctaaacttttcatctgccacagaaccaatgatgtttcagagaacaattgaaagctacgtggataagcgaattggaagcacatatgggccaccaggagggagaaaaatgactgtatttattgatgatattaatatgcctgtgattaatgagtggggagatcagataactaatgagattgtgcgacagatgatggaaatggaaggaatgtacagcttggacaagcctggagacttcactactattgttgatgtgcagctcatagcagcaatgatccaccctggaggtggtcgaaatgatattccacaacgtttaaaaagacaatttactgtgtttaattgtacattgccttcaaatgcttcaatagacaaaatttttggaattattggatgtggatactttgatccttgtagaagtttcaagcctcaaatatgtgagatgattgtgaatttagtctcagtgggtagagtgctgtggcaatggactaaggtgaagatgctgccaactccttctaaatttcattacatcttcaatcttcgagatctttccagaatttggcaaggaatgttgaccataaaagctgaggagtgcgcttcaatccctactctcctgtcccttttcaaacacgagtgcagcagagtaattgcagacagatttataactcctgaagatgagcagtggtttaatgcacatcttactcgtgcagttgaagaaaatattggctctgatgcagcgtcgtgtattcttcctgaaccatactttgtggattttcttcgtgagatgccagaaccaactggtgatgaacctgaagactctgtgtttgaagtacccaaaatatatgaattgatgccatcctttgactttctggctgaaaaactccagttttaccagagacagttcaatgaaatcattagaggaacatctcttgatctggtgttttttaaagatgcaatgactcatcttattaagatttcacgaataattcgaacgtcgtgtggaaatgcattgctggtgggtgttggtggttccggaaaacaaagtctttcaagattggcctcttttattgctggctatcaaatattccagataacattaaccaggtcttacaatgtgactaatctaacagatgatttaaaagctttgtacaaagttgctggtgctgatggaaaaggcatcactttcatctttactgacagtgaaataaaagatgaggcatttctagaataccttaacaacttgctatcttcaggggagatctccaacttgtttgcacgagatgagatggatgaaatcacccaaggtctgatttcagtgatgaagagggagctacctcgccatcctcctacctttgataatttgtatgaatacttcatttcaagatcaaggaagaacttacatgttgttctctgcttttctccagttggtgagaagttccgtgcccgttctttgaaatttcctggcttgatatcaggttgcactatggactggttcagccgctggccaagggaggctctgattgctgtggcctcctacttcctttcagactataatattgtctgctctagtgaaattaaaagacaagttgtagaaacaatgggcctgtttcatgacatggtttcagagagctgtgaaagttatttccaaagataccgccgaagagcacatgtgactcccaaatcttacctctcatttataaatggttataaaaacatttatgctgaaaaggtgaagttcattaatgaacaggctgaacgtatgaatattggtcttgataaactaatggaggcaagtgaatctgttgctaaactctctcaggatcttgcagtcaaggagaaggagttggcagtggcttccataaaagcagacgaagtattagcagaagtcacagtaagcgctcaggcttcagccaaaattaaaaatgaagtacaggaggtaaaggacaaagcccaaaaaattgtggatgaaattgatagtgaaaaagtgaaagctgaaagcaagcttgaggcagctaaacctgcactggaagaagcagaagcagccctgaatactatcaagccaaatgatattgccacagtcaggaaacttgcaaaaccaccacatcttattatgagaatcatggactgtgttctgttactatttcaaaagaaaattgaccctgttactatggatccagaaaaatcttgctgtaagccatcatggggagagtcattaaagttgatgagtgcaacaggattcctgtggagccttcagcagttccctaaggacactataaatgaagagactgttgagttactacagccatattttaatatggatgattatacttttgaaagtgccaaaaaagtctgtgggaatgtggctggtctcctgtcttggacacttgctatggcaatattttatggcatcaatagagaagtgttgcctctgaaggccaacctggccaagcaggaaggccggttagcagttgctaatgctgagttagggaaggcacaagccctgctggatgagaagcaagctgagctggataaagtacaggcaaaatttgatgcagcaatgaatgagaaaatggatttgcttaatgacgctgatacgtgccggaaaaagatgcaggccgcctccactctcatcgatgggctgagtggagaaaaaatccggtggacccagcaaagtaaagaattcaaagctcagattaatagacttgtaggtgatattctgctgtgcacgggattcctttcctaccttggtcctttcaatcagatatttaggaactatttgcttaaagatcaatgggaaatggagttgagagcacggaaaattcctttcacagaaaacctgaatcttatttcaatgttggtggatcctccaactattggtgagtgggggctacagggattaccaggagatgatctctcaattcagaatggcattattgtgacaaaggccaccagatacccactcctcatagacccacaaactcaaggcaaaacttggattaaatcaaaggaaaaagaaaatgatttacaggtgacatctctgaaccataaatattttcgcacacacttggaggacagcctttccttgggccgaccccttctcattgaggacattcatgaagagctggatccagccttggataatgtattagaaaagaattttattaaatctggcaccactttcaaggtgaaagtcggtgataaggaatgtgatatcatggatacatttaaactttacattactacgaagttaccaaatcctgcctttaccccagagattaatgctaaaacgtcagtcattgatttcactgttacaatgaaaggacttgagaatcagttactaaggagagtcattctaacagagaaacaggagttagaggctgagagggttaaacttttggaggatgttacttttaataagcggaagatgaaagaacttgaagataacctcctctataaattaagtgctacaaaaggctcattggtagatgacgaatctctcattggtgtacttcgaactaccaagcagacagcagctgaggtaagtgaaaagttgcatgtggctgcagaaactgagatcaagatcaacgcggctcaggaggagttccggcccgcagccacccgcggaagcatcctctacttcctcatcacagagatgagcatggtcaacatcatgtatcagacgtcattggcccagttcttgaagttatttgaccagtccatggccagatctgaaaagtcaccactacctcaaaagagaattacaaatattatcgagtacctgacatatgaagtttttacatactctgtcagaggcctatacgaaaaccacaaattcctgtttgtactcctcatgaccttaaagattgaccttcagagagggacagttaagcacagagagtttcaagctctcattaaagggggagcagctctggacctgaaagcctgtcctcccaaaccctatcgctggatccttgacatgacttggctgaatcttgtggagctgagtaaacttccacaatttgcagaaattatgaaccagatatctcgtaatgagaaggggtggaaaagctggtttgataaagatgctccagaggaggaaattatccctgatggatataatgattcactagatacctgccataaacttttacttatcaggtcttggtgcccagaccgtactgtttttcaagcaagaaagtatattgcagattctttggaggagaagtacacagaaccagttatcttaaatctggagaaaacttgggaagaaagtgatacccggacacctctgatatgcttcctgtccatgggatctgaccccaccaatcaaattgatgcattggccaagaaactgaaactggaatgtagaactatctcaatggggcaaggacaagaagtacatgctcgaaagctgattcagatgtcaatgcagcagggtggttgggtattactacaaaattgccaccttggcctggaattcatggaagaattactagagacgctaattaccactgaagccagtgatgattctttccgagtatggataactacggagccccatgatcgatttccaattacattgcttcagacctctctcaaattcactaatgagccaccccaaggtgtacgcgcaggtttgaaaagaacatttgctggaattaatcaagaccttctggacatcagtaatttacccatgtggaagccgatgctttacacagtagcatttttacactccactgtgcaggagcgacgaaaatttggccccttaggatggaatattccctacgaattcaattctgctgacttttcagccagtgttcagtttattcagaatcaccttgatgaatgcgatattaagaaaggtgtatcatggaatacggttcggtacatgatcggagaagtacaatatggaggcagagtgacagatgactttgacaaacgtctacttaattgctttgccagagtctggttcagtgagaagatgtttgaaccgtcattctgcttttatactggatataaaatccccttatgcaaaaccttagaccagtattttgaatacatccagtcactgccatccctagataaccctgaagtctttgggcttcaccctaatgctgatatcacgtatcagagtaacactgcttctgctgttcttgaaacaattaccaacattcaacccaaagagagtggaggtggtgtgggagagacccgggaggctattgtttatagattatctgaagatatgctgagtaaactccctcctgattacattcctcatgaggtgaaatctcgtttgataaagatgggccatcttaattcaatgaacatatttcttagacaagaaattgacagaatgcaaagagtcatttcaatactccgcagtagcctgagtgatctaaaattggccattgaaggaacaatcattatgagtgagaatctgagagatgctctggacaacatgtatgatgctcgtatacctcagctctggaaaagagtgtcttgggattcgtccacactgggcttctggttcactgaacttttggaaagaaatgctcagttttctacgtggatatttgaagggaggcctaatgtgttttggatgactggtttctttaatccccaaggcttcctcacagcaatgaggcaagaagtgacccgtgcccacaaaggctgggcactggacactgtgaccatccacaatgaagttctgagacagaccaaggaggagatcacgtcaccccctggggaaggtgtgtatatttatgggctctacatggatggagcagcctgggacagacggaatgggaagctcatggaatccacccccaaggtactcttcacgcagttacccgtgctccacatctttgccattaactccacggcacccaaggaccccaagctgtatgtgtgtcctatttacaagaaacccaggcgaactgatttgaccttcatcactgtggtatatttacgaacagtgttgtccccggatcactggatcctgagaggagtggcccttttgtgtgacatcaagtaa

SEQ ID NO: 470 - DNA, 1452 bp, Artificial
  cDNA Sequence
atggtgaagcagactatccagatattcgcgagggtgaagccccctgtccggaagcaccaacaagggatttattccatagatgaagatgaaaaattaatacctagcttggaaatcatcttaccacgtgatttggcagatgggtttgtgaataataagcgagaaagctacaaatttaaatttcaaagaatttttgatcaggatgcaaaccaagagaccgtttttgaaaacattgccaaaccagttgctgggagtgtcctggcaggttacaatggtaccatctttgcatatgggcaaacaggcagcgggaagacattcactatcacagggggtgcagagcgttacagtgacagaggcattatcccaaggacactgtcatacatttttgaacagttacaaaaggacagcagcaaaatatatacaacacacatttcctatttggaaatctacaatgaatgtggttatgatcttttggatccaagacatgaagcctccagtttggaagatttgccgaaagtgacaatactggaggatcctgatcagaacattcacctgaaaaacttgactctccatcaggcaaccacagaggaagaagctctgaatttgctttttttaggagacaccaaccgaatgattgcagagactcctatgaaccaagcttcaacccgttcccactgcattttcaccattcatttgtcaagcaaggaaccaggatctgcaactgtacgacatgccaaactccatctggttgacctggctggttcagagcgagttgcaaagactggagtagggggccatcttctaacagaggccaagtatatcaacttgtcactacattacttagaacaggttatcattgccctttcagaaaagcaccgttcgcacattccttatagaaactccatgatgaccagtgtcctaagagacagtttgggagggaactgcatgacaactatgattgcaacactctccttggagaaaaggaatcttgatgagtctatatcaacctgcagatttgcacagcgagtggcactcataaagaatgaagctgttcttaatgaagaaattaaccccagattagtgattaaacgcctacaaaaggaaatccaggaactgaaggatgaactggccatggtcactggggagcagaggacagaggcactcacagaagcagagctccttcagctggaaaaactaataacatcctttttggaagaccaggattcagacagtagattagaggttggcgcggatatgcgtaaagttcatcactgttttcatcatttaaagaaactattgaatgacaagaagatccttgaaaacaatacagtctcctctgaaagcaaagaccaagattgtcaagaaccattaaaagaagaagaatatagaaagctacgagatattctgaaacagagagataacgaaatcagtatcctttctgaagtgatgaagaaa

SEQ ID NO: 471 - DNA, 783 bp, Artificial
  cDNA Sequence
atgagagaggaaatgtcattaggatgccaggaggcttttgaaatcttcaagagggaccacgctgacagcgttaccatcgatgacaacaaacagattctgaaacagagattttctgaagccaaggccctgggagaaagtataaatgaagcaagaagtaaaattggtcacctgaaggaagaaatcacccagcggcatatacagcaagtagccctaggaatctcggaaaacatggccgtgcctctgatgccagaccagcaggaggagaagctgcgatcacaactggaggaagaaaagagaaggtataaaacaatgttcactcgcctgaaagccctgaaggtggagatcgagcacttgcagctgctcatggacaaagccaaggtgaagctacagaaagagtttgaagtctggtgggcagaggaggccaccaacctgcaggtaaattctccagcagtgaattcactcgatcacacgaagccatttctccagacatctgactcccagcatgaatggtcccaactcctctctaacaaaagttctggaggctgggaagtccaagatcaaggcactggcagattcgatgtctgtgatgtgaatgccaggaaaatcctgccctcgccttgccccagtccacacagccagaaacagagcagcaccagcaccccactggaagacagcatccccaagaggccagtgtcgtccatccctctcaccggagacagccagacggactcggacatcatcgccttcatcaaggccagacagagcattctgcagaagcaatgt

SEQ ID NO: 472 - DNA, 759 bp, Artificial
  cDNA Sequence
aatgcgactatcctcagctccctcacaggcccaggacttcagcattttggggaaaagatccagtttgctccacaagaaaatagattttctgaagccaaggccctgggagaaagtataaatgaagcaagaagtaaaattggtcacctgaaggaagaaatcacccagcggcatatacagcaagtagccctaggaatctcggaaaacatggccgtgcctctgatgccagaccagcaggaggagaagctgcgatcacaactggaggaagaaaagagaaggtataaaacaatgttcactcgcctgaaagccctgaaggtggagatcgagcacttgcagctgctcatggacaaagccaaggtgaagctacagaaagagtttgaagtctggtgggcagaggaggccaccaacctgcaggtaaattctccagcagtgaattcactcgatcacacgaagccatttctccagacatctgactcccagcatgaatggtcccaactcctctctaacaaaagttctggaggctgggaagtccaagatcaaggcactggcagattcgatgtctgtgatgtgaatgccaggaaaatcctgccctcgccttgccccagtccacacagccagaaacagagcagcaccagcaccccactggaagacagcatccccaagaggccagtgtcgtccatccctctcaccggagacagccagacggactcggacatcatcgccttcatcaaggccagacagagcattctgcagaagcaatgt

SEQ ID NO: 473 - DNA, 1920 bp, Artificial
  cDNA Sequence
atggaacagcggttagctgagtttcgggcggcgcggaaacgggcgggtctggcggcccaaccccctgctgccagtcagggcgcacaaaccccaggagagaaggcggaagcagcagcgactctaaaggcagccccaggctggctaaagcggttcctggtatggaaacctaggcccgcgagtgcccgggcccagcccggcctagttcaggaagcggctcagccccagggcagcacatcagagacaccatggaacacagccattcctctgccgtcgtgctgggaccagtctttcctgaccaatatcaccttcttgaaggttcttctctggttggtcctgctgggactgtttgtggaactggaatttggcctggcatattttgtcctgtccttgttctattggatgtacgtcgggacacgaggccctgaagagaagaaagagggagagaagagcgcctactctgtgttcaatccaggctgtgaagccatccagggcaccctgactgcagagcagttggagcgcgagttacagttgagacccctggcagggagataggacccagctgtgctgtcatgcagctaacctctgatgtggtcttcctcaccattggctatggatttgatttcaggtgtataggactaagggcagcttgcgggttagctctgtgactgcatagtttttctaccttctttccctgatcttttgctgccatttgatctttgatagttttggtgaaactctctaaaatacattcactgtgggtccgacgcaatttataaaaattatgtactcaagaagggagacctgtttgtttcatttctcatctgtttgggagatgattttagagcactagaaaggcactggggagattctcagcttaaaacatccagcagtttgaagtatgattaggtacatcagggctgcattgtcaatgttctctttaagtcttttaacatttatagcaattttttttttcccggagagtttaggttgcaagttttgggtttcttgtttgtttttgttttgcttcctgctttaattctttaattttcagtcattactggtattgaaaaataaaatatctttaaaacatctcctcttcagaaataggtccctcttcattgcccatcaccatcttccactctcctattattttgccactactcagtaaaggaaggtaggaagagacaaacgcctaagtgcaggtgtggggagggatttcacaagtggttattaacggccagttcagcaagaagtgttgagtgtgtacaaaggggagggctggaagtgttaactccagacccgttggctgcttgagttgtttcttatattctaaagcagcagtccctaacctttttggcaccagggaccagttttgtggaacacagtttttccatggacggggtggtggtggaggatgaaacttccacctcagatcatcaggcattagagtctcataaggagcacgcaacctagatccctcgcatgcgcagttcacaatacggttctaagggctttagagtaagcagctttttcacctgtgggcctctggtgagaaattctgtaaattgtgataatcaggctggattttaatgctgcttttccagtacaatgttagagtttgggttcattaaaattaggcaaactcccattgggttagggcttctctcattccattttgtggctaaccttactgtgtttcagcccttgctgaaaattcttctgatatgtgttgcccttcctcacagccctttggccattgggagtttggctgtccctcagagccatccggtcaagcagatggtctgttctatctcacagaaaagtcttttcttccatgagttctgtctgaactgaacatgtaaaaagtatgggaaacagatgaatccctattaaacatgaagttttgattgtatttaagat

SEQ ID NO: 474 - DNA, 3062 bp, Artificial
  cDNA Sequence
atggccggcgcccccggcccgctgcgccttgcgctgctgctgctcgggatggtgggcagggccggcccccgcccccagggtgccactgtgtccctctgggagacggtgcagaaatggcgagaataccgacgccagtgccagcgctccctgactgaggatccacctcctgccacagacttgttctgcaaccggaccttcgatgaatacgcctgctggccagatggggagccaggctcgttcgtgaatgtcagctgcccctggtacctgccctgggccagcagtgtgccgcagggccacgtgtaccggttctgcacagctgaaggcctctggctgcagaaggacaactccagcctgccctggagggacttgtcggagtgcgaggagtccaagcgaggggaaagaagctccccggaggagcagctcctgttcctctacatcatctacacggtgggctacgcactctccttctctgctctggttatcgcctctgcgatcctcctcggcttcagacacctgcactgcaccaggaactacatccacctgaacctgtttgcatccttcatcctgcgagcattgtccgtcttcatcaaggacgcagccctgaagtggatgtatagcacagccgcccagcagcaccagtgggatgggctcctctcctaccaggactctctgagctgccgcctggtgtttctgctcatgcagtactgtgtggcggccaattactactggctcttggtggagggcgtgtacctgtacacactgctggccttctcggtcttatctgagcaatggatcttcaggctctacgtgagcataggctggggtgttcccctgctgtttgttgtcccctggggcattgtcaagtacctctatgaggacgagggctgctggaccaggaactccaacatgaactactggctcattatccggctgcccattctctttgccattggggtgaacttcctcatctttgttcgggtcatctgcatcgtggtatccaaactgaaggccaatctcatgtgcaagacagacatcaaatgcagacttgccaagtccacgctgacactcatccccctgctggggactcatgaggtcatctttgcctttgtgatggacgagcacgcccgggggaccctgcgcttcatcaagctgtttacagagctctccttcacctccttccaggggctgatggtggccatattatactgctttgtcaacaatgaggtccagctggaatttcggaagagctgggagcgctggcggcttgagcacttgcacatccagagggacagcagcatgaagcccctcaagtgtcccaccagcagcctgagcagtggagccacggcgggcagcagcatgtacacagccacttgccaggcctcctgcagctgagactccagcgcctgccctccctggggtccttgctgcaggccgggtggccaatccaggtgggagagacactcccagggacaagggaaggaagggacacacacacacacacacacacacacacacacacacacatacatcctgctttccctccccaaacccatcagacaggtaaatgggcagtgcctcctgggaccatggacacattttctcctaggagaagcagcctcctaatttgatcacagtggcgagaggagaggaaaaacgatcgctgtgaaaatgaggaggattgcttcttgtgaaaccacaggcccttggggttcccccagacagagccgcaaatcaaccccagactcaaactcaaggtcaacggcttattagtgaaactggggcttgcaagaggaggtggttctgaaagtggctcttctaacctcagccaaacacagagcgggagtgacgggagcctcctctgcttgcatcacttggggtcaccaccctcccctgtcttctctcaaagggaagctgtttgtgtgtctgggttgcttatttccctcatcttgccccctcatctcactgcccagtttctttttgaggggctttgtttgggccactgccagcagctgtttctggaaatggctgtaggtggtgttgagaaagaatgagcattgagacggtgctcgcttctcctccaggtatttgagttgttttggtgcctgcctctgccatgcccagagaatcagggcaggcttgccaccggggaacccagccctggggtatgagctgccaagtctattttaaagacgctcaagaatcctctggggttcatctagggacacgttaggaatgtccagactgtgggtgtagattacctgccacttccaggagcccagagggccaagagagacattgcctccacctctccttggaaatactttatctgtgaccacacgctgtctcttgagaatttggatacactctctagctttaggggaccatgaagagactctcttagggaaaccaatagtccccatcagcaccatggaggcaggctccccctgcctttgaaattcccccacttgggagcttgtatatacttcactcacttttctttattgctgtgaatagtctgtgtgcacaatgggcaattctgacttctcccatctagtggaaatgagcgaaatcatggttgtagtgatgttgtttgggagagtgcagtagtaattgatttgacccactcacacttggagctaattaaggtttgccctgcctgcagcctcccccacaaataatgaacagcagaaagactggacggggaaacctatcaatcctgcccccagccatggtgaggaagccccaagccatggtgacacacagcagcactgcagatagccagacacatggctatcctagagaggctggcaaggagttcgtggctgcaaaagaagtttctggagcaagagagagctcgctcttgggagtcaggacctccggggagagcagagggttccgacggattcctttatgagtcagtctctctctcccttttaaatggtgggaaccctccccaaaacctttccccagacacattctcctgtgcccctcagagaggcatgtgatgtgcaaggaaaataataggatataaaacacatcaagtagaaaatttcttatacttc

SEQ ID NO: 475 - DNA, 8883 bp, Artificial
  cDNA Sequence
ggagagcgagagaccgaacgaggagacgcgaggaggagggaggaggaagagagggagggaggcgggaggagcgcggaatgaaaagctcggaggggcgaaaaagcagcacagcaaagcccaagttgctgagcgagcggagcgctcccgcggcccggagccgagcggccgccgcgccccggagcccggcccggccccgcccgctctgggcccccgcaggccaaggccgccgggcgggggcggggacgaccaacttggggcgcggcgtagccccgctctcccgagagctcggagcccgggagggctacggccgcggccagacggcgggagaggagcgcggcgagcggaggcggcgagcggcgcccgcgccgcagccccggcctgggcgagagcgcgaatatttttcaaaagactcaaactttcctcctttccccgttttctggggcccttcttgcctggaattgctctccagattcccgcggggcgccgggctgctattcttcccccgggtttatcggcggctcggctaacttcacggacccggggacccgcggcgctcgtccctcggccgaacccagcccgcgctgctccccggatcaggagggccgggcccggggctgcttcgccgccgcgagtgctttcagcccggccccctggagtcgggccgctgagcccacggcagcggccgcaggactggaaacagcagattgattaactcgagcggagccccggcctccccgactccgctccgctgaggggcggccccagtgcggggaaacgacaagtttgtcagtcgtccgtggcctgttggatcgaagcgccgcctccgccgccgagaggtccccggcgcctagcatcccgcgcggacggccctgggtacccggggcggctcggcggccgggctcctcgggtcggggcgctggctgctgtgccgggcgcgccgaggcacccggggctgggccagcgccccctgcgtccccacgcgggcagcggccccgccggaggagaaacacgggtcgccgccacctccgcctcttcagtctcctggtcttcgtcgccgctctctctctcacctctcagggaaagggggggacataggggcgtcgcggggccccggcgaatgcgccccccgccgcctctcgggctgcgccgcctcgcggggatgaagcaccggccgtgaagatggaggtgacctgccttctacttctggcgctgatccccttccactgccggggacaaggagtctacgctccagcccaggcgcagatcgtgcatgcgggccaggcatgtgtggtgaaagaggacaatatcagcgagcgtgtctacaccatccgggagggggacaccctcatgctgcagtgccttgtaacagggcaccctcgaccccaggtacggtggaccaagacggcaggtagcgcctcggacaagttccaggagacatcggtgttcaacgagacgctgcgcatcgagcgtattgcacgcacgcagggcggccgctactactgcaaggctgagaacggcgtgggggtgccggccatcaagtccatccgcgtggacgtgcagtacctggatgagccaatgctgacggtgcaccagacggtgagcgatgtgcgaggcaacttctaccaggagaagacggtgttcctgcgctgtactgtcaactccaacccgcctgcccgcttcatctggaagcggggttccgataccctatcccacagccaggacaatggggttgacatctatgagcccctctacactcagggggagaccaaggtcctgaagctgaagaacctgcggccccaggactatgccagctacacctgccaggtgtctgtgcgtaacgtgtgcggcatcccagacaaggccatcaccttccggctcaccaacaccacggcaccaccagccctgaagctgtctgtgaacgaaactctggtggtgaaccctggggagaatgtgacggtgcagtgtctgctgacaggcggtgatcccctcccccagctgcagtggtcccatgggcctggcccactgcccctgggtgctctggcccagggtggcaccctcagcatcccttcagtgcaggcccgggactctggctactacaactgcacagccaccaacaatgtgggcaaccctgccaagaagactgtcaacctgctggtgcgatccatgaagaacgctacattccagatcactcctgacgtgatcaaagagagtgagaacatccagctgggccaggacctgaagctatcgtgccacgtggatgcagtgccccaggagaaggtgacctaccagtggttcaagaatggcaagccggcacgcatgtccaagcggctgctggtgacccgcaatgatcctgagctgcccgcagtcaccagcagcctagagctcattgacctgcacttcagtgactatggcacctacctgtgcatggcttctttcccaggggcacccgtgcccgacctcagcgtcgaggtcaacatctcctctgagacagtgccgcccaccatcagtgtgcccaagggtagggccgtggtgaccgtgcgcgagggatcgcctgccgagctgcaatgcgaggtgcggggcaagccgcggccgccagtgctctggtcccgcgtggacaaggaggctgcactgctgccctcggggctgcccctggaggagactccggacgggaagctgcggctggagcgagtgagccgagacatgagcgggacctaccgctgccagacggcccgctataatggcttcaacgtgcgcccccgtgaggcccaggtgcagctgaacgtgcagttcccgccggaggtggagcccagttcccaggacgtgcgccaggcgctgggccggcccgtgctcctgcgctgctcgctgctgcgaggcagcccccagcgcatcgcctcggctgtgtggcgtttcaaagggcagctgctgccgccgccgcctgttgttcccgccgccgccgaggcgccggatcacgcggagctgcgcctcgacgccgtaactcgcgacagcagcggcagctacgagtgcagcgtctccaacgatgtgggctcggctgcctgcctcttccaggtctccgccaaagcctacagcccggagttttacttcgacacccccaaccccacccgcagccacaagctgtccaagaactactcctacgtgctgcagtggactcagagggagcccgacgctgtcgaccctgtgctcaactacagactcagcatccgccagttgaaccagcacaatgcggtggtcaaggccatcccggtccggcgtgtggagaaggggcagctgctggagtacatcctgaccgatctccgtgtgccccacagctatgaggtccgcctcacaccctataccaccttcggggctggtgacatggcctcccgcatcatccactacacagagcacaacacctgccactttgaggatgagaagatctgtggctatacccaggacctgacagacaactttgactggacgcggcagaatgccctcacccagaaccccaaacgctcccccaacactggtccccccaccgacataagtggcacccctgagggctactacatgttcatcgagacatcgaggcctcgggagctgggggaccgtgcaaggttagtgagtcccctctacaatgccagcgccaagttctactgtgtctccttcttctaccacatgtacgggaaacacatcggctccctcaacctcctggtgcggtcccggaacaaaggggctctggacacgcacgcctggtctctcagtggcaataagggcaatgtgtggcagcaggcccatgtgcccatcagccccagtgggcccttccagattatttttgagggggttcgaggcccgggctacctgggggatattgccatagatgacgtcacactgaagaagggggagtgtccccggaagcagacggatcccaataaagtggtggtgatgccgggcagtggagccccctgccagtccagcccacagctgtgggggcccatggccatcttcctcttggcgttgcagagatgatgagagctgtgtggccacccccccaaccttgcccccggcacaccaaagtgtccacattgtaccaaagactgacccccgccagctggggtgcccaggggcagggccggcccgccagggagggggcctgcattggctgcaaggatgagcagagaacaaggacagaggccaggcactgaggccctggagacagctgttccacttgcacacacgcacacactcatgctcacacacacagagatatattaaagcacaagtttctatctgacctgccagcaccttctttactgcaaagacaggggacttgcctgaatggcatccgccaacccagggacctcggcgcaacataggccttgtccttgctgcactcgtggtgtgcttctgactttaccctgtcccctaagtcaaggccgaactccagcctggtggctttgccagaagggagccagaagtggggcagacatggagcccctcccttggtcagactctgggactcctgagatgggagaggcagggatcagaggacgaacaggtgggactttgcgagctctgtgactgtcccacgtccaggagacaaggaaggtagggcacctgctgcacacgattctgtccagagtgagcactggatggtggagaccataggtcaccccagattccttgacctatttctgggacaccatatttccctcctcagtgtgcaccctttgaagggacccagcacagggtcttgggcctgggcagtctgaagactgataacttccccactccaccctacaagcagtgggactcctgagaacacggttctctcctagcctcagcccccagctgggtctcagaggagctgggggagcggtggccagcccattttctggggtgaggcttgacttggagaaaggcagaagagacgtcccgcttctgtgatttggtgcccccatatcagacaatgaatttggaagtggagaggggccttcatttcttatctacttggcatgaaagggtgccctggataggagggtgtgtacagggcaaaatgccaaaaagcactgtctagttgaaagttcccttctccacccaggggcagtgaaggaggaggggcttatagagctgggattggtggagggagcaggtgccagtcccctcactctctgggagctgtgaaagggatccctgtccttgggtcctgggttaggcacctgagattgacatgatgggatctagatctttcctccttgacatcacctgagcccccacctagccatccatgggagagagaaggcccagccccttctagaatgactctttaggcatgcgtgcatatgtgtgtatgtgtttgtgcccgtctgtgtctaggtaccaccgtgggtacattgttgggcaggagtgtgtgcaaacacaggtctgtgtgtgcaatctcacatatctgcctgtgagactggattgagacccattcgtttctatgaatgtccgtgtacgtcagcgtgtgtgtccaccttcctgagtgatgtgttcgcttgtagggtgctggctgaatagactctgtccagccctgttctgtagtctcaagctgcctgcgatggcctgaaattccacctttcatcccctatggatgacggagagcttacagatgaccctattgaatgcaagcacctttggtgaggagcatcacagggctccttctggagcatttggtggggacagctgcagagaagaggcctggaactcgggcagcactgcagtgccaggaggcaggcggggaaccgaggcaaaggctgcccatctccccctgccaggcctgtgtgatcattatcaccaacagctggtgggtggccgggccaggatgcagcggggccttctgatgcccaatcagcacggctgccttcctgacccagtcaaggcctctgtctgaaatgagtcgctccaggttctcagcatacacttccatcgcgtctgtcgggtattgttccttaactgtcccatctgtgcagagtccattgccccaactagactgtgagctcctcctctgagccttccaagtcccccctccaccttcgccacctcccgctcgtgcccagcacaagtgagcctggtgtggaaaccactccattgcccggtggaatggattctgtaatcagtggttcctggccttgcctgcagaatagaaccaccagagtcctttaaaaagtattgctgcttggttcccacctcagaggttctgagttaattggactggagcgcagtcggacatcaagaaatgttgaaaagctccttgggttctcctgacagcaggaaccactggcctggcaccacctgggtgcttcctctgtgccctcgctggggtaggcattggagcaccagagatgaatagccccaagtgctccctctttggggttcccaaggcaccctgtgcctgcttccctcagaggaccttccaatccatttgccccgcaaccctggctgctccgacaggggagacttgtctcccttgttcccctcaggatccatagagtggacagtaaaggtgctcagtacatgttggctgagctgaactgcatacatgtggcccccaggttcctggtctttatggacgaagggcacaaggtggaggggggatggggggatgctgctggaggtctcagtgggtgcagacagccctgccttgaggatggcttgacctgggattgacaaaatgtgtctgctgaaatgctgaggtccccacgtgtgaatgggtgaggctgatgtggatgtctgtgtgtgccagcaggtgggtgggggatgtgggtgtcagtgtatgccagtgggcactgtaaatgtctaggcatgtgctggtctctgtgtgtttgtgtgttcctcagcaggaatgagtgtctttgtgtatcacctggtgacttgtcagtgtctgtgtctgtgtgtgcctgtgagccagcatctctgtatcagtgttgctcatgctgtgtctttgtgcgccatggtgtgtcagtgtctgtgtgttgatgggtggcccatgagtgacccccgccaggggagaccaggctggctggatccagcacatctccccagtggcagcctcgccctctgggtcagggtgactgaggcattttgtggccttaaaacggggtgttcagggtcagccctcagggtgctggggcccttccatcccttgtccccttcaggttggtgaaaaggactccgggggccaggtgctgtatagcagcttatggaagtctcagctgggctatcctgcccttgggagcacagacaggctcctagggtgctgagtgaagcctgaagaccaagccccctcctcctggaatgctccttccacccctacctctcagagatgggcctgacacctctttctcattcattctccttttccctgtgctctgggaaagcccctggctcaggctgtcagagtgaggatggacctcaaaagtttgatcccctcgtgcagatgaagaagctgaagcccagagtggggaaggggagtggcccaaggtcacacagctagtttgagtagagccagtcttgggagagccaagtactacagccctgggggtgtcacaccgcttgtcactgcccctgaggtctcctgccaaacaactgcagggagtttggctaacagtcctgtgtccagggtgccggtggggatgttatagatgttgctgggatcctgccctcggctccaaattctggcctctcatcccaggctgcagacccttctgccccatgacaggcctgggtgccacacagaggtggccaccctcccaccacagtgtctgcagctgctgcccttctcccaggcccccagacagaagagaccctgtttcccctcctctcccctgtgacttcacaagagcttgggctaggagtgaaggtcagcatgttctcatgtgctcatcctcttggtttccccaaagaccgggagggtcacggatggggcgtgcagaatccttgtgttttttctcgctgggcagcttgaggggctggggagtattcccagggtctttgctctggagagtccctgcagagccactggctgaggttgggttcagggttcagcggagtcctccatgcttccaaaggccgggaagcacccgcctctctatcgagtcagtgctgtgcgtgtgtgtctgagaatgtgtgtgatgtgtggagtgtgcgtgtgtttgtgtgtgtgtgtgtgtgtgttggggcagaaggaccactctttcctggggatcccttgacccttataactagaagggaccttagggagcatctaagctggtgcccccattgtacaggcgaggtccagagggatggcatctgcccaccccaccccttgccctcttgttgcctgcactcatttcccagggaccctcctaggataggactgccctccttcctggccccctcccgccatcctcccagccacccacataatcaccatctcagcccaactctggtggccctctaggtctccatgcattcttcctgccctagagtagccagctcaccaaggcctttatccccagcccaggagaagggtcagggagggaaggggctgcaccagccctgagacctcaaagacttgggagaaaagccaaaactcctcatgcccaggcccacatgtctgaccaccccagcccaccccgccaccaaggtaaaagcacaacaggagacccccttattaatgggtgaaatgattggggttgtttttttagtcacacagccccatcctcacccctttgccttgctgtctgtctccaccccagcctctgttccccatttgcctctctttcacctccaagcccccaaatgtaacctctagttgcggacgcggttgttctatcaataaagctgcagtgttctagcgctcagcgt

SEQ ID NO: 476 - DNA, 729 bp, Artificial
  cDNA Sequence
atggcctcccgcatcatccactacacagagcccatcaactctccgaacctttcagacaacacctgccactttgaggatgagaagatctgtggctatacccaggacctgacagacaactttgactggacgcggcagaatgccctcacccagaaccccaaacgctcccccaacactggtccccccaccgacataagtggcacccctgagggctactacatgttcatcgagacatcgaggcctcgggagctgggggaccgtgcaaggttagtgagtcccctctacaatgccagcgccaagttctactgtgtctccttcttctaccacatgtacgggaaacacatcggctccctcaacctcctggtgcggtcccggaacaaaggggctctggacacgcacgcctggtctctcagtggcaataagggcaatgtgtggcagcaggcccatgtgcccatcagccccagtgggcccttccagattatttttgagggggttcgaggcccgggctacctgggggatattgccatagatgacgtcacactgaagaagggggagtgtccccggaagcagacggatcccaataaaggtgcaagacgggaaggaggtgggggagctgaatctggagggagctgtgcgtggcgggggttcctgtctgttgagggagggtgtttgggtctgaataggggttcagaatgtctgagtgatgggaatcatgtggctctgactgtgtga

SEQ ID NO: 477 - DNA, 847 bp, Artificial
  cDNA Sequence
ctcaaacaccgcctgctaaaaatacccgactggaggagcataaaagcgcagccgagcccagcgccccgcacttttctgagcagacgtccagagcagagtcagccagcatgaccgagcgccgcgtccccttctcgctcctgcggggccccagctgggaccccttccgcgactggtacccgcatagccgcctcttcgaccaggccttcgggctgccccggctgccggaggagtggtcgcagtggttaggcggcagcagctggccaggctacgtgcgccccctgccccccgccgccatcgagagccccgcagtggccgcgcccgcctacagccgcgcgctcagccggcaactcagcagcggggtctcggagatccggcacactgcggaccgctggcgcgtgtccctggatgtcaaccacttcgccccggacgagctgacggtcaagaccaaggatggcgtggtggagatcaccggcaagcacgaggagcggcaggacgagcatggctacatctcccggtgcttcacgcggaaatacacgctgccccccggtgtggaccccacccaagtttcctcctccctgtcccctgagggcacactgaccgtggaggcccccatgcccaagctagccacgcagtccaacgagatcaccatcccagtcaccttcgagtcgcgggcccagcttgggggcccagaagctgcaaaatccgatgagactgccgccaagtaaagccttagcccggatgcccacccctgctgccgccactggctgtgcctcccccgccacctgtgtgttcttttgatacatttatcttctgtttttctcaaataaagttcaaagcaaccacctgt

SEQ ID NO: 478 - DNA, 294 bp, Artificial
  cDNA Sequence
tcagcccctggggtagatcccagccccccgcataggtccttttgctggaaaaggaagagggagtggtgggacgaatctgaggagtcgttggaggaggagccacggaaggtgctcgcccctgagcctgaggagatctgggtggcggagatgctgtgtggcctcaagatgaagctgaagcgacggcgagtgtcgctcgtgctccctgagcaccacgaggccttcaacaggctgcttgaggatcctgtcattaaaagattcctggcctgggacaaagatctgagggtgtcggacaag

SEQ ID NO: 479 - DNA, 813 bp, Artificial
  cDNA Sequence
gtgcgcctcccgtcgcccaagatgccgaaaggaaaggaggccaaggggaagaagttggctctggcccctgcttttgtgaagaagcaggaggccaagaaagtggtgaatcccctgtttgagaaaaggcctaagaattttggcattggacaggacatccagcccaaaagagacctcacctgctttgtgaaatggccccgctatatcaggttgcaatggcagagatccatactctataagcagctgaaagtgcctcctgcgattaaccagttcacccaggccctggaaggccaaacagctactcagctgcttaagctggcccacaaatacagaccagagacaaagcaagagaagaagtggaggctgttggcccaggcagagttgggcaaaggggacctccccatgaagagactacctgtctttcgagcaggagttaacaccgtcaccacctttgtggataacaagaaagctccgctggtggtgactacacacgacatggatcccattgagctgactgttttcctgcctgtcctgtgtcataaaatgggggccacttgctgcattatcaaggggaaggcaagactgggatgtctagttcacaggaagacctacaccactgtcgacttcacacaggttaactcagaagacaaaggagctttggctaagctggtggaagctatcgggaccaattacaatgccagatacgatgagacccactgtcactgggacggcaatgtcctgggtcccaagtctgtggctcacattgccaagctcgaaaaggcaaaggctaaagaacttgccactaaactgggttaa

SEQ ID NO: 480 - DNA, 2021 bp, Artificial
  cDNA Sequence
cagctctacatcctgtagattctcacacccagggcctccttcggcctcttctcaggggagtctcagagcaggagcctctctcccttgcccagtgaaagtcattctcccctctcccatccacctcacccgcagccacaatcctgagactttcccccgggaggcacacttctcctcgctgccctgctgctctcagggaaaccctgtcctgcttctcacactgacatctgctctctaatcacagaggatcctgtcattaaaagactcctggcctgggacaaagatctgagggtgtcggacaagtatctcctggctatggtcatagcgtatttcagccgggccggcctcccctcctggcaataccaacgcattcatttcttcctggctctctatctggccaatgacatggaggaggacgacgaggcccccaaacaaaacatcttctacttcctgtacgaggagacccgctctcatatacccttgctcagtgagctttggttccagttatgccgttacatgaacccgagggccaggaagaactgctctcagatagccttgttccggaagtatcggttccacttcttttgttccatgcgctgcagggcttgggtttccctggaggagttggaagagatccaggcttatgacccagagcactgggtgtgggcgcgagatcgcgcccacctttcctagagctccagggaccgtggaggcctgaggtcatcggcctgagagaagaacaccggacccaggggagatgtggattttcagcaggaactttattccaatgctaatggcagacatcaggaaggaggagaggaaccatttgtgcagatcatctagaagaacctggaccattcttgatggagctgaatacagtgatcacgttgtcctccaaggagcaggggtggggtggggtacttctaggagtccttggagaaaagtaagaaaccaggagtgtttccagttccaccctttcctgcggcaccacctccctttttatattgctgaatgccaacctccctggggcggaacctggaggtcctgtttcttatggacttggttgccacagtccaggagcatttgaaggcacagtgcaagggctcagattggcacagaattctttgtgaaatatgagtgccacagactgtaacagatagcttcatgcacactatgcattttattggtttgtttggaaaatgttggccattgaattattaataggtttatttcaaatagtttggaaattgttgtacttttgaaaacatgctgttcctgtagagttttttgatgagagttatagttgttatatatacataaagataattttcttttcatttttaagtgagaattctttttatcctaaatcttttattatctttaaatttttttctgtattattatatgtgctcctgaagcgagcactctttttatctatgatacttccataataatctcttctatttatagctattggtagttccccaccagaaaaaaacataattctggtgatagaaatttttatttgctgtttaggtttgtgactgaattgtgagaattcagttgtgatttttaacatgtctcagatatatatactaacacgtctaatgtatactatctattttattggtttattttgaaaaacatgggtacagaattatttaaatattattttatttattgaaatatttattaaatatatttatttatttaaatattattattactttaaatattattttaaatattttggaaatactggtatttttgaatagatgctgtttctataaagctgtgtgatgggtgttataactgttgtatacacatacatataattttgttttcctttttaagagaggattcttttcatcctaaatcttttacctttcaatctttgtatctattattacacgtgctgctgaagggagcatggtttttatctatgatacttagttaacatatatattacatttatagctatgtggtagttcccctaaattcttgtaaaaataaatttttatttg

SEQ ID NO: 481 - DNA, 2376 bp, Artificial
  cDNA Sequence
cgcgcggcccctgtcctccggcccgagatgaatcctgcggcagaagccgagttcaacatcctcctggccaccgactcctacaaggttactcactataaacaatatccacccaacacaagcaaagtttattcctactttgaatgccgtgaaaagaagacagaaaactccaaattaaggaaggtgaaatatgaggaaacagtattttatgggttgcagtacattcttaataagtacttaaaaggtaaagtagtaaccaaagagaaaatccaggaagccaaagatgtctacaaagaacatttccaagatgatgtctttaatgaaaagggatggaactacattcttgagaagtatgatgggcatcttccaatagaaataaaagctgttcctgagggctttgtcattcccagaggaaatgttctcttcacggtggaaaacacagatccagagtgttactggcttacaaattggattgagactattcttgttcagtcctggtatccaatcacagtggccacaaattctagagagcagaagaaaatattggccaaatatttgttagaaacttctggtaacttagatggtctggaatacaagttacatgattttggctacagaggagtctcttcccaagagactgctggcataggagcatctgctcacttggttaacttcaaaggaacagatacagtagcaggacttgctctaattaaaaaatattatggaacgaaagatcctgttccaggctattctgttccagcagcagaacacagtaccataacagcttgggggaaagaccatgaaaaagatgcttttgaacatattgtaacacagttttcatcagtgcctgtatctgtggtcagcgatagctatgacatttataatgcgtgtgagaaaatatggggtgaagatctaagacatttaatagtatcaagaagtacacaggcaccactaataatcagacctgattctggaaaccctcttgacactgtgttaaaggttttggagattttaggtaagaagtttcctgttactgagaactcaaagggttacaagttgctgccaccttatcttagagttattcaaggggatggagtagatattaataccttacaagagattgtagaaggcatgaaacaaaaaatgtggagtattgaaaatattgccttcggttctggtggaggtttgctacagaagttgacaagagatctcttgaattgttccttcaagtgtagctatgttgtaactaatggccttgggattaacgtcttcaaggacccagttgctgatcccaacaaaaggtccaaaaagggccgattatctttacataggacgccagcagggaattttgttacactggaggaaggaaaaggagaccttgaggaatatggtcaggatcttctccatactgtcttcaagaatggcaaggtgacaaaaagctattcatttgatgaaataagaaaaaatgcacagctgaatattgaactggaagcagcacatcattaggctttatgactgggtgtgtgttgtgtgtatgtaatacataatgtttattgtacagatgtgtggggtttgtgttttatgatacattacagccaaattatttgttggtttatggacatactgccctttcattttttttcttttccagtgtttaggtgatctcaaattaggaaatgcatttaaccatgtaaaagatgagtgctaaagtaagctttttagggccctttgccaataggtagtcattcaatctggtattgatcttttcacaaataacagaactgagaaacttttatatataactgatgatcacataaaacagatttgcataaaattaccatgattgctttatgtttatatttaacttgtatttttgtacaaacaagattgtgtaagatatatttgaagtttcagtgatttaacagtctttccaacttttcatgatttttatgagcacagactttcaagaaaatacttgaaaataaattacattgccttttgtccattaatcagcaaataaaacatggccttaacaaagttgtttgtgttattgtacaatttgaaaattatgtcgggacataccctatagaattactaaccttactgccccttgtagaatatgtattaatcattctacattaaagaaaataatggttcttactggaatgtctaggcactgtacagttattatatatcttggttgttgtattgtaccagtgaaatgccaaatttgaaaggcctgtactgcaattttatatgtcagagattgcctgtggctctaatatgcacctcaagattttaaggagataatgtttttagagagaatttctgcttccactatagaatatatacataaatgtaaaatacttacaaaagtgg

SEQ ID NO: 482 - DNA, 681 bp, Artificial
  cDNA Sequence
agagtcacatggctgggacatgccacggtaatggtggaaatggatgagctcatatttctcacggatcccatctttagctctcgtgcttcaccatcgcagtacatgggtccaaagcgatttcgtcgttccccgtgcacaataagtgaactccctccaatagatgcggtccttatcagtcacaaccactatgaccatctggactacaattctgtcattgctttgaatgagcgatttggtaatgagttgagatggtttgtgcctttgggtctccttgactggatgcaaaaatgtggctgtgagaatgtgattgagttggactggtgggaggagaattgtgtccccggacatgataaggtcacttttgtctttacaccttcccagcactggtgtaaaaggactctaatggatgacaacaaggtgctatggggcagctggtctgtcttggggccttggaatcgattttttttcgcaggagatactggttattgccctgcttttgaagagataggaaaaagatttggaccttttgaccttgcagctattcccatcggagcttatgaaccgaggtggtttatgaaataccagcatgtagacccagaagaagctgtaaggattcacactgatgtccaaacaaagaaatctatggcaattcactggggaacttttgccttagcaaatgag

SEQ ID NO: 483 - DNA, 1929 bp, Artificial
  cDNA Sequence
gcccaagagagcaaaccttggtttgctgaaaatcagcagataaggcaattgaaagggaagaagaacaacgactatcgtctattccacaagatgagtaacagccaccctcttcgcccctttactgcagtgggggaaattgatcatgtgcacattttgtctgaacatattggtgccttgttgattggggaagaatatggcgacgtcacattcgtggtggaaaagaaacgttttcctgcccacagggtaattttagcagccaggtgccaatattttcgagcattattatatggtggaatgcgagagtctcagcctgaagcagaaattcctctccaagacaccactgcagaagcattcacaatgctactcaaatatatctacactgggcgggcaacgctgacagatgagaaggaggaggtgctgctggactttttgagcctggctcataaatatggatttccagagctagaggattctacctctgagtatctctgcaccatacttaacattcagaatgtctgcatgacttttgatgttgccagtctctactcacttcccaagttaacttgtatgtgctgcatgtttatggataggaatgctcaggaagtcctctcaagtgaaggtttcctctccctttctaagacagcacttttaaacatcgtgttaagagactcatttgcagctcccgaaaaagatattttcctagccttattaaactggtgtaagcacaattcaaaggagaatcatgctgaaatcatgcaggctgtgcgtttacctctcatgagcctcacagagcttctgaatgttgtgaggccttcaggactgctgtctcctgatgccatcctggatgccattaaagtgcgatctgagagccgggatatggacctcaattatagaggcatgctcataccagaagaaaacattgcaactatgaagtatggagcccaagttgtaaagggggagctgaaatcagccttattagatggtgatactcaaaattatgatttggatcatggattttcaaggcacccaattgatgatgactgccgttccggcatcgagattaagctaggtcagccatccattatcaatcacatacggatactcttgtgggaccgagatagccggtcttactcatacttcattgaagtgtcaatggatgaacttgattgggtcagagtgatagatcattcacaatatctgtgtcgttcttggcagaaattatattttccagcccgtgtctgcaggtatattcgaattgttgggactcacaacacagtgaacaagatttttcacattgtggcttttgaatgtatgtttacaaacaaaaccttcactcttgagaaggggctgatagttcccatggagaatgttgcaacaattgctgattgtgccagtgtgattgaaggagtcagtcggagccgaaatgccttgctgaatggggacactaagaattatgactgggattctggctacacatgtcaccagctaggaagtggtgcgattgtggttcagttggcacaaccgtacatgattgggtcaatacggttactactttgggattgtgatgatcgaagctatagctactacgttgaggtttctaccaaccagcaacagtggaccatggttgctgacagaactaaagtctcctgcaagtcctggcagtcagtaacttttgaaaggcagcctgcctccttcatccgtatcgttgggacacacaacacagcaaatgaggtgttccactgtgtccactttgagtgtccagagcagcagagcagccagaaggaggaaaatagtgaggaatcggggacaggggacaccagcctggccggtcagcagctcgactcccatgcgctgcgggcgcctagtggcagctcactaccctccagcccaggctccaactcacgctcccccaaccggcagcaccaataa

SEQ ID NO: 484 - DNA, 1308 bp, Artificial
  cDNA Sequence
atgccccacttggaaaacgtggtgctttgtcgcgagtctcaagtgtccatcttgcagtccttgtttggagagagacatcatttcagctttccatccatttttatttatggacatactgctagtggaaagacctatgtaacacaaacgttgttgaaaactttagagctcccacatgtgtttgtgaattgtgttgaatgctttacattgaggctgcttttggaacaaattttaaacaaattgaatcatcttagttcttcagaggatggatgttctactgaaataacctgtgaaacatttaatgactttgttcgcttgtttaaacaagtaaccacagctgaaaatcttaaagatcagactgtatatattgttctagataaagcagagtatctaagagatatggaagcaaatcttttgcctggatttcttagattacaagaattggctgacagaaatgtgactgttctctttctcagtgaaattgtttgggaaaagtttcgtccaaatactggatgctttgagccgtttgtcttatatttccctgattacagcataggcaaccttcaaaagatcctgtcccatgatcatcctccagagtattcagctgatttctatgctgcctacattaacattcttcttggagttttctacactgtttgtcgagatttgaaagagctcagacatctggcagtacttaattttcctaaatattgtgaacccgtggttaaaggagaagcaagtgaacgtgatactcgcaaactgtggagaaatattgaacctcatttgaagaaagctatgcagactgtttatctcagggaaatatcaagttcccagtgggaaaagctacagaaagatgacacagatccggggcaactgaaaggcctctcagcgcatactcatgtggaacttccatattactctaagttcattctaattgctgcataccttgcttcatacaatccagcaagaactgacaagaggttttttcttaagcatcatggaaaaatcaagaaaaccaactttctaaaaaaacacgaaaagacaagcaatcatctccttgggccaaaaccatttccactagacagattattagcaatattatatagtatcgtggacagcagagttgctccaacagcaaatattttttcccagattacctctctagtgacccttcagctgttaaccctggttggccatgacgatcagcttgatggaccaaaatacaaatgcacagtgtctctagacttcatcagagctattgcaaggacggtgaactttgacataataaaatacttgtatgatttcttgtga

SEQ ID NO: 485 - DNA, 408 bp, Artificial
  cDNA Sequence
ttgagtatgctcaggcttcagaagaggcttgcctctagtgtcctctgctgtggcaagaagaatatctggttagaccccaatgagaccaatgaaatcaccaatgccaactcccgtcagcagatccggaagctgatcaaagatgggctgatcatccgcaagcctgtgggtccattcccccgcttgatgccggaaaaacacgcctgccggaagggcaggcatatgggcataggtaagcggaagggtacagccaatgcccgaatgccagagaaggtcacgtggatgaggagaatgaggattctgcaccggctgctcagaagataccgtgaatctaagaagattgatcgccgcatgtatcacagcctgtacctgaaggtgaagaggaatgtgttaaaaaacaagcagattctc

SEQ ID NO: 486 - DNA, 279 bp, Artificial
  cDNA Sequence
aagaagagcgtccccaggagaaacaagcttgaccactatgctgtcacagagtttcctctgaccactgagtctgccatgaagaagatagaagacaacaacacacttgtgttcactgtggatgttaaagccaccaagcaccagatcaaacaggctgtgaagaagctctatgacactgatgtggccaaagtccatgccctgattaggcctgatgcaggaagaaggcataagctcctggctcctgattacaatgctttggatattgccaacaaaattgggatc

SEQ ID NO: 487 - DNA, 2629 bp, Artificial
  cDNA Sequence
accgccccgcgctccgctgccaggggcgggagggaggaatggttgcttcacgccccgggggaagagacgggaagctcggctctgggttgcgggccccggcgtctccgcgtggggcgcaccgtccgacccccccctcccggtgtgcagcgccccgcaccgccccgcctcgcctgggagaagccgccgggacgcgccgggctggagtgggcggttataggctttgagctaggccgtttccgggaggcggagctcagaccccatttcctttctccacatccaggtcaggtggcgtttgctgtggcggctaggcccgcgtgcgctggagacctccgcgctggcccccgcgagcctcctgccctggcccggcgctgcggctctgccgcggcggcagcatgggtggcccccggggcgcgggctgggtggcggcgggcctgctgctcggcgcgggcgcctgctactgcatttacaggctgacccggggtcggcggcggggcgaccgcgagctcgggatacgctcttcgaagtccgcaggtgccctggaagaagggacgtcagagggtcagttgtgcgggcgctcggcccggcctcagacgggaggtacctgggagtcacagtggtccaagacctcgcagcctgaagacttaactgatggttcatatgatgatgttctaaatgctgaacaacttcagaaactcctttacctgctggagtcaacggaggatcctgtaattattgaaagagctttgattactttgggtaacaatgcagccttttcagttaaccaagctattattcgtgaattgggtggtattccaattgttgcaaacaaaatcaaccattccaaccagagtattaaagagaaagctttaaatgcactaaataacctgagtgtgaatgttgaaaatcaaatcaagataaagatatacatcagtcaagtatgtgaggatgtcttctctggtcctctgaactctgctgtgcagctggctggactgacattgttgacaaacatgactgttaccaatgaccaccagcacatgcttcacagttacattacagacctgttccaggtgttacttactggaaatggaaacacgaaggtgcaagttttgaaactgcttttgaatttgtctgaaaatccagccatgacagaaggacttctccgtgcccaagtggattcatcattcctttccctttatgacagccacgtagcaaaggagattcttcttcgagtacttacgctatttcagaatataaagaactgcctcaaaatagaaggccatttagctgtgcagcctactttcactgaaggttcattgtttttcctgttacatggagaagaatgtgcccagaaaataagagctttagttgatcaccatgatgcagaggtgaaggaaaaggttgtaacaataatacccaaaatctgattggtcatatttttccaaagagtaatgcagtctggatataaacgtattttctgtcttccttataaggggattctcccagctgctaaatttaaacagtaaatatcacattttgtcattaacacagctataacttgccgtggttctcagatttattttggactattttgatgccaagtgaatataagagcttgtactgaaaccatttatttctttctattttgctatttgcaaatgcttgttatcttccctacatgaagtggcagtaacctttttcacatttaagctacccttctaccttttgaagtgatttgcagttactcatctgagacagcatcagtatttgactaaatcattgtttcacaactgaatagtcttgttcttttagtagcaacgaaatcctaagctcttgaggccattcacctgccaacctgaccatactgctttcaaaagtcttttctcatcagtagaatctattttggtcacttctagtcaatgaaaaatgtaaacttttaggagagaatgtttcttaggactcacccactccattcaatgttatatataaaatagtgtgatcaatcacaatgtccatctttagacagttggttaaataaattatctggtctttgaaaagaccgtgctgggcgcggtggctcttgcctgtaatcccagcactttgggaggctgaggcgggcagatcacctgagatcgggagtttgagaccaagcctgaccaatatggagaaaccctgtctctactaagaacacaaaattagctgggcatggtggtgcatgcctgtaatcccagctacttgggaggccgaggcaggagaattgcttgaacccgggaggcagaggttgcagtgagctgagatagcgccattgcactccagcctgggcaacaagagcaaaactctgtctcaaaaaaaaaaaaaaatgatggagctccgaatgtgcttaagtggaaagatatctatgaaatatggtggttttttaaaacacaaaaattatagaatatgggatcccgtgtgtgtgtgtgtgtgtttgaatgaaaaatgcttatgtattgacagaacacttctagaatgatacccaaactcctggagtgggagtggggaatgccttctacgtacacactgttctactgtttgaattttttaatatgagcccaaattgtataatctttttttaataaaggggagaaaaatc

SEQ ID NO: 488 - DNA, 2524 bp, Artificial
  cDNA Sequence
accgccccgcgctccgctgccaggggcgggagggaggaatggttgcttcacgccccgggggaagagacgggaagctcggctctgggttgcgggccccggcgtctccgcgtggggcgcaccgtccgacccccccctcccggtgtgcagcgccccgcaccgccccgcctcgcctgggagaagccgccgggacgcgccgggctggagtgggcggttataggctttgagctaggccgtttccgggaggcggagctcagaccccatttcctttctccacatccaggtcaggtggcgtttgctgtggcggctaggcccgcgtgcgctggagacctccgcgctggcccccgcgagcctcctgccctggcccggcgctgcggctctgccgcggcggcagcatgggtggcccccggggcgcgggctgggtggcggcgggcctgctgctcggcgcgggcgcctgctactgcatttacaggctgacccggggtcggcggcggggcgaccgcgagctcgggatacgctcttcgaagtccgcagaagacttaactgatggttcatatgatgatgttctaaatgctgaacaacttcagaaactcctttacctgctggagtcaacggaggatcctgtaattattgaaagagctttgattactttgggtaacaatgcagccttttcagttaaccaagctattattcgtgaattgggtggtattccaattgttgcaaacaaaatcaaccattccaaccagagtattaaagagaaagctttaaatgcactaaataacctgagtgtgaatgttgaaaatcaaatcaagataaagatatacatcagtcaagtatgtgaggatgtcttctctggtcctctgaactctgctgtgcagctggctggactgacattgttgacaaacatgactgttaccaatgaccaccagcacatgcttcacagttacattacagacctgttccaggtgttacttactggaaatggaaacacgaaggtgcaagttttgaaactgcttttgaatttgtctgaaaatccagccatgacagaaggacttctccgtgcccaagtggattcatcattcctttccctttatgacagccacgtagcaaaggagattcttcttcgagtacttacgctatttcagaatataaagaactgcctcaaaatagaaggccatttagctgtgcagcctactttcactgaaggttcattgtttttcctgttacatggagaagaatgtgcccagaaaataagagctttagttgatcaccatgatgcagaggtgaaggaaaaggttgtaacaataatacccaaaatctgattggtcatatttttccaaagagtaatgcagtctggatataaacgtattttctgtcttccttataaggggattctcccagctgctaaatttaaacagtaaatatcacattttgtcattaacacagctataacttgccgtggttctcagatttattttggactattttgatgccaagtgaatataagagcttgtactgaaaccatttatttctttctattttgctatttgcaaatgcttgttatcttccctacatgaagtggcagtaacctttttcacatttaagctacccttctaccttttgaagtgatttgcagttactcatctgagacagcatcagtatttgactaaatcattgtttcacaactgaatagtcttgttcttttagtagcaacgaaatcctaagctcttgaggccattcacctgccaacctgaccatactgctttcaaaagtcttttctcatcagtagaatctattttggtcacttctagtcaatgaaaaatgtaaacttttaggagagaatgtttcttaggactcacccactccattcaatgttatatataaaatagtgtgatcaatcacaatgtccatctttagacagttggttaaataaattatctggtctttgaaaagaccgtgctgggcgcggtggctcttgcctgtaatcccagcactttgggaggctgaggcgggcagatcacctgagatcgggagtttgagaccaagcctgaccaatatggagaaaccctgtctctactaagaacacaaaattagctgggcatggtggtgcatgcctgtaatcccagctacttgggaggccgaggcaggagaattgcttgaacccgggaggcagaggttgcagtgagctgagatagcgccattgcactccagcctgggcaacaagagcaaaactctgtctcaaaaaaaaaaaaaaatgatggagctccgaatgtgcttaagtggaaagatatctatgaaatatggtggttttttaaaacacaaaaattatagaatatgggatcccgtgtgtgtgtgtgtgtgtttgaatgaaaaatgcttatgtattgacagaacacttctagaatgatacccaaactcctggagtgggagtggggaatgccttctacgtacacactgttctactgtttgaattttttaatatgagcccaaattgtataatctttttttaataaaggggagaaaaatc

SEQ ID NO: 489 - DNA, 2445 bp, Artificial
  cDNA Sequence
accgccccgcgctccgctgccaggggcgggagggaggaatggttgcttcacgccccgggggaagagacgggaagctcggctctgggttgcgggccccggcgtctccgcgtggggcgcaccgtccgacccccccctcccggtgtgcagcgccccgcaccgccccgcctcgcctgggagaagccgccgggacgcgccgggctggagtgggcggttataggctttgagctaggccgtttccgggaggcggagctcagaccccatttcctttctccacatccaggtcaggtggcgtttgctgtggcggctaggcccgcgtgcgctggagacctccgcgctggcccccgcgagcctcctgccctggcccggcgctgcggctctgccgcggcggcagcatgggtggcccccggggcgcgggctgggtggcggcgggcctgctgctcggcgcgggcgcctgctactgcatttacaggctgacccggggtcggcggcggggcgaccgcgagctcgggatacgctcttcgaagtccgcaggtgccctggaagaagggacgtcagagggtcagttgtgcgggcgctcggcccggcctcagacgggaggtacctgggagtcacagtggtccaagacctcgcagcctgaagacttaactgatggttcatatgatgatgttctaaatgctgaacaacttcagaaactcctttacctgctggagtcaacggaggatcctgtaattattgaaagagctttgattactttgggtaacaatgcagccttttcagttaaccaagctattattcgtgaattgggtggtattccaattgttgcaaacaaaatcaaccattccaaccagagtattaaagagaaagctttaaatgcactaaataacctgagtgtgaatgttgaaaatcaaatcaagataaaggtgcaagttttgaaactgcttttgaatttgtctgaaaatccagccatgacagaaggacttctccgtgcccaagtggattcatcattcctttccctttatgacagccacgtagcaaaggagattcttcttcgagtacttacgctatttcagaatataaagaactgcctcaaaatagaaggccatttagctgtgcagcctactttcactgaaggttcattgtttttcctgttacatggagaagaatgtgcccagaaaataagagctttagttgatcaccatgatgcagaggtgaaggaaaaggttgtaacaataatacccaaaatctgattggtcatatttttccaaagagtaatgcagtctggatataaacgtattttctgtcttccttataaggggattctcccagctgctaaatttaaacagtaaatatcacattttgtcattaacacagctataacttgccgtggttctcagatttattttggactattttgatgccaagtgaatataagagcttgtactgaaaccatttatttctttctattttgctatttgcaaatgcttgttatcttccctacatgaagtggcagtaacctttttcacatttaagctacccttctaccttttgaagtgatttgcagttactcatctgagacagcatcagtatttgactaaatcattgtttcacaactgaatagtcttgttcttttagtagcaacgaaatcctaagctcttgaggccattcacctgccaacctgaccatactgctttcaaaagtcttttctcatcagtagaatctattttggtcacttctagtcaatgaaaaatgtaaacttttaggagagaatgtttcttaggactcacccactccattcaatgttatatataaaatagtgtgatcaatcacaatgtccatctttagacagttggttaaataaattatctggtctttgaaaagaccgtgctgggcgcggtggctcttgcctgtaatcccagcactttgggaggctgaggcgggcagatcacctgagatcgggagtttgagaccaagcctgaccaatatggagaaaccctgtctctactaagaacacaaaattagctgggcatggtggtgcatgcctgtaatcccagctacttgggaggccgaggcaggagaattgcttgaacccgggaggcagaggttgcagtgagctgagatagcgccattgcactccagcctgggcaacaagagcaaaactctgtctcaaaaaaaaaaaaaaatgatggagctccgaatgtgcttaagtggaaagatatctatgaaatatggtggttttttaaaacacaaaaattatagaatatgggatcccgtgtgtgtgtgtgtgtgtttgaatgaaaaatgcttatgtattgacagaacacttctagaatgatacccaaactcctggagtgggagtggggaatgccttctacgtacacactgttctactgtttgaattttttaatatgagcccaaattgtataatctttttttaataaaggggag

SEQ ID NO: 490 - DNA, 5438 bp, Artificial
  cDNA Sequence
gatgggggagcccggcttcttcgtcacaggagaccgcgccggtggccggagctggtgcctgcggcgggtggggatgagcgccgggtggctgctgctggaagatgggtgcgaggtgactgtaggacgaggatttggtgtcacataccaactggtatcaaaaatctgccccctgatgatttctcgaaaccactgtgttttgaagcagaatcctgagggccaatggacaattatggacaacaagagtctaaatggtgtttggctgaacagagcgcgtctggaacctttaagggtctattccattcatcagggagactacatccaacttggagtgcctctggaaaataaggagaatgcggagtatgaatatgaagttactgaagaagactgggagacaatatatccttgtctttccccaaagaatgaccaaatgatagaaaaaaataaggaattgagaactaaaaggaaattcagtttggatgaattagcaggtcctggagctgaaggcccctcaaatttgaaatccaaaataaataaagtgtcttgtgaatctggtcagccagtgaaatcacaggggaaaggtgaagtggccagtacaccctctgacaatttggatcctaagttgactgcccttgagccaagtaagaccacaggggctcccatttaccctggcttccccaaagtcacagaggttcatcatgagcagaaagcctcaaactcttcagcatctcagagaagcttacagatgtttaaggtgaccatgtccaggattctgaggctcaaaatacagatgcaggaaaaacatgaagccgttatgaatgtgaaaaagcagacccaaaaggggaactcaaagaaagttgtgcaaatggagcaggaacttcaggacttacagtcccagctgtgtgcagagcaggctcagcagcaggcaagagtggagcaactagagaagactttccaggaagaggaacagcatcttcagggtttggagatagcccaaggagaaaaggacctgaagcaacagctggcccaggctctgcaggagcattgggctctaatggaagagctaaatcgcagcaagaaggactttgaagcaatcattcaagccaagaacaaagaattagagcagaccaaggaagagaaggagaagatgcaagcacagaaggaagaagttcttagccacatgaatgatgtgctagagaatgagctccaatgtattatttgttcagaatacttcattgaggctgtcaccttgaactgtgcccacagtttctgctcctactgtatcaatgaatggatgaagcggaagatagaatgccccatttgtcggaaggacattaagtccaaaacgtactctttggttctggacaattgcattaataagatggtaaataatctgagctcagaagtgaaagaacgacgaattgttctcattagggaacgaaaagcaaagagattgttctgaagaccgtgctctaagggcatttgaaagactgccaggtagtgcgagcctgagatggtctggaggattctctctagccgtgactccgctgctctgaaggtcaactgagaagtcttgtgggacagagacttgagttaggaagccctcagtcacttgccttccacggtggccagccctgctgccatcattggctgaagcaccaccaggattcacggcacccaactgcttcagggtacttcgtagactctgcctcactacatgtcgaaagagttatttgagttctcttctgtttttttttaatttgttgttgttgttactgttttgatacctcggaaacacctccgttgacagttgttttggataggttgggtgtaccccatggctgcctctgaaggcagtgtctattttgagaggatggcttacctcttctttgtgaaaatactatctcatttcctggaaataaaatgtaaaacctgtcagttgctcagctgggctttggtgtatttaccttccttcccttcctgctcccagacagtctcacaagtaaacaccagcagctcatagattacaaccaagaaagtgactgtatcagatgatagacttcaagtgaatgtcagcctaagaggccaagctgcagatcgtggcaacagatgagctctgttaacctcctgactgtcgtgtttcctttttattacagaggtgggtcactgtttaccttgtttcaggggtgggagaaactcctttccttcagctggcatttgaatgtttccaaatctattttatctgacgtcatgaacacacaggcaatgattttatgacaacttgatgtgcttttttctttatttttcttttacattagaagttttctctcttttctccacctctcctttatttttaattttaattttaatttttgaaacaagatctgactctgttgcccaagctggagtacagtagtgcaatctcagctcactgcaacctccacctcccagactcaagccatcctcccacctcaacctcccaagtagctgggactacaggcatatgccatcacacccagctaatttttgtttttctgtagagacagggtttcaccatgttggccaggctggtctcaaattcctgaccttaagtgatccacctgcctaggcctctaaaatgctgggattacaggcgtgagccaccacgcccagcctataccccatgtattttcataaagggttggaaactattgattgccaactttttaaggatggtagggattttttctttgttgaatatactgtgaattttgggattctggagtccttagtcttcatttccattcttctgcccatgattactgatcaaaatactggtagagtcatggaggaagtaagttaaatgtggaaaaaatgctttaaaagtacttactataaccacatcataagaattctggaaaaatagagaacaaaaggaaaagattgttaccaccttgatttaataacttcttgtttccccatacatgtgttttgtttatagattgcatgggtatatgtcaatttttatatgttctgtgtttagtttacatattgtaattcatttttaagagagtacagacatacactttttgagtaggcaatatgttcacatagtttgaaattaaaggtacaaaatggcgtagaatgaaatgcctctcaccctttccccacagcgactacttcccactcagaggcaacaagtattacagttgcttgtatattcttccagagatctctgtctatacaagcaaaaacacatgtggtctttttccttgctttgcacaaatggtaaactgtacgctattctgaaccttgcttttttcagatatatgttggcaacagttccatgtcagtacatagtttcctttctttattacagctgcctgttttttcattgtgtatttgcaccatcatttacttttctggcttacttttgatagaaatctaggttggttcaaacctttttactcttaaaacaatgctgcagttaacacccttgtacatatatctttagagagaagatattttaaaaagaaatacctttttaaaaattattttattattttttaatagagactatgttgcctaggctggtcttgaaattctgggctaaagcaatcctaccaccttggcctcccaaagtgctgagattacaggcatgagccattgcacctggccaagaagagacatcttgacttgagcctgaagactatgtacagagactgacctcacagactgaccattccatcccacagctgctggacatagagtgatttgcagcccctcctttcagagtaccacatccctctcaagtgttccacaacatctaggaaagtgagctcttaaagacagactaaaaagagtaataaatcaatacaacaacattaaaagccagactagcggagtttgaatcttggccctgctgttagtaactgtgtgagccttgggcaagttactcagcctccttgtgtcttggttttggtttcttcatctctaagtaattatatctgtcattattgccctgatcacaaacaaaagcctgaatgtactatgtttaaaagacaaaccaaaaattaacccaaacttgcattatttgtctgagctacagaatgttctttccttggagagatatctgatattaaacatcatctgcattttacttgcctagaaaatacacggtaacttttctgccttgcagcatcaaactatagtacagctgagccccagtgctgtgcagtctgactctaattaaaggcaccttctttacagcagggctctggggaactggaaaagggggtttgtttcattatctggttttattaagcagatgaatgcagccagctatatgaagcactttgcagtgaatggcaggtgtcccatatctggttatgttaacctagaaagggctcactctacctctaggcatgtttcatcccaacaatcagactgtgccaaagcaggggactttgtcctttgtggattgcatagctggatacccatcatctgtttctctgattggaagctgctgttgtacagaaagacctgcatttcccccttgtctccagttctctcactactttttcctcctctgtgagtgaccatccaggcagtcaccataactgctggagtgtctgggattggtagctctctccaactgcctgcttgctctttacagcctctctctgtgactggaatctctccacctcatcgtatctaaggataacccagaaacatggggtgtcctaggtatgtttatctcgacactgaaccccctaggcttctgatgaatccagtgattagctaaatttgacatagaaagtaagaaggaatgtctactttgtattgtggtcctaatctaagatcaggagaatcctggaattgttatctgtctcttgctctgagatacagacttgttcataggtgtggggcctgattggaacaggatctgccattggtcacaataggtcaagggcttgttctgaaccctagttagcttcattcagagaaagaaacttcctacctggtcagctttttcagcttctccaacaaatgggagttgaggcagtaggagtgtggggttcttgggaagacgatggggccttgtattaaggagaaataatgaactatcttcttgattcttccattgagaaaagcatatgaatcctaggaaagggctcagcctgtgataggcattcaataaatactccaatgctgtcattcctttgtctacagcatccccaaacaatgtaccagtgatgggctacctgagctcatctagtcgccaagcagtatctcctgcttgctgctgctttactacattccagatgcccacctcatccaatttccagagccactatctctgctgtccactttccttcaggctctgtgaatacttcaacctgctgtgatttggggccgtttgtactctgcatgtattcaataaattcaattcagcaatagtt

SEQ ID NO: 491 - DNA, 2643 bp, Artificial
  cDNA Sequence
ggctatctcccagcaaacactgagaggaggaagttgaccctgcagcggaagcgggaggaatattttggcttcattgaacagtattatgactctcgaaacgaggaacatcaccaggatacctacagacagattcacattgacattccaaggacgaatcctctcattccgttgttccagcaaccacttgtacaggagatctttgaaagaattctatttatttgggccatccgccaccctgccagtgggtatgtccagggaattaatgacctggtcactccattctttgtcgtcttcctctcagaatatgtggaagaggatgtggagaactttgacgtgaccaacttgtctcaagacatgctgcgaagcattgaggctgacagcttttggtgcatgagcaagctgctggatggaatccaggataactacacctttgcacaaccaggaatccagaagaaggtgaaggcactggaagagcttgtcagccggattgatgagcaggtacataatcacttcaggaggtacgaggtagaatacctgcagtttgccttccgctggatgaacaacctgcttatgcgggagcttcctcttcgctgcaccatccgcctgtgggacacatatcagtctgaaccagaagggttctcccactttcatctctacgtgtgtgcagccttcttgatcaagtggaggaaagagatcttggatgaggaggattttcagggtctcctcatgctgctacagaacctacctacaatacactggggcaacgaagaaattgggctgcttctcgccgaggcatacagactcaagtacatgtttgccgatgccccaaatcactaccgccgataggtgctgtctcctccggggacccagactgccttcatctctgatggcagtctgatcactgtggccactgtgcgagccgtggaccccggccaggaaccactcctgttgtacaaagctcacacccaccgcccaggtcttaactttctggcatccaccactccatgtctctggatgtgtcacttggaccactgtcagtattccatgccgcgtggatgggcccagttctgggagaggacagaaaaggtggtacagggttgtctgcccctttaaaagaaactggacaaagaaggggaaggctcagggtctcacctcacattgtccctacaaggacaggccccaactgataaccgttgcttttttttttttgtgaacatagtttgatttgatcacaggtcaaaaacgccttatattttcgaaagactcctggcccctcttccctcttcctggtttcctagccgttccccttctgccccagtctgagccagtgaggggtagctttttaaaaccattattctagatggaggaggcactgatgcttgtaactctggaaagaggcctacacccaagggctaggaattttatttttccttttctcaccaggtgtctgcatgtgtgtgtgggtgtgaatgtgtatacatgcccatcagcatttagtcacatgtctgaatttctgtgtccagacgagccccatcaaactagttgggaagggccccagtgaccaagtgtataagcatcccttgaagagggattggggcaggggaggcagaaggggctctccagaccccttttccatgatgacccactccaagatattatgtgtaaattgtgttattatgtatatgggtaaagatgtacaaatatatgtcctctttgtagcagatatgattttatatttataatgtgcatcaacatgtgaaagcaatctaggtcactagcacagaggaagttgccaggaaggtggcttcagcacctccaggttggttctgggtgtcctgctgtgaggggtagaacgggaggctgctgaagtgagtagctgagcagctggagccatcccaagcatcagtgtctcagagtcctcctcgcccctttcttcaccccgccccccaacccccagactttcctggagcatctgccctttgctcctagcagcctccccaggaagggactgcagaggcgggcaagccctctctatgtgtttttatccccaccttccccggaatctggggagggcttttgtttttacgttttcaagttcagcattgtattcggacagaagctgtgactgaagactcagtgccaaggaaaggggcttcttgtgtgtccctcgggtttggggctcttctcagagagcagcactccatatcccttactgtcaccttcactccccacacagctcatgagatgtgtgacccctgtttgagttttggtatttggtagtggagggtggggggatgggggccagcagctgtcatcctcctgggaagccgagcagtgtccctggtgggtaacaccctcaagtctctttgccagtgaggccccaccacatcggtgtgagttaggtttctcatctggagctgtttctcaggcattcttcccaaccctcttccttttccccttcggtgtgcctcagtggtctccttcatagagtgagagggcttgagaccctccctcaaccggactaattaaagaaagacacttgtgttcccaagtggtggttttatttttttagtttttatgtttgtatgggaaattgtggataaagtgaaaagaattgtaaataaatggtgtatttcctcctcc

SEQ ID NO: 492 - DNA, 684 bp, Artificial
  cDNA Sequence
atgggagacgctgggagcgagcgcagcaaagcgcccagcctgccgcctcgctgtccctgcggcttctgggggtccagcaagactatgaatctctgttccaaatgctttgctgattttcaaaagaaacagccagacgatgattccgctccaagtacaagtaacagccaatcagatttgttttccgaagagaccaccagtgacaacaacaatacctcgataaccacgccaactcttagtcccagccagcagccgcttccgacagaactgaatgtaacttcaccgagtaaagaggagtgtgggccatgcacagacacagctcatgtctcattaatcacaccaacaaaaagatcctgtggtacagattcacagtctgagaatgaggcttcaccagtaaaacggccacgactacttgagaatacggaacggtccgaggaaaccagtcgatctaaacagaagagtcgacgtcggtgcttccagtgccaaaccaaactggagctggtgcagcaggaattgggatcgtgtcgctgcggttatgtgttctgtatgttacatcgcctccccgagcagcacgactgcacattcgaccacatgggccgtggccgggaggaagccatcatgaaaatggtgaagctggaccggaaagtggggcgctcctgccagcgcatcggggaggggtgctcctga

SEQ ID NO: 493 - DNA, 1497 bp, Artificial
  cDNA Sequence
cgtctggccgtgagatgtttcgggagccggggtctctccgctgcagacatgacgaagggccttgttttaggaatctattccaaagaaaaagaagatgatgtgccacagttcacaagtgcaggagagaatcttgataaattgatagctggaaagctgagagagactttgaacatatctggaccacctctgaaggcaggcaagactcgaaacttttatggtctgcatcaggacttccccagcgtggtgctagttggcctcggcaaaaaggcagccagaatcgacgaacaggaaaactggcaggaaggcaaagaaaacatcagagctgctgttgcagcaggatgcaggcagattcaagacctggagctctcttccgtggaggtggatccctgtagagatgctcaggctgctgaggagggcgcggtgcttggtctctatgaatacgatgacctaaagcaaaaaaagaagatggctatgtcggtgaagctctatggaactggggatcaggaggcctggcagaaaggagtcctgtttgcttctgggcagaacttggcaatggagacgccagccagcgagatgatgccaaccagatttgccgaaattattgagaagaatctcaaaagcgctagtagtaccgagtttcatatcagacccaggtcttggattgaggaacaggcaatgggatcattcctcagtgtggccaaaggatctgacgagccctcagtcttcttggaaattcactacataggcagccccaatgcagacaaaccacccctttttgttgggaaaggaattacctttgacagtggtggtatctccatcaaggcttctgcaaatatggacctcatgagggccgacatgggaggagctacaactatatgctcagccattgtgtctgctgcaaatctcagtttgcccattaatattataggtctgcccctctgtgaaaacatgcccagcggcaaggccaacaagctgggggatgttgttagagccaggaacaggaagaccatccaggttggtaacactgatgctgaggggaggctcatactggctgatgcgctctgttacgtgcacacatttaacccgaaggtcatcctcaatgccaccaccttaacaggtgtcatagatgtagctttggggtcaggtgccactggggtctttaccaattcatcctggctctggaacaagctcttcgaggccagcattgaaacaggggaccgtgtctggaggatgcctctcttcaaacattgtacaagacaggttgtagattgccagctggctgatgttaacaacattggaaaatatagatctgcgggagcatgtacatctgcggcattcctgaaagaattcgtgactcatcctaagtgggcacatttagacatagcaggtgtgatgaccaacaaagatgaggttccctatctatggaaaggcatgaccgggaggcccacaaggactctcatagagttcttacttcgtttcagtcaagacaatgcttag

SEQ ID NO: 494 - DNA, 177 bp, Artificial
  cDNA Sequence
atgctattcattgtctatcagtgtgggggcacaatatattttagtttaaggtgcttgatgaacacaatgattacatggaccctccatgtcagccttggaagttgtgattctgaggctgggaagctggactatctttggaagctaaatttggaagtgaaagggggatgtaggatatga

SEQ ID NO: 495 - DNA, 2350 bp, Artificial
  cDNA Sequence
atgcagaagcattacacggtggcctggtttctttactcagcccctggggtagatcccagccccccatgtaggtcccttggctggaaaaggaagagggagtggtcagatgaatctgcggaggagccggagaaggagctcgcccctgagcctgaggagacctgggtagtggagatgctgtgtgggctcaagatgaagctgaagcaacagcgagtgtcacccatcctccctgagcaccacaagggcttcaacagtcagcttgcccctggggtagatcccagccccccgcataggtccttttgctggaaaaggaagatggagtggtgggacgaatctgaggagtcgttggaggaggagccacggaaggtgctcgcccctgagcctgaggagatctgggtggcggagatgctgtgtggcctcaagatgaagctgaagcgacggcgagtgtcgctcgtgctccctgagcaccacgaggccttcaacaggctgcttgaggatcctgtcattaaaagattcctggcctgggacaaagatctgagggtgtcggacaagtatctcctggctatggtcatagcgtatttcagccgggccggcttcccctcctggcaataccaacgcattcatttcttcctggctctctacctggccaatgacatggaggaggacgacgaggactccaaacaaaacatcttccacttcctgtatgggaagaaccgctctcgcatacccttgctccgtaagcgttggttccagttaggccgccgttccatgaacccgagggccaggaagaaccgctctcgcatacccttgctccgtaagcgtcggttccagttaggccgttccatgaacctgagggccaggaagaaccgctctcagatagtcctgttccagaaacgtcggttccagttcttctgttccatgagcggcagggcttgggtttccccggaggagttggaggagatccaggcttatgacccagagcactgggtgtgggcgcgagatcgcgctcgcctttcctagagctccagggaccgtggaggcctgaggtcatcggcctgagagaagaacaccggacccaggggagatgtggattttcagcaggaactttattccaatgctaatggcagacaccaggaaggaggagaggaaccatttgtgcagatcatctagaagaacctggaccattcttgatggagctgaatacagtgatcacgttgtcctcctaggagcaggggtggggggaggggggtggggtccttctaggagtccttggagaaaagtaagaaaccaggagtgtttccagttccaccctttcctgcagcaccaccaccctttctatattgctgaattccaacctccctggggcggaacctggaggtgctgtttcttatggacttggttaccacagtccagaagcatttgaaggcacaatgcaggggctcagattggcacagatttcttctgtgaaatatcagtgccacagattgtaacagatagcttcatgcacactctgcattttattggtttgtttggaaaatgttggccattgaattattcatagatttatttcaaatagtttggaaattgttgtacttttgaaaacatgctgttcctgtagttttttgatgagagttatagttgttatatatacataaagataattttcttttcatttttaagagacaattctttttatcctaaatattttattatctttaaatttctttctgtattattatatgtgctcctgaagcgagcactctttttatctatgatacttccataataatctcttctatttatagctattggtagttccccaccacaaaaaaaacataattctggtgatagaaatttttatttgctgtttaggtttgtgactgaattgtgagaattcagttgtgatttttaacatgtctcagatatatatactaacacgtctaatatatactatctattttattggtttattttgaaaaacatgggtatagaattatttaaatattattttatttattgaaatatttattaaatatatttatttaaatattattacttgaaatattattttaaatatttttgaaatactgctatttttgaatagatgctgtttctataaagctgtgtgatgggtgttataactgttatatacacatacgtataattttgctttcctttttaagagaggattcttttcatcctaaatcttttacctttcaatctttgtatctattattacacgtgttgctgaagggagcatggtttttatctgtgatacttagttaacatatatattacatttatagctatgtagtagttcccctaaattcttgtaaaaataaatttttatttg

SEQ ID NO: 496 - DNA, 375 bp, Artificial
  cDNA Sequence
atgactcttaacgagcatgctgccttcaagcatctgtttaacaaagcacatcttgcaccgcccttaatccatttaaccctgagtggacacagcacatgtttcagagagcacagggttgggggtaaggtcacagatcaacaggatcccaaggcagaagaatttttcttagtgcagaacaaaatgaaaagtctcccatgtctacttctttctacacagacacggcaaccatccgatttctcaatcttttccccacctttcccgcctttctattccacaaagccgccattgtcatcctggcccgttctcaatgagctgttgggcacacctcccagacggggtggtggccgggcagaggggctcctcacttcccagtag

SEQ ID NO: 497 - DNA, 288 bp, Artificial
  cDNA Sequence
tttttttttgagacagagtctttctccgtcgcccaagctggagtacagtggggttatctcggctcactgcaacctcccctcccgggttcaagcgattctcctgcctcagcctccggagtagttggggctacaggtgtacaccaccacgctgggctaatttttgtatttttagtagagatggggtttcaccatgttagccaggctggtcatgaactcctggcctcaagtgatcggcccgcctcagcctcccagagtgctgggattacaggcatgagccaccttgcctgg

SEQ ID NO: 498 - DNA, 1415 bp, Artificial
  cDNA Sequence
gccacttccgggagtcggaaaggaaagctgtgggaccatcctggcaaccccggtgtttggctgggttctagcgtagccgtctgtgtggccggtgggggacctgcggtcggagtgggagggccagtctgcacccaagaggtggaagaggacgggctttaggctggaagcgccttagaggagccatttttccaggtggggccccaggcagaggctccgacagggagcctggccatagtcgcgcagccggggaggtggagcgcgtcccagacccgagcccccgacctcagccaaacccattccttctgcccttggaggccagaggggactctgagctccggaaaggatgcctggtttgcttttatgtgaaccaacagagctttacaacatcctgaatcaggccacaaaactctccagattaacagaccccaactatctctgtttattggatgtccgttccaaatgggagtatgacgaaagccatgtgatcactgcccttcgagtgaagaagaaaaataatgaatatcttctcccggagtctgtggacctggagtgtgtgaagtactgcgtggtgtatgataacaacagcagcaccctggagatactcttaaaagatgatgatgatgattcagactctgatggtgatggcaaagatcttgtgcctcaagcagccattgagtatggcaggatcctgacccgcctcacccaccaccccgtctacatcctgaaagggggctatgagcgcttctcaggcacgtaccactttctccggacccagaagatcatctggatgcctcaggaactggatgcatttcagccataccccattgaaatcgtgccagggaaggtcttcgttggcaatttcagtcaagcctgtgaccccaagattcagaaggacttgaaaatcaaagcccatgtcaatgtctccatggatacagggcccttttttgcaggcgatgctgacaagcttctgcacatccggatagaagattccccggaagcccagattcttcccttcttacgccacatgtgtcacttcattgaaattcaccatcaccttggctctgtcattctgatcttttccacccaaggtatcagccgcagttgtgccgccatcatagcctacctcatgcatagtaacgagcagaccttgcagaggtcctgggcctatgtcaagaagtgcaaaaacaacatgtgtccaaatcggggattggtgagccagctgctggaatgggagaagactatccttggagattccatcacaaacatcatggatccgctctactgatcttctccgaggcccaccgaagggtactgaagagcctcacctgggggcattttgtgggtggagggccagagtgtgtatacccaggcttgtctggaaggagaaggcctttgctgcctgaaagtctcatgtt

SEQ ID NO: 499 - DNA, 1303 bp, Artificial
  cDNA Sequence
ggcgctgggcagtgtggaggtcgttggagtcacttccccgtcaccagctcctgtgcctgccagtcggtgcccctcccgctccagccatgctctccgccctcgcccggcctgccagcgctgctctccgccgcagcttcagcacctcggcccagaacaatgctaaagtagctgtgctaggggcctctggaggcatcgggcagccactttcacttctcctgaagaacagccccttggtgagccgcctgaccctctatgatatcgcgcacacacccggagtggccgcagatctgagccacatcgagaccaaagccgctgtgaaaggctacctcggacctgaacagctgcctgactgcctgaaaggttgtgatgtggtagttattccggctggagtccccagaaagccaggcatgacccgggacgacctgttcaacaccaatgccacgattgtggccaccctgaccgctgcctgtgcccagcactgcccggaagccatgatctgcgtcattgccaatccggttaattccaccatccccatcacagcagaagttttcaagaagcatggagtgtacaaccccaacaaaatcttcggcgtgacgaccctggacatcgtcagagccaacacctttgttgcagagctgaagggtttggatccagctcgagtcaacgtccctgtcattggtggccatgctgggaagaccatcatccccctgatctctcagtgcacccccaaggtggactttccccaggaccagctgacagcactcactgggcggatccaggaggccggcacggaggtggtcaaggctaaagccggagcaggctctgccaccctctccatggcgtatgccggcgcccgctttgtcttctcccttgtggatgcaatgaatggaaaggaaggtgttgtggaatgttccttcgttaagtcacaggaaacggaatgtacctacttctccacaccgctgctgcttgggaaaaagggcatcgagaagaacctgggcatcggcaaagtctcctcttttgaggagaagatgatctcggatgccatccccgagctgaaggcctccatcaagaagggggaagatttcgtgaagaccctgaagtgagccgctgtgacgggtggccagtttccttaatttatgaaggcatcatgtcactgcaaagccgttgcagataaactttgtattttaatttgctttggtgatgattactgtattgacatcatcatgccttccaaattgtgggtggctctgtgggcgcatcaataaaagccgtccttgattttatttttcaaggtcccttctgt

SEQ ID NO: 500 - DNA, 1405 bp, Artificial
  cDNA Sequence
caccaggaggaaataattcacaagttggccatgcagctgagacacattggggacaacattgatcataggatggttcgagaggatcttcaacaggatggcagagatgcactagatcattttgtcttctttttctttagaagagttcaggtgttgctgcattttttctggaacaaccatttgctgtaaaaggaaagtaaaggtcaagtggtcaagttctgttttctttttaccctctgagaaacatgaatcccactgggacagatgggaagaacacccttctccgtctccctctttttgtacccatcactgttggtctacacccagtttgttgaagaactgcgggttcacgagccatttgtctcttcggaggagctagctatgagatgtctgcgatcacatcacggtaaagcccaaggagtaattaggaccccaggaagccttgctgcccagaaaacaccagcgctgtggatggtcccagggctccttgtgaggaaaccttgaacatttccttccaggaatgaaagagaacctcgtcctcaaactaaaggccacagaaatgggcactacctcctggcccactccctgggcaccatgccctctggtgacctgttggctccactcttgtcactcatgtccagatctgcagtgccagcttctccttctcggtgacatgtcacctccctgccccaatcctggctccaaccctctctggaaaatcgaagtgaaacatttgtctctaatactcaaattcaacatatggctcatctcatctaccttcccatttccatgcctagaggccccactactaccactagcaccgttgggtgtttccttctcaggctctgattctacaacatttacgttcttttctcacctttgatcccctcactcctctgtgacccccttcaagtcttccttcaccactccagtgttttcccataccactcgaccctgctcgaaggtatctttccctgctctgtcatcctcttttaggcatgcctgcttaaaatcgggagtgcttagtccttggccaacagtcctgccttctagaagaatgtaagacctgaaagagttatgaatctatcactaggcaaaaacttctcttttcctattgctggatggttttgctattattggttggtgggccctttgcctgtggaatgtatttcactcattctctcctgcacgctgttaggcagttctttcacctgcatgcttcttcttttacctttttgtctacctcatagtccctctctcccctcctttaaaagaattataaatattaggaaagcttgttgttataaattaaaagtttacatatgtatcttgagttcttcataggggaagtgttattttaaaaaattctaaaaatgaaataaatattgttattttattgagcatgaaa

SEQ ID NO: 501 - DNA, 1057 bp, Artificial
  cDNA Sequence
atgtgtccttggcggcctagactaggccgtcgctgtatggtgagccccagggaggcggatctgggcccccagaaggacacccgcctggatttgccccgtccggcccgggcccctcgggagcagaacagccttggtgaggtggacaggaggggacctcgcgagcagacgcgcgcgccagcgacagcagccccgccccggcctctcgggagccggggggcagaggctgcggagccccaggagggtctatcagccacagtctctgcatgtttccaagagcaacaggaaatgaacacattgcaggggccagtgtcattcaaagatgtggctgtggatttcacccaggaggagtggcggcaactggaccctgatgagaagatagcatacggggatgtgatgttggagaactacagccatctagtttctgtggggtatgattatcaccaagccaaacatcatcatggagtggaggtgaaggaagtggagcagggagaggagccgtggataatggaaggtgaatttccatgtcaacatagtccagaacctgctaaggccatcaaacctattgatcggaagtcagtccatcagatttgctctgggccagtggtactgagtctaagcactgcagtgaaggagttagtagaaaacagtctggatgctggtgccactaatattgatctaaagcttaaggactatggagtggatctcattgaagtttcagacaatggatgtggggtagaagaagaaaactttgaaggcttaatctctttcagctctgaaacatcacacatgtaagattcaagagtttgccgacctaactgaagttgaaactttcggttttcagggggaagctctgagctcactgtgtgcactgagcgatgtcaccatttctacctgccacgcgtcggtgaaggttgggactcgactggtgtttgatcacgatgggaaaatcatccaggaaaccccctacccccaccccagagggaccacagtcagcgtgaagcagttattttctacgctacctgtgcgccataaggaatttcaaaggaatattaagaag

SEQ ID NO: 502 - DNA, 1359 bp, Artificial
  cDNA Sequence
cgagcatcgcatagcctgcggggctggatgctgaccgcccgggccagcacctaggcggacgcggagctgtgcagaccagggttcgcgcgggccgggtggaggctcaagcggggaccccggagcgtgagccccggagtcggcggcgctggggccagaggggccgggagggagtcggctgaggtggcggcggaggcgaagtggcggcggaggcgaaggggcggcgggacccgggcctggcccgtatgtgtccttggcggcctagactaggccgtcgctgtatggtgagccccagggaggcggatctgggcccccagaaggacacccgcctggatttgccccgtaggcccggcccgggcccctcgggagcagaacagccttggtgaggtggacaggaggggacctcgcgagcagacgcgcgcgccagcgacagcagccccgccccggcctctcgggagccggggggcagaggctgcggagccccaggagggtctatcagccacagtctctgcatgtttccaagagcaacaggaaatgaacacattgcaggggccagtgtcattcaaagatgtggctgtggatttcacccaggaggagtggcggcaactggaccctgatgagaagatagcatacggggatgtgatgttggagaactacagccatctagtttctgtggggtatgattatcaccaagccaaacatcatcatggagtggaggtgaaggaagtggagcagggagaggagccgtggataatggaaggtgaatttccatgtcaacatagtccagtacagaacctgctaaggccatcaaacctattgatcggaagtcagtccatcagatttgctctgggccagtggtactgagtctaagcactgcagtgaaggagttagtagaaaacagtctggatgctggtgccactaatattggatctaaagcttaaggactatggagtggatctcattgaagtttcagacaatggatgtggggtagaagaagaaaactttgaaggcttaagtccttactttacagtctctttcagctctgaaacatcacacatgtaagattcaagagtttgccgacctaactgaagttgaaactttcggttttcagggggaagctctgagctcactgtgtgcactgaggcgatgtcaccatttctacctgccacgcgtcggtgaaggttgggactcgactggtgtttgatcacgatgggaaaatcatccaggaaaccccctacccccaccccagagggaccacagtcagcgtgaagcagttattttctacgctacctgtgcgccataaggaatttcaaaggaatattaagaaggacgtgcctgcttccccttcgccttctgccgtga

SEQ ID NO: 503 - DNA, 3144 bp, Artificial
  cDNA Sequence
atgaagcaggtgcccaacccactgcccaaggtgctgagccggcgcggggtcggcgctgggctggaggcggcggagcgcgagagcttcgagcggactcagactgtcagcatcaataaggccattaatacgcaggaagtggctgtaaaggaaaaacacgccagaaatatccttttggatagcccatccgttgttttccataaccccccctcaccgtgcatactgggcacccaccatgagaaaggggcacagaccttctggtctgttgtcaaccgcctgcctctgtctagcaacgcagtgctctgctggaagttctgccatgtgttccacaaactcctccgagatggacacccgaacgtcctgaaggactctctgagatacagaaatgaattgagtgacatgagcaggatgtggggccacctgagcgaggggtatggccagctgtgcagcatctacctgaaactgctaagaaccaagatggagtaccacaccaaaaatcccaggttcccaggcaacctgcagatgagtgaccgccagctggacgaggctggagaaagtgacgtgaacaactttttccagttaacagtggagatgtttgactacctggagtgtgaactcaacctcttccaaacagtattcaactccctggacatgtcccgctctgtgtccgtgacggcagcagggcagtgccgcctcgccccgctgatccaggtcatcttggactgcagccacctttatgactacactgtcaagcttctcttcaaactccactcctgcctcccagctgacaccctgcaaggccaccgggaccgcttcatggagcagtttacaaagttgaaagatctgttctaccgctccagcaacctgcagtacttcaagcggctcattcagatcccccagctgcctgagaacccacccaacttcctgcgagcctcagccctgtcagaacatatcagccctgtggtggtgatccctgcagaggcctcatcccccgacagcgagccagtcctagagaaggatgacctcatggacatggatgcctctcagcagaatttatttgacaacaagtttgatgacatctttggcagttcattcagcagtgatcccttcaatttcaacagtcaaaatggtgtgaacaaggatgagaaggaccacttaattgagcgactatacagagagatcagtggattgaaggcacagctagaaaacatgaagactgagagccagcgggttgtgctgcagctgaagggccacgtcagcgagctggaagcagatctggccgagcagcagcacctgcggcagcaggcggccgacgactgtgaattcctgcgggcagaactggacgagctcaggaggcagcgggaggacaccgagaaggctcagcggagcctgtctgagatagaaaggaaagctcaagccaatgaacagcgatatagcaagctaaaggagaagtacagcgagctggttcagaaccacgctgacctgctgcggaagaatgcagaggtgaccaaacaggtgtccatggccagacaagcccaggtagatttggaacgagagaaaaaagagctggaggattcgttggagcgcatcagtgaccagggccagcggaagactcaagaacagctggaagttctagagagcttgaagcaggaacttgccacaagccaacgggagcttcaggttctgcaaggcagcctggaaacttctgcccagtcagaagcaaactgggcagccgagttcgccgagctagagaaggagcgggacagcctggtgagtggcgcagctcatagggaggaggaattatctgctcttcggaaagaactgcaggacactcagctcaaactggccagcacagaggcaagatctatgtgccagcttgccaaagaccaacgaaaaatgcttctggtggggtccaggaaggctgcggagcaggtgatacaagacgccctgaaccagcttgaagaacctcctctcatcagctgcgctgggtctgcagatcacctcctctccacggtcacatccatttccagctgcatcgagcaactggagaaaagctggagccagtatctggcctgcccagaagacatcagtggacttctccattccataaccctgctggcccacttgaccagcgacgccattgctcatggtgccaccacctgcctcagagccccacctgagcctgccgactcactgaccgaggcctgtaagcagtatggcagggaaaccctcgcctacctggcctccctggaggaagagggaagccttgagaatgccgacagcacagccatgaggaactgcctgagcaagatcaaggccatcggcgaggagctcctgcccaggggactggacatcaagcaggaggagctgggggacctggtggacaaggagatggcggccacttcagctgctattgaaactgccacggccagaatagaggagatgctcagcaaatcccgagcaggagacacaggagtcaaattggaggtgaatgaaaggatccttggttgctgtaccagcctcatgcaagctattcaggtgctcatcgtggcctctaaggacctccagagagagattgtggagagcggcaggggtacagcatcccctaaagagttttatgccaagaactctcgatggacagaaggacttatctcagcctccaaggctgtgggctggggagccactgtcatggtggatgcagctgatctggtggtacaaggcagagggaaatttgaggagctaatggtgtgttctcatgaaattgctgctagcacagcccagcttgtggctgcatccaaggtgaaagctgataaggacagccccaacctagcccagctgcagcaggcctctcggggagtgaaccaggccactgccggcgttgtggcctcaaccatttccggcaaatcacagatcgaagagacagacaacatggacttctcaagcatgacgctgacacagatcaaacgccaagagatggattctcaggttagggtgctagagctagaaaatgaattgcagaaggagcgtcaaaaactgggagagcttcggaaaaagcactacgagcttgctggtgttgctgagggctgggaagaaggaacagaggcatctccacctacactgcaagaagtggtaaccgaaaaagaatag

SEQ ID NO: 504 - DNA, 3394 bp, Artificial
  cDNA Sequence
ggaaccgccgccggtatccgcgtccgcagcgccgccagccaggcgagagccgtgtgggatcccagcgcccgcactcccgcccccgccaaggagccaggaatggcacaactagagaggagcgccatctctggcttcagctctaagtccaggcgaaactcattcgcatatgatgttaagcgtgaagtatacaatgaggagacctttcaacaggaacacaaaaggaaggcctcctcttctgggaacatgaacatcaacatcaccaccttcagacaccacgtccagtgccgctgctcatggcacaggttcctacgatgcgtgcttacaatctttcccttcctagaatggatgtgtatgtatcgattaaaggattggcttctgggagacttacttgctggtataagtgttggccttgtgcaagttccccaaggcctgacacttagtttgctggcaaggcaactgattcctcctctcaacatcgcttatgcagctttctgttcttcggtaatctatgtaatttttggatcgtgtcatcaaatgtccattggttccttcttcctggtgagtgctctgctgatcaacgttctgaaagtgagcccattcaacaacggtcaactggtcatgggatctttcgtcaagaatgagttttcggccccctcctaccttatgggctataataaatccttgagtgtggtggcaaccacaacttttctgactgggattattcagctaataatgggcgtattgggtttgggcttcattgccacttaccttccggagtctgcaatgagtgcttacctggctgctgtggcacttcatatcatgctgtcccagctgactttcatctttgggattatgattagtttccatgccggtcccatctccttcttctatgacataattaattactgtgtagctctcccaaaagcgaattccaccagcattctagtatttctaactgttgttgttgctctgcgaatcaacaaatgtatcagaatttctttcaatcagtatcccattgagtttcccatggaattatttctgattattggcttcactgtgattgcaaacaagataagcatggccacagaaaccagccagacgcttattgacatgattccttatagctttctgcttcctgtaacaccagatttcagccttcttcccaagataattttacaagccttctccttatctttggtgagctcctttctgctcatatttctgggcaagaagattgccagtcttcacaattacagtgtcaattccaaccaggatttaatagccatcggcctttgcaatgtcgtcagttcatttttcagatcttgtgtgtttactggtgctattgctaggactattatccaggataaatctggaggaagacaacagtttgcatctctggtaggcgcaggtgtgatgctgctcctgatggtgaagatgggacactttttctacacactgccaaatgctgtgctggctggtattattctgagcaacgtcattccctaccttgaaaccatttctaacctacccagcctgtggaggcaggaccaatatgactgtgctctttggatgatgacattctcatcttcaattttcctgggactggacattggactaattatctcagtagtttctgctttcttcatcaccactgttcgttcacacagagctaagattcttctcctgggtcaaatccctaacaccaacatttatagaagcatcaatgattatcgggagatcatcaccattcctggggtgaaaatcttccagtgctgcagctcaattacatttgtaaatgtttactacctaaagcataagctgttaaaagaggttgatatggtaaaggtgcctcttaaagaagaagaaattttcagcttgtttaattcaagtgacaccaatctacaaggaggaaagatttgcaggtgtttctgcaactgtgatgatctggagccgctgcccaggattctttacacagagcgatttgaaaataaactggatcccgaagcatcctccattaacctgattcactgctcacattttgagagcatgaacacaagccaaactgcatccgaagaccaagtgccatacacagtatcgtccgtgtctcagaaaaatcaagggcaacagtatgaggaggtggaggaagtttggcttcctaataactcatcaagaaacagctcaccaggactgcctgatgtggcggaaagccaggggaggagatcactcatcccttactcagatgcgtctctactgcccagtgtccacaccatcatcctggatttctccatggtacactacgtggattcacgggggttagtcgtattaagacagatatgcaatgcctttcaaaacgccaacattttgatactcattgcagggtgtcactcttccatagtcagggcatttgagaggaatgatttctttgacgctggcatcaccaagacccagctgttcctcagcgttcacgacgccgtgctgtttgccttgtcaaggaaggtcataggctcctctgagttaagcatcgatgaatccgagacagtgatacgggaaacctactcagaaacagacaagaatgacaattcaagatataaaatgagcagcagttttctaggaagccaaaaaaatgtaagtccaggcttcatcaagatccaacagcctgtagaagaggagtcggagttggatttggagctggaatcagaacaagaggctgggctgggtctggacctagacctggatcgggagctggagcctgaaatggagcccaaggctgagaccgagaccaagacccagaccgagatggagccccagcctgagactgagcctgagatggagcccaaccccaaatctaggccaagagctcacacttttcctcagcagcgttactggcctatgtatcatccgtctatggcttccacccagtctcagactcagactcggacatggtcagtggagaggagacgccatcctatggattcatactcaccagagggcaacagcaatgaagatgtctaggagatgaactagaaataaggggtcagataatgctggcaaatcctcctacccaaaaaggggtcaattgtccagagacctagactggatacgaactagcagtacttccttcctgactgtgactcctactacctgccagccttcttccttgctctgcgctgggatcatactcccaaatcacattactaaatgccaacaattatctctgaattccctatccaggctcccctcatttcaccttcagcatatattctagtcatgaatttccttcttcacacaccccacatctctgggctttgtgccagaccatctctaacttaatcctctcatccctgttcccctttctccaaagagatgaagctcaaataaaatgtataactctagt

SEQ ID NO: 505 - DNA, 3143 bp, Artificial
  cDNA Sequence
gctgggagacgcctgggcgccgggggctgcaggtcccagggcgggggctgcgtccgtcaccggcaggtacccaggtatgccgcagagccaggcacgccgtgggcactcagtcagtatctgtggaatgaatgaatgatggtcgtccctgggagcttatctctgaggaatggcacaactagagaggagcgccatctctggcttcagctctaagtccaggcgaaactcattcgcatatgatgttaagcgtgaagtatacaatgaggagacctttcaacaggaacacaaaaggaaggcctcctcttctgggaacatgaacatcaacatcaccaccttcagacaccacgtccagtgccgctgctcatggcacaggttcctacgatgcgtgcttacaatctttcccttcctagaatggatgtgtatgtatcgattaaaggattggcttctgggagacttacttgctggtataagtgttggccttgtgcaagttccccaaggcctgacacttagtttgctggcaaggcaactgattcctcctctcaacatcgcttatgcagctttctgttcttcggtaatctatgtaatttttggatcgtgtcatcaaatgtccattggttccttcttcctggtgagtgctctgctgatcaacgttctgaaagtgagcccattcaacaacggtcaactggtcatgggatctttcgtcaagaatgagttttcggccccctcctaccttatgggctataataaatccttgagtgtggtggcaaccacaacttttctgactgggattattcagattattggcttcactgtgattgcaaacaagataagcatggccacagaaaccagccagacgcttattgacatgattccttatagctttctgcttcctgtaacaccagatttcagccttcttcccaagataattttacaagccttctccttatctttggtgagctcctttctgctcatatttctgggcaagaagattgccagtcttcacaattacagtgtcaattccaaccaggatttaatagccatcggcctttgcaatgtcgtcagttcatttttcagatcttgtgtgtttactggtgctattgctaggactattatccaggataaatctggaggaagacaacagtttgcatctctggtaggcgcaggtgtgatgctgctcctgatggtgaagatgggacactttttctacacactgccaaatgctgtgctggctggtattattctgagcaacgtcattccctaccttgaaaccatttctaacctacccagcctgtggaggcaggaccaatatgactgtgctctttggatgatgacattctcatcttcaattttcctgggactggacattggactaattatctcagtagtttctgctttcttcatcaccactgttcgttcacacagagctaagattcttctcctgggtcaaatccctaacaccaacatttatagaagcatcaatgattatcgggagatcatcaccattcctggggtgaaaatcttccagtgctgcagctcaattacatttgtaaatgtttactacctaaagcataagctgttaaaagaggttgatatggtaaaggtgcctcttaaagaagaagaaattttcagcttgtttaattcaagtgacaccaatctacaaggaggaaagatttgcaggtgtttctgcaactgtgatgatctggagccgctgcccaggattctttacacagagcgatttgaaaataaactggatcccgaagcatcctccattaacctgattcactgctcacattttgagagcatgaacacaagccaaactgcatccgaagaccaagtgccatacacagtatcgtccgtgtctcagaaaaatcaagggcaacagtatgaggaggtggaggaagtttggcttcctaataactcatcaagaaacagctcaccaggactgcctgatgtggcggaaagccaggggaggagatcactcatcccttactcagatgcgtctctactgcccagtgtccacaccatcatcctggatttctccatggtacactacgtggattcacgggggttagtcgtattaagacagatatgcaatgcctttcaaaacgccaacattttgatactcattgcagggtgtcactcttccatagtcagggcatttgagaggaatgatttctttgacgctggcatcaccaagacccagctgttcctcagcgttcacgacgccgtgctgtttgccttgtcaaggaaggtcataggctcctctgagttaagcatcgatgaatccgagacagtgatacgggaaacctactcagaaacagacaagaatgacaattcaagatataaaatgagcagcagttttctaggaagccaaaaaaatgtaagtccaggcttcatcaagatccaacagcctgtagaagaggagtcggagttggatttggagctggaatcagaacaagaggctgggctgggtctggacctagacctggatcgggagctggagcctgaaatggagcccaaggctgagaccgagaccaagacccagaccgagatggagccccagcctgagactgagcctgagatggagcccaaccccaaatctaggccaagagctcacacttttcctcagcagcgttactggcctatgtatcatccgtctatggcttccacccagtctcagactcagactcggacatggtcagtggagaggagacgccatcctatggattcatactcaccagagggcaacagcaatgaagatgtctaggagatgaactagaaataaggggtcagataatgctggcaaatcctcctacccaaaaaggggtcaattgtccagagacctagactggatacgaactagcagtacttccttcctgactgtgactcctactacctgccagccttcttccttgctctgcgctgggatcatactcccaaatcacattactaaatgccaacaattatctctgaattccctatccaggctcccctcatttcaccttcagcatatattctagtcatgaatttccttcttcacacaccccacatctctgggctttgtgccagaccatctctaacttaatcctctcatccctgttcccctttctccaaagagatgaagctcaaataaaatgtataactct

SEQ ID NO: 506 - DNA, 999 bp, Artificial
  cDNA Sequence
atgtaccgaccgcgagcccgggcggctcccgagggcagggtccggggctgcgcggtgcccagcaccgtgctcctgctgctcgcctacctggcttacctggcgctgggcaccggcgtgttctggacgctggagggccgcgcggcgcaggactccagccgcagcttccagcgcgacaagtgggagctgttgcagaacttcacgtgtctggaccgcccggcgctggactcgctgatccgggatgtcgtccaagcatacaaaaacggagccagcctcctcagcaacaccaccagcatggggcgctgggagctcgtgggctccttcttcttttctgtgtccaccatcaccaccattggctatggcaacctgagccccaacacgatggctgcccgcctcttctgcatcttctttgcccttgtggggatcccactcaacctcgtggtgctcaaccgactggggcatctcatgcagcagggagtaaaccactgggccagcaggctggggggcacctggcaggatcctgacaaggcgcggtggctggcgggctctggcgccctcctctcgggcctcctgctcttcctgctgctgccaccgctgctcttctcccacatggagggctggagctacacagagggcttctacttcgccttcatcaccctcagcaccgtgggcttcggcgactacgtgattggaatgaacccctcccagaggtacccactgtggtacaagaacatggtgtccctgtggatcctctttgggatggcatggctggccttgatcatcaaactcatcctctcccagctggagacgccagggagggtatgttcctgctgccaccacagctctaaggaagacttcaagtcccaaagctggagacagggacctgaccgggagccagagtcccactccccacagcaaggatgctatccagagggacccatgggaatcatacagcatctggaaccttctgctcacgctgcaggctgtggcaaggacagctag

SEQ ID NO: 507 - DNA, 930 bp, Artificial
  cDNA Sequence
atgcccagtgctgggctctgcagctgctggggtggccgggtgctgcccctgctgctggcctatgtctgctacctgctgctcggtgccactatcttccagctgctagagaggcaggcggaggctcagtccagggaccagtttcagttggagaagctgcgcttcctggagaactacacctgcctggaccagtgggccatggagcagtttgtgcaggtcatcatggaagcctgggtgaaaggtgtgaaccccaaaggcaactctaccaaccccagcaactgggactttggcagcagtttcttctttgcaggcacagtcgtcactaccataggatatgggaacctggcacccagcacagaggcaggtcaggtcttctgtgtcttctatgccctgttgggcatcccgcttaacgtgatcttcctcaaccacctgggcacagggctgcgtgcccatctggccgccattgaaagatgggaggaccgtcccaggcgctcccaggtactgcaagtcctgggcctggctctgttcctgaccctggggacgctggtcattctcatcttcccacccatggtcttcagccatgtggagggctggagcttcagcgagggcttctactttgctttcatcactctcagcaccattggctttggggactatgttgttggcacagaccccagcaagcattatatctcagtgtatcggagcctggcagccatctggatcctcctgggcctggcgtggctggcgctgatcctcccactgggccccctgcttctgcacagatgctgccagctctggctgctcagtctgaggcaaggctgtggagccaaggcggctccaggcaggagacccaggagaggctctacagcagcaagaggagtccaagtcacaccccaggacttccccatatccaagaaaggactgggaagctga

SEQ ID NO: 508 - DNA, 3410 bp, Artificial
  cDNA Sequence
ggggagaggcggctgcggctgcggctgcggctgctggcggggggtgggggggaggaggaaccgggaagggggggcagggcgagcggagagctagctgtgttcctgaggcggcgccgccgcctagggcggtggggaggaggagggagccgcggggcttggcggggtcgggagggagggacgtgctgggggaacgagctggggaagacggagcgggctctgtgccgggcgggcgggcggcgggggggccagcgaccgcagccggggggacgcgggaggatggagcaagtggagatcctgaggaaattcatccagagggtccaggccatgaagagtcctgaccacaatggggaggacaacttcgcccgggacttcatgcggttaagaagattgtctaccaaatatagaacagaaaagatatatcccacagccactggagaaaaagaagaaaatgttaaaaagaacagatacaaggacatactgccatttgatcacagccgagttaaattgacattaaagactccttcacaagattcagactatatcaatgcaaattttataaagggcgtctatgggccaaaagcatatgtagcaactcaaggacctttagcaaatacagtaatagatttttggaggatgatatgggagtataatgttgtgatcattgtaatggcctgccgagaatttgagatgggaaggaaaaaatgtgagcgctattggcctttgtatggagaagaccccataacgtttgcaccatttaaaatttcttgtgaggatgaacaagcaagaacagactacttcatcaggacactcttacttgaatttcaaaatgaatctcgtaggctgtatcagtttcattatgtgaactggccagaccatgatgttccttcatcatttgattctattctggacatgataagcttaatgaggaaatatcaagaacatgaagatgttcctatttgtattcattgcagtgcaggctgtggaagaacaggtgccatttgtgccatagattatacgtggaatttactaaaagctgggaaaataccagaggaatttaatgtatttaatttaatacaagaaatgagaacacaaaggcattctgcagtacaaacaaaggagcaatatgaacttgttcatagagctattgcccaactgtttgaaaaacagctacaactatatgaaattcatggagctcagaaaattgctgatggagtgaatgaaattaacactgaaaacatggtcagctccatagagcctgaaaaacaagattctcctcctccaaaaccaccaaggacccgcagttgccttgttgaaggggatgctaaagaagaaatactgcagccaccggaacctcatccagtgccacccatcttgacaccttctcccccttcagcttttccaacagtcactactgtgtggcaggacaatgatagataccatccaaagccagtgttgcatatggtttcatcagaacaacattcagcagacctcaacagaaactatagtaaatcaacagaacttccagggaaaaatgaatcaacaattgaacagatagataaaaaattggaacgaaatttaagttttgagattaagaaggtccctctccaagagggaccaaaaagttttgatgggaacacacttttgaataggggacatgcaattaaaattaaatctgcttcaccttgtatagctgataaaatctctaagccacaggaattaagttcagatctaaatgtcggtgatacttcccagaattcttgtgtggactgcagtgtaacacaatcaaacaaagtttcagttactccaccagaagaatcccagaattcagacacacctccaaggccagaccgcttgcctcttgatgagaaaggacatgtaacgtggtcatttcatggacctgaaaatgccatacccatacctgatttatctgaaggcaattcctcagatatcaactatcaaactaggaaaactgtgagtttaacaccaagtcctacaacacaagttgaaacacctgatcttgtggatcatgataacacttcaccactcttcagaacacccctcagttttactaatccacttcactctgatgactcagactcagatgaaagaaactctgatggtgctgtgacccagaataaaactaatatttcaacagcaagtgccacagtttctgctgccactagtactgaaagcatttctactaggaaagtattgccaatgtccattgctagacataatatagcaggaacaacacattcaggtgctgaaaaagatgttgatgttagtgaagattcacctcctcccctacctgaaagaactcctgaatcgtttgtgttagcaagtgaacataatacacctgtaagatcggaatggagtgaacttcaaagtcaggaacgatctgaacaaaaaaagtctgaaggcttgataacctctgaaaatgagaaatgtgatcatccagcgggaggtattcactatgaaatgtgcatagaatgtccacctactttcagtgacaagagagaacaaatatcagaaaatccaacagaagccacagatattggttttggtaatcgatgtggaaaacccaaaggaccaagagatccaccttcagaatggacatgattcagggagctagaagacactttaagttatactggaaaattcaggtgccactgaaagccagatttatagtattccatctttaatatgtgggactaacagcagtgtagattgttaccttaatattttttgctgggaccatctacctgccttatactacacttaggaaaaagtattacatatggtttattttgaaacttcaagtattattgccttaatgtctcttaaccctgttacacgctgcttgtagacatgttaatatagtaatacctttatgatatattgagtttaaggactactctttttctgttttatcatgtatgcattattttgtatatgtacagggcaagtaggtatataatttgataaagttgcaattgaaatattattaacagaagatgtaagaaatttctgcatggtctaaatctttgtgtactttatttgtaaattatttgccctggagttttagaaaatagtttctgaattttaaacttgctggattcatgcagccagctttgcaggttatcagagatcaaagattgtaataataattttgtaaattgtaagcaaaaagttatttttatattatatacagtctaattgttcatcctaattgttcctgttttcatctagtcagagattcagtaagtgccttggaacaatattgaattctcttagcttgtgtgtgtttctttaatatttgaactcaagtgggattagaagactatcaaaatacatgtatgtttcaggatatttgacctgtcattaaaaaaaacaaacagttttacagtgcc

SEQ ID NO: 509 - DNA, 453 bp, Artificial
  cDNA Sequence
atggcgtcctatatcgatgaacacgactgtgagccgttggaccctcaagagactcgaaccaacatggtgctggagctcgtaaggtcacttttgaataggatggactttgaagacttggggttggtagtagattgggaccaccacctgcctccaccggctgccaagattgtggttgagaacctctccaggacagtcatcgctctcaaggctgagctcaagtgccccgtgtatcttttggaatctgaggaggagactgccattgagatgtcccaacacctttttcattccagttgcattctgccctggctaagcaagacaaattcctgtcccttgtgccgccatgagctgcccactgatgactacacttatgaggaacacagacgagataaggctcgaaaacagcagcagcagcagaaccgactggagaacctccatggagccatgtacacgtga

SEQ ID NO: 510 - DNA, 387 bp, Artificial
  cDNA Sequence
agcagcagggagctccaagccgcggagtatttggaaaagcatcagatcaaggaggtggttagctacctcaccagcgccctccttttctttcggccggaaaaaccaaaagaatatttaatatctctattggaacgactgagaattgcaaaagtaacaggcgtggcgtttcctttctttatggataactctaacattgtggctatgtttgagatgatggactcctcaggcagaggcaccatatcatttgtgcagtataaagaagccctaaaaaccctgggtctatgcactgaagatgaagatttacaagatgatggacataaaataactttggataaattcaaggaggaagtgaacaagaggatgaaggaaatatggtcagcattttaa

SEQ ID NO: 511 - DNA, 2890 bp, Artificial
  cDNA Sequence
gaaaccagtgagacatcgagaggaagtcgctgtggcactcagtcctacggcctccgaggctgggtagtgagtgtgtcgctggccttagccagactccacaggccacgctggctgcgaatggagccgaggactcgcgcggaggcgagatgctaccagccggcgagatcggcgcctctcctgcagccccgtgctgctctgaaagtggtgacgaaaggaagaacctcgaggagaaaagtgacataaatgttacagttcttattggaagtaaacaagtcagtgaaggtacagataatggtgatctcccttcttatgtgtctgcattcatagaaaaggaagttggaaatgaccttaaatctttaaagaaacttgataaactcatagaacagaggacagtaagtaaaatgcagttagaagaacaggtacttacaatttcatcagaaattcctaaaagaattcgaagtgccttaaaaaatgcagaagaatcaaagcaatttcttaatcagtttctggagcaggaaactcatctcttcagcgccattaacagccatttgctgactgcgcaaccttggatggacgatcttggaaccatgattagccagattgaagagatcgaacgtcatcttgcttaccttaaatggatttcacaaattgaagaactaagtgataacattcagcaatatctgatgaccaataatgtaccggaggcagcctccactctagtgtctatggcagaacttgacattaaacttcaggaatcatcttgtactcatcttcttggtttcatgagagccacagttaaattctggcataaaattctcaaggacaagcttacaagtgattttgaggaaattttagcacagcttcattggccattcatcgcaccccctcaatcacaaactgttggcttaagtcgacctgccagtgccccggagatatacagttacctggagacactgttttgtcagcttttgaaactacaaacctcagatgaattacttactgagccaaagcaactcccagaaaaatactctcttcctgcctccccttctgtcatcctgcccatccaggttatgctgactcctcttcagaagaggttcaggtatcacttcagagggaaccggcagactaatgtgttaagcaagccagaatggtacttggctcaagtacttatgtggattggaaaccatactgaatttctggatgagaagattcagccaatattagacaaagtaggctctttggtaaacgcaaggcttgaattttctcggggccttatgatgctggttcttgagaagttagccactgatattccttgtctgctatatgatgacaatctcttctgtcatttggtggatgaagtactcttgtttgaaagggagctacacagtgttcatggctatcctggcacttttgctagttgtatgcatattctatcagaggaaacctgttttcagagatggttgacggtggagagaaaatttgctcttcaaaaaatggactcaatgctttcctcagaagctgcctgggtatcgcaatataaggatatcactgacgtggatgaaatgaaagttccagattgtgcagaaacttttatgactctactcttggttataactgacaggtataaaaatcttcccacagcttcccgaaagcttcagttcctggagttacagaaggacttagtagatgattttaggatacgattaacacaagtgatgaaagaagagactagagcttcccttggctttcgatactgtgcaattcttaatgctgtgaactacatctcaacagtactagcagattgggctgacaatgttttctttctacaacttcaacaggctgcactggaggtgtttgcagagaataatactctgagtaaattgcagctaggacagctagcctctatggagagctctgtctttgatgacatgattaacctcttagaacgtttaaagcatgatatgttgacccgtcaagtagaccacgtttttagagaagttaaagatgctgcaaaattgtataaaaaagaaagatggttgtccttgccatctcagtcagagcaggcagtgatgtccctgtccagttcggcttgcccgttgctgctgacgttacgagaccatttacttcagttggagcagcagctttgtttctccttatttaaaattttctggcaaatgcttgtagagaagctggatgtatacatctaccaagaaataattcttgctaatcacttcaatgaaggaggagcagcccagctgcagtttgatatgactcggaatcttttccctttgttttctcactattgcaagagaccagaaaattattttaaacatataaaagaagcctgtattgttttgaatttgaacgtcggttctgcactactgctgaaagatgtactgcagtcagcttcagggcagcttcctgccacagcagcattaaatgaagttggaatttacaaactggctcaacaagatgttgagattctacttaatttgaggacaaattggcctaatactggaaaataatgtctttcagaaaaaggtttctttggtttttgtttctaagaaagaggaagccaattggatttcaagttatatgatgaaattctgaattaatgaaactggaaaactttatagaattacttattatcttggatttatggtgttattaaaatgctgaccatatttccttcatcctcttgttcctaaggaaacaaaaacagaaaacgaaacaatgaaaactcaattctatttacaagtataaatgctgagtatgtctgttgaagacgagcagagatattaaattataaccaactttcaatttcctgtgctaattaagggaaattctgttgtggataatcaaacatagccaataaatttttttaaaactc

SEQ ID NO: 512 - DNA, 897 bp, Artificial
  cDNA Sequence
gacaccaagcccggcactacgggcagctgcgcagggagcggtggtccgggcggcctcacatcggcggcgcctgccagcgtggacaagaaggtcatcgcagtgaaggttttgggaacagtaaaatggttcaatgtaaggaacggatatggtttcatcaacaggaatgacaccaaggaagatgtatttgtacaccagactgccataaagaataaccccaggaagtaccttcgcagtgtaggagatgaagagactgtggagtttgatgttgttgaaggagaagagggtgcggaggcagcaaatgttacagatcctggtggtgttcgagttcaaggcggtaaatatgcagcagatcgtaaccattatagacgctatccacgtcataggggtcctccacgcaattaccagcaaaattaccagaacagtgagagtggggaaaagaccgagggatcggagaatgctcccgaaggccaggcccaacaatgccggccctaccgcaggcaaaggttcccaccttactacatgcggagaccctatgggtgtcgaccacagtattccagccctcctgtgcagggagaagtgatggagggtgctgacaaccagggtgcaggagaacaaggtagaccagtgaggcagaatatgtatcggggatatagaccacgattccgcaggggccctccttgccaaagacagcctagagagtacggcaatgaagaagataatcaaggagatgagacccagggtcagcagccacctcaacgtcggtaccgcagcaacttcaattaccaacgcagatgcccagaaaaccctaaatcacaagatggcaaagagacaaaatcagccaatccaccagctgagaattcgtctgctcccgaggctgagcagggcggggctgagtaa

SEQ ID NO: 513 - DNA, 846 bp, Artificial
  cDNA Sequence
ccgggcggcctcacatcggcggcgcctgccagcgtggacaagaaggtcatcgcagtgaaggttttgggaacagtaaaatggttcaatgtaaggaacggatatggtttcatcaacaggaatgacaccaaggaagatgtatttgtacaccagactgccataaagaataaccccaggaagtaccttcgcagtgtaggagatgaagagactgtggagtttgatgttgttgaaggagaagagggtgcggaggcagcaaatgttacagatcctggtggtgttcgagttcaaggcggtaaatatgcagcagatcgtaaccattatagacgctatccacgtcataggggtcctccacgcaattaccagcaaaattaccagaacagtgagagtggggaaaagaccgagggatcggagaatgctcccgaaggccaggcccaacaatgccggccctaccgcaggcaaaggttcccaccttactacatgcggagaccctatgggtgtcgaccacagtattccagccctcctgtgcagggagaagtgatggagggtgctgacaaccagggtgcaggagaacaaggtagaccagtgaggcagtgtatcggggatatagaccacgattccgcaggggccctccttgccagacagcctagagagtacggcaatgaagaagataatcaaggagatgagacccagggtcagcagccacctcaacgtcggtaccgcagcaacttcaattaccaacgcagatgcccagaaaaccctaaatcacaagatggcaaagagacaaaatcagccaatccaccagctgagaattcgtctgctcccgaggctgagcagggcggggctgagtaa

SEQ ID NO: 514 - DNA, 888 bp, Artificial
  cDNA Sequence
cagcgtggacaagaaggtcatcgcagtgaaggttttgggaacagtaaaatgaatgtaaggaacggatatggtttcatcaacaggaatgacaccaaggaagatgtatttgtacaccagactgccataaagaataaccccaggaagtaccttcgcagtgtaggagatgaagagactgtggagtttgatgttgttgaaggagaagagggtgcggaggcagcaaatgttacagatcctggtggtgttcgagttcaaggcggtaaatatgcagcagatcgtaaccattatagacgctatccacgtcataggggtcctccacgcaattaccagcaaaattaccagaacagtgagagtggggaaaagaccgagggatcggagaatgctcccgaaggccaggcccaacaatgccggccctaccgcaggcaaaggttcccaccttactacatgcggagaccctatgggtgtcgaccacagtattccagccctcctgtgcagggagaagtgatggagggtgctgacaaccagggtgcaggagaacaaggtagaccagtgaggcagaatatgtatcggggatatagaccacgattccgcaggggccctccttgccaaagacagcctagagagtacggcaatgaagaagataatcaaggagatgagacccagggtcagcagccacctcaacgtcggtaccgcagcaacttcaattaccaacgcagatgcccagaaaaccctaaatcacaagatggcaaagagacaaaatcagccaatccaccagctgagaattcgtctgctcccgaggctgagcaggggctgagtaaatgccggcttaccatctctaccatcatccggtttagtcatccaacaagaagaaatatgaaattccagcaataa

SEQ ID NO: 515 - DNA, 6224 bp, Artificial
  cDNA Sequence
aggaaaggggtccccggactctggggctctcagcacctgcggtcgcaaaccaacctcatgccctgactttaccaggcgtcgggactctgacttaaccggggaatgagggacttggtctggcggcagatcacaatgaggacctagggcatctgtctgctgacgccccctggcctgcagtgaccatggccccccgcaagaggagccaccatggcctgggcttcctgtgctgcttcgggggcagtgacatccccgaaatcaacctccgggacaaccaccctctgcagttcatggagttctccagccccatcccgaacgcagaggagctcaacatccgctttgcagagctggtggatgaattggatctcactgacaaaaaccgagaggctatgtttgcactgccccctgagaagaaatggcagatctactgcagcaagaagaaggagcaggaggaccccaacaagctggcaaccagctggcctgactattacatcgaccgcatcaattccatggctgcgatgcagagtctgtacgcgtttgatgaggaggagacggagatgaggaaccaagtcgtggaagacctgaagacagccctccggacacagcctatgaggtttgtgacccgcttcattgagctggagggcttgacctgtctgctaaatttcctccggagcatggaccacgccacctgtgagagccgcatccacacctcactcattggctgcatcaaagcattgatgaacaactcccaggggcgggcacatgtgctggcacagcctgaggccattagtaccatagcccagagcctacgcacagagaacagcaagaccaaggtggctgtgctggagatcctgggtgctgtgtgcctcgtgcctggtggccacaagaaggtgctgcaggccatgctgcactaccaggtgtatgcagcagagcgaacccgcttccagaccctgctgaacgagctagaccgaagtctgggccggtaccgggatgaagtgaatctgaaaacagccatcatgtccttcatcaatgctgtcctcaatgctggagctggagaggataatctggagttccgcctacatctacggtatgaattcctgatgctgggtatacagcctgtgattgacaagctccggcaacatgaaaatgccatcctggacaaacatttagacttcttcgagatggtgcggaatgaggatgacctggagctagccaggaggtttgacatggtccacatcgacaccaagagtgcttcccagatgtttgagttgatccacaagaagctgaagtacacggaggcctacccctgcctgctctctgtgctgcaccactgcctgcagatgccctacaaacggaacggtggctacttccagcagtggcagctcctggaccgcatcctccagcagattgtcctccaggatgagcggggtgtggaccctgacctggctcccttggagaacttcaatgtcaagaacatcgtcaacatgctcatcaacgagaatgaagtgaaacagtggcgagaccaggcagagaagttccggaaagaacacatggagcttgtgagccgtctggagaggaaggagcgggaatgcgagacaaagacattggagaaggaagagatgatgcggacgctgaacaaaatgaaggacaagctggcccgggagtcccaggagctgcgccaggctcggggacaagtggcagagctggtagcccagctcagtgaactctcaacaggccctgtatcttccccaccaccccctgggggcccactcaccttgtcttcctcaatgacaaccaatgacctgcctccaccccctcctcctctgccctttgcctgttgtccccctcccccaccaccaccccttcctcccgggggacccccgactcccccaggtgccccaccttgcctcggcatgggcctgcccctccctcaggacccctaccccagcagtgacgtcccactcaggaaaaagcgtgtcccccagccttctcacccactgaagtccttcaactgggtgaagctgaatgaggagcgtgtccctggcaccgtatggaatgagattgatgacatgcaggtatttcggatcctggacctagaggattttgaaaagatgttttcagcctaccagaggcaccagaaagagctgggctccactgaagacatctacctggcttcccgcaaggtcaaagagctgtcggtcattgatggccggagggcccaaaactgcatcatccttctttccaagttgaagctttctaacgaggagatccggcaggccatcttgaagatggatgagcaggaggaccttgctaaggacatgctggagcagctcctcaagttcatcccagagaagagtgacattgacctcctggaggagcacaagcatgaaattgagcggatggcccgtgctgaccgcttcctctatgaaatgagcaggattgaccactaccagcagcgactgcaagccctcttcttcaagaagaaattccaggagcggctggctgaggcaaagcccaaagtggaagccatcctgttggcctcccgggagctggtccgcagcaagcgtcttagacagatgctagaggtcatcctagccataggcaacttcatgaacaaagggcagcgtgggggcgcctacgggttccgggtggccagcctcaacaagatcgctgacaccaagtccagcatcgacagaaacatctctctgctccattacctgatcatgatcctggagaagcattttcctgatattctaaacatgccttcagagctgcaacatcttccagaagctgccaaagtcaacctagcagaactggagaaggaggtgggcaacctcaggaggggcctgagagcggtggaggtggagctggagtatcagaggcgccaggtacgggagcccagtgacaagtttgtccctgtcatgagcgacttcatcacggtgtccagcttcagcttctccgagctggaggaccagctaaatgaggccagggacaagttcgccaaggccttgatgcacttcggggagcatgacagcaagatgcagccagacgaattctttggcatctttgataccttcttgcaggccttctcagaggcccggcaggatctagaggccatgaggaggaggaaggaggaggaggagcggcgggcgcgcatggaagccatgctgaaggagcagagggaacgtgagcggtggcagcggcagcggaaggtcctggctgcaggcagctcgctggaggagggaggagagttcgatgacctggtgtcggccctgcgctctggggaggtcttcgacaaggacttatgcaagctcaagcgcagccgcaagcgatcagggagccaggccctggaagttacccgggagcgggcaataaaccggctaaattattgacctggggaactagccacacaggaggccgggagacagggactggtgagaatggggctgagtggaggaggtggtgatatttaaaccatttggtgcttggtttagagccttgggctgggtcctgggatggggggctgtgtgtggctggaccaggtgtctccccacgcttaccttaaggggctcctcttatctccccttcacatgattccttctgtgccctggccccaggtattattctgaggctgccttggatggcctcaggccaggtaaccccaggctgaaggggccctgctccccatcccctaccatgggcacccatgtgctggcacagaacagttccagatctagactggagaggtccacagccttgtccagagttcctgtgtagcacggggagcaatgatggagggagcccctgagagggaatctggtgagggaatccagactcccttctctcaaggggaggctcaacagaacattgacctgggggcaaactttcctcttgaatgggaacagaggaggcattatatattctagttagatcagctctggtaggttccagagaacagtcaatgttggaaggatgatgcagggaccaaagccatcaggacagagtagcagtgtctgtttcccatgtcacaagtcctctggcctctccctgcatgtcttaagtatctttcccttccttctctaccctcacctccatcctgtctactaatccacagtcctagaagactcaccttgggtttccacagctatggctcactaccaggtgcttgatgaatctggcgaggggctcaagacagacctcatgcatcaccacacctcatgccttttgggcatctcccatgtccccatctcctggacacctggccattgttgtgaagccagacagtgacctcaaatgttgccttggagtcccctacagcccctcagcagagggcagcacttgaatgcttagctccatcccatagttctctacttcatataaattgctcaggccctcccaccccttctctaacactagcttcaaggcagaagccacagcagcctctgtccagcctgcaggtggccacttggaaccatgtgtccactggcgttggggagttggttcctgagaggtctgagggccagagctgccctctacattaacatgctgtctctaagggtggcccctcctctcaggcgttcagatggtgcgaacagcagagcaggcaagggaaactggggagatggggatggaggaggaaggctgatatcctctggggagcacatcacctgaaggtgccaaggaggaaggctgagaggggggccaccccatttctggtacccaatttggttcttcagcccaacttgcaaggggttccttctggtcctcccatccactgccaccttccattttgtccatctcatgctggccttggtggatgggatggctgtatctagacaaaatttttctaaaactccatcaaggctcttattcaataccacgttccgagttggcctttcatcttctttgagactggccctgcctaacctctaccatcaatgagctcttggcccttctgcccttccctgtgtttctcactttccaacctaatccctggctcagggttattgccagtggagactggtgagctgggcctactctcagctgcctatcttctgcctttcacttgcatccaactcctggggctgggaccgtagtagctgcgggggggaagaaacacagggtcggtgagcccagcatgtgcgttggtttgagggggcgggcggtgtgtgtgtgttctggtgggagggatctgagcaagtgcaagcctggctgacacaggtgtgaagaggccatcctggaacccaggtgagggcaagatgaaggcttccaggcagaacagctgcagagagtttggctatatgcatctgcagccccaagagctcccactgcaagacaagtgttggggaagatgggaggttgtgggtgaggcctctaaaggtcctctcccaaactgaccaggctgatgtcaacctaaccccctcaggggcagggaacaggggagggctccacaagcgtgtctggcattcccacccaccatggaagactggatacgcacctggaaacaaaaggactatggaagctgttcaagatacatttgatcttcagaaaagcagaatttggttcaactgttgacagaggacacaaatacgttgttccagagctcagccttctcactctaaaagaaagatatttttctatttattttctacatctggccagtggctctggtgctagatgccactgtagccagatctccaacagtgccttggaccatggactcatactcaactgagtaagaaggggctggtgcccagtcggggtggctgagctggtccttaataggttgtttcttggtcttgctttcttcatgccctccccactgctcctgccacctttagataagtttctctagctaattttgtggccaatgtaaaattcgtcatcaacctaacaaacacaaccttctcagcagcatttctcccctgtgatggaaataaagtgtttagggcagtgggaggagaaaattctccaggtgaatggggaagggtctgttccagcctctccctactcccatcccatttccaccaactggggaactgtgactatctatctcccccgacttctaccagggatgccttcacgccaaggctgttctcaccagctgcctcagatgacaaatgaggctaatggacataatctacagtgtcctttttcacttgcaccttttttataagaatatattgtaatactaaaaaatattaaattcataccatccctacccagtc

SEQ ID NO: 516 - DNA, 2691 bp, Artificial
  cDNA Sequence
gtgcgagcccggccgccggtgagtcggctggagcgcatctggtcctccgcgcggaaagcgctgcttttgcctggccgccctagccgctggctcatccaagtggccttcgccgctctcttgcgtcccaaccagagcgctggccacctcgccgcccagctcacgccgcgcccgcgctcccaggctccgggttttcttaaatgttttcttggagccttaaagatggagatgacagaaatgactggtgtgtcgctgaaacgtggggcactggttgtcgaagataatgacagtggagtcccagttgaagagacaaaaaaacagaagctgtcggaatgcagtctaaccaaaggtcaagatgggctacagaatgactttctgtccatcagtgaagacgtgcctcggcctcctgacactgtcagtactgggaaaggtggaaagaattctgaggctcagttggaagatgaggaagaagaggaggaagatggactttcagaggagtgcgaggaggaggaatcagagagttttgcagacatgatgaagcatggactcactgaggctgacgtaggcatcaccaagtttgtgagttctcatcaagggttctcgggaatcttaaaagaaagatactccgacttcgttgttcatgaaataggaaaagatggacggatcagccatttgaatgacttgtccattccagtggatgaggaggacccttcagaagacatatttacagttttgacagctgaagaaaagcagcgattggaagagctccagctgttcaaaaataaggaaaccagtgttgccattgaggttatcgaggacaccaaagagaaaagaaccatcatccatcaggctatcaaatctctgtttccaggattagagacaaaaacagaggatagggaggggaagaaatacattgtagcctaccacgcagctgggaaaaaggctttggcaaatccaagaaaacattcttggccaaaatctaggggaagttactgccacttcgtactatataaggaaaacaaagacaccatggatgctattaatgtactctccaaatacttaagagtcaagccaaatatattctcctacatgggaaccaaagataaaagggctataacagttcaagaaattgctgttctcaaaataactgcacaaagacttgcccacctgaataagtgcttgatgaactttaagctagggaatttcagctatcaaaaaaacccactgaaattgggagagcttcaaggaaaccacttcactgttgttctcagaaatataacaggaactgatgaccaagtacagcaagctatgaactctctcaaggagattggatttattaactactatggaatgcaaagatttggaaccacagctgtccctacgtatcaggttggaagagctatactacaaaattcctggacagaagtcatggatttaatattgaaaccccgctctggagctgaaaagggctacttggttaaatgcagagaagaatgggcaaagaccaaagacccaactgctgccctcagaaaactacctgtcaaaaggtgtgtggaagggcagctgcttcgaggactttcaaaatatggaatgaagaatatagtctctgcatttggcataatacccagaaataatcgcttaatgtatattcatagctaccaaagctatgtgtggaataacatggtaagcaagaggatagaagactatggactaaaacctgttccaggggacctcgttctcaaaggagccacagccacctatattgaggaagatgatgttaataattactctatccatgatgtggtaatgcccttgcctggtttcgatgttatctacccaaagcataaaattcaagaagcctacagggaaatgctcacagctgacaatcttgatattgacaacatgagacacaaaattcgagattattccttgtcaggggcctaccgaaagatcattattcgtcctcagaatgttagctgggaagtcgttgcatatgatgatcccaaaattccacttttcaacacagatgtggacaacctagaagggaagacaccaccagtttttgcttctgaaggcaaatacagggctctgaaaatggatttttctctacccccttctacttacgccaccatggccattcgagaagtgctaaaaatggataccagtatcaagaaccagacgcagctgaatacaacctggcttcgctgagcagtaccttgtccacagattagaaaacgtacaggcgcgcaccaccacgcctagctgatttttgtatttttttgtagagacgggggtttggccatgttgccgaggctaactcctgggattacaggcatgagctgtgctggccgggtttttttttcttgatgtaaacgtgtacagctgttttattagttaaggtctaatttttactctaggtgccttttatgttcagaactctttccactggactggtatttgctcaaaaataaataatggtagagaagaaaactataaaaatggacaaggctttcttctatcagtagcgtttaccctttgtcaccagtggctttggtatttccatgtctggcattgcataaacttctctggtgtgaaaggataaatatgcctttctaaagttgtatatcaaaattgtatcaatttttattttctatgatttctagaaacaaatgtaataaatatttttaaaatctc

SEQ ID NO: 517 - DNA, 813 bp, Artificial
  cDNA Sequence
gtgcgcctcccgtcgcccaagatgccgaaaggaaaggaggccaaggggaagaagttggctctggcccctgcttttgtgaagaagcaggaggccaagaaagtggtgaatcccctgtttgagaaaaggcctaagaattttggcattggacaggacatccagcccaaaagagacctcacctgctttgtgaaatggccccgctatatcaggttgcaatggcagagatccatactctataagcagctgaaagtgcctcctgcgattaaccagttcacccaggccctggaaggccaaacagctactcagctgcttaagctggcccacaaatacagaccagagacaaagcaagagaagaagcggaggctgttggcccaggcagagttgtgggcaaaggggacctccccaaagagaccacctgtctttcgagcaggagttaacaccatcaccacctttgtggataacaagaaagctctgctggtggtgactgcacacgacatggatcccattgagctgactgttttcctgcctgtcctgtgtcataaaatgggagccacttgctgcattatcaaggggaaggcaagactgggatgtctagttcacaggaagacctacaccactgtcgacttcacacaggttaactcagaagacaaaggagctttggctaagctgatggaagctatcgggaccaattacaatgccagatacgatgagacccactgtcactgggacggcaatgtcctgggtcccaagtctgtggctcacattgccaagctcgaaaaggcaaaggctaaagaacttgccactaaactgggttaa

SEQ ID NO: 518 - DNA, 2196 bp, Artificial
  cDNA Sequence
atggtgcagatgatgaggcagtttctgtaccgggtcctgcccgaggactcctacaaggtcaccacggggaagctccatgtgagcctcacccgcttaacggacggggagaatgtggtggtttcagagttcacgtccaaggaggagctcattgaggcagccctatactgcagctgcttcgtcccggtgtactgtggcctcatccccccgacttaccgcggtgtgaggtacatcgatgggggcttcacgggcatgcagccctgtgccttctggaccgacgccatcaccatctccaccttcagtgggcagcaggacatctgtccccgggactgcccggccatcttccacgacttccgcatgttcaactgctccttccagttctccctggagaacatcgccaggatgacccacgcattgttccccccggacctggtgatcctgcacgattactactaccgagggtacgaggatgcagttttgtacttgaggcggctgaatgctgtttatcttaattcttcctccaagagagtgattttcccccgggtggaagtgtactgccagatagaactcgcccttggcaatgagtgccctgaacgcagtcaaccaagccttcgagcacggcaggccagtctggaaggagccacacaacctcacaaggagtgggttcccaaaggggatggaaggggcagccatggtccgcctgtgtcccaacctgtgcagacacttgaattcacatgcgagtcacctgtttcagcaccagtctctccacttgagcagccacctgcacagccactggcctcttcaactccactttctctaagtggcatgccacctgtatcattcccagctgtgcacaagccacccagctccacacctggttcatcactgcccaccccaccacctggactgtcacctctgtcacctcagcagcaggtacaaccgtctggatcaccagccagatccctacactctcaggcacccacttcacccaggccatccctggggccttcaactgtgggggcacctcaaacactgccccgaagttctctttcagccttccctgctcagccacctgtggaggaactaggccaagaacagccccaagctgtagctcttcttgtctcttcaaaaccaaaaagcgccgtgcctctggttcatgtgaaggaaaccgtcagcaagccttatgtaacggagagccctgctgaagactcaaactgggtgaataaggtcttcaagaagaacaagcaaaagacaagtggcaccagaaaaggcttcccaagacattcgggatccaaaaaaccaagcagcaaagtgcagtgagcatgtctaatgttccttaaatcccacggagaggagcagctttgggaactgtgttcagagagattccgaggaatagaggagagtgtaagggagtagggggtgcagtgggagattgggctttggaacagacacatccgacataaaattcctgctctgccacagctccactcagggatcatggttgggacacttgctctccctgagcctccatttcctgtaaaatggggatgataccacttcataaagttgtgagagttaaatgtgatcgatgatgtaaattgcttcatagaatgcagaatgtgtaatagctcacaataagtaggtattatgtttacatattatgtttgtatttatgctacttaaatacaaaactggacaggccaggcatggtggctcatgcctgtaatcccagcactttgggaggctgaggtaggtggaaaacctgaggtcaggagttcaagaacagcctgaccaacatggtgaaactccatctctactaaaaatacaaaaattaaccaggcttgatggtgtgcacctgtaatctcagctactcgggaggctgaggcaagagaatcgcttgaacccaggaggcagaggttgcagtgcaccaagactgcgccattgcactccagcccgggcaacaagagcgaaaccccatctcgaaaaaaaacaaaacaaaactagacaagtgagtgcctacgtgacactcaaatgttgccagcatacagttaagggccctagtcaatgtaggcctgcttcttatagctttttgactatattatgctgtctttgacttagtcagtcaacacttattgagcacctactaagtgccaaacactctcctggactctggcaaaataaaaaatgaattaaaactct

SEQ ID NO: 519 - DNA, 1718 bp, Artificial
  cDNA Sequence
gtttcccggaaggatagcgattaccggagcgcctcgcgcgcctgcccgcctgcggaggacccgggcgcacacgccttggcgcttctcgaaagagatttcctcccacgcgaccttccagttctcggagccaggttaggggtttggcggaggaggactgcggggcgcgggcctagggccccagcagccacagccaggggagcgctcaagacagaaagccggtggcttcctcacctccacctgtaatgcaggagggagaattggctatttctcctataagccctgtggcagccatgcctcccctaggcacccacgtgcaagccagatgtgaagctcaaattaacctgctgggtgaaggggggatctgcaagctgccaggaagactccgcatccagcccgcactgtggagcagggaggacgtgctgcactggctgcgctgggcagagcaggagtactctctgccatgcaccgcggagcacgggttcgagatgaacggacgcgccctctgcatcctcaccaaggacgacttccggcaccgtgcgcccagctcaggtgacgtcctgtatgagctgctccagtacatcaagacccagcggcgagccctggtgtgtgggcccttttttggagggatcttcaggctgaagacgcccacccagcactctccagtccccccggaagaggtgactggcccctctcagatggacacccgaaggggccacctgctgcagccaccagacccagggcttaccagcaacttcggccacctggatgaccctggcctggcaaggtggacccctggcaaggaggagtccctcaacttatgtcactgtgcagagctcggctgcaggacccagggggtctgttccttccccgcgatgccgcaggcccccattgacggcaggatcgctgactgccgcctgctgtgggattacgtgtatcagctgctccttgatacccgatatgagccctacatcaagtgggaagacaaggacgccaagatcttccgagttgtggatccaaatgggctcgccagactctggggaaatcacaagaaccgggtgaacatgacctacgagaagatgtctcgtgccctgcgccactattataagcttaatatcattaagaaggaaccggggcagaaactcctgttcagatttctaaagactccgggaaagatggtccaggacaagcacagccacctggagccgctggagagccaggagcaggacagaatagagttcaaggacaagaggccagaaatctctccgtgaggggcaggtggactccaggcacccggtaccgatggggcagggaccgagtctcccatgaaggcagactcctcctcccagcagagcagcaggatccccagccagactctgtacccacaggattacagccattgcttgggaaggctgggaggcctcccatccaggacactgggggcaggagtgtcatcttttgggcagggcaatcctggggctaaatgaggtacaggggaatggactctcccctactgcacccctgggagaggaagccaggcaccgatagagcacccagccccacccctgtaaatggaatttaccagatgaagggaatgaagtccctcactgagcctcagatttcctcacctgtgaaatgggctgaggcaggaaatgggaaaaagtgttagtgcttccaggcggcactgacagcctcagtaacaataaaaacaatggtagctg

SEQ ID NO: 520 - DNA, 6017 bp, Artificial
  cDNA Sequence
attccccctcctcccccgggagcggcggcggcggccgggccggggccccagcgcgggccgggagggggcacggcggaggccacggaggcaggcgcgggagaagaccgcgctccgcttcccgggccgcgccgacctgctcggcggcctgcccgcccgcgcccaggggccccgaacggtggggccgggcaggcggctgagggcctgtcccctcagttcccaggtgccatgaggaagcctcgtcggaagtcccggcagaatgccgagggccggcgttccccgtccccctacagtctcaagtgctcacccacccgggagaccctgacatatgcccaggcccagcggattgtcgaggtagacattgatggacgcctgcatcgtatcagcatctatgacccactcaaaatcattactgaagatgagctaactgcccaggatatcaccgaatgcaatagtaacaaggaaaacagtgaacagcctcagttccctggcaagtccaagaaaccctcatccaagggcaaaaagaaggaatcctgctccaagcatgcatctggtacttccttccacctcccacagcccagcttccgtatggtggactcaggcatccagccagaagcacccccgctgcctgctgcctactaccgctacattgagaagccacctgaagacctggatgcagaggtagagtatgacatggatgaggaggaccttgcctggctggacatggtgaatgaaaaacggcgagtagatgggcacagtttggtgtctgcagatacctttgagctgctggtagaccggcttgagaaagagtcatacttggagagtcgcagcagtggggcccaacagtcactcatcgatgaagacgctttctgctgtgtgtgcctggatgatgaatgtcacaatagcaatgttattctcttctgtgacatctgcaacctggctgtacaccaggagtgctatggcgtcccatacatccctgagggccagtggctatgccgctgctgcctgcagtctccctcccggcctgtggattgcatcctttgccccaataagggtggcgccttcaaacagaccagtgatgggcactgggcccatgtggtgtgtgccatctggatccctgaagtctgctttgctaacaccgtgttcttggaacctattgagggcattgacaatatcccgcctgcccgctggaaactaacctgctatatctgcaagcagaaagggctaggtgcagccatccagtgccataaggtgaactgctacacagcattccatgtgacatgtgcacagcgggctgggctcttcatgaagattgagcccatgcgcgaaaccagcctcaatggcaccatctttacagtgcgcaagactgcctactgtgaggcccactcgccaccaggtgcggccactgctaggaggaagggcgactcccctagaagcatcagtgagactggcgatgaggaagggctgaaggagggtgatggagaggaggaagaagaggaagaggtggaggaagaagagcaggaagctcaaggcggggtgagtggctccctcaagggagtgcccaagaaaagcaagatgagtttgaagcagaagatcaagaaggagccagaggaagcaggccaagacacaccctccactctccccatgcttgctgtcccacagataccctcttacaggttgaacaagatctgtagtggtctctcctttcagaggaaaaaccagtttatgcagcggcttcacaattattggctgttgaagcggcaggcacggaatggtgtccctcttatccggcgcttgcactcccatctgcagtcccaaagaaacgctgagcagcgagagcaggatgagaagacaagtgcagtgaaggaggagctgaagtattggcagaagctccggcatgacttggagcgggcgcggctgctgattgagctgattcggaagagagagaagctcaaacgagagcaggtcaaagtccagcaggctgccatggagctggagctgatgccattcaatgttctgttgaggacaacactggacctgctgcaggagaaggatcctgcacacatcttcgcagaaccagtcaacttgagtgaggcaaattacctggaattcatatccaagccaatggatttttctactatgaggcggaagctggagtcccacctgtaccgcaccttggaggagtttgaggaggactttaaccttatagttaccaactgcatgaagtataatgctaaagacacaattttccaccgagcagctgtccgcctgcgggacctgggaggggccatcctacggcacgcccggcggcaggcagagaacatcggctatgaccccgagaggggcactcacctgcccgagtcacccaaattggaagacttttaccgcttctcctgggaagacgtggacaacatcctcatcccagagaaccgggcccatttgtccccagaggtgcagctgaaggagctgctggagaaactggacctggtgagcgccatgcggtccagtggggcccgcacccgtcgtgtccgcctgctacgccgggagatcaatgcccttcggcagaagctggcacagccaccaccaccacagccaccatcactcaacaagacagtatccaatggggagctgccagcagggccccagggggatgcagctgtgctggagcaggccttgcaggaggagccagaagacgatggggacagagatgactccaaactgcctcctccgccaaccctggagcccactgggcctgcaccttccttgtctgagcaagaatcccccccggagccccctactctgaaacccattaatgatagcaaacctccaagcaggttcctaaagcccagaaaggtggaagaagatgagctcttggaaaaatcaccactgcagctagggaatgagcctttgcaacgcttgctcagtgacaatggcatcaacagactatccctcatggcccctgacaccccggccggtaccccacttagtggtgtgggtcgccgcacatcagtcctcttcaagaaggccaagaatggggttaagctacagagaagcccagacagggtcctggagaatggcgaggaccatggtgtggcaggctctcctgcctctccagccagcatcgaggaagagcgccactcccggaagcggccaaggagcaggagctgtagtgagagcgaaggggagaggtccccccagcaggaggaagagacaggcatgaccaacggctttggaaaacacaccgaaagcgggtctgactctgaatgtagtttgggtctcagtggtggactggcatttgaagcttgcagtggtctgacgccccccaaacgcagccgtgggaagccagccctgtctcgagtgcccttcctggaaggtgtgaacggagactctgactacaatggctcaggcagaagcctcctgctgccctttgaagaccgcggagacctggagcccttggagctggtgtgggccaagtgccgaggctacccctcctaccctgccttgatcatcgatcccaagatgccccgggagggcctcctgcacaatggcgttcccatccctgtccccccgctggacgtgctgaagctgggagagcagaaacaggcagaggctggagagaagctcttccttgtcctcttctttgacaacaagcgcacctggcagtggcttccaagggacaaagtcctgcccttgggtgtggaagacaccgtggacaagctcaagatgctggaaggccgcaagaccagcatccgcaagtcagtgcaggtggcctatgaccgtgcgatgatccacctgagcagagtccgggggccccactccttcgtcacttccagctacctgtaagggcagggctgggcctgcatccgcttgccctgcctccatcccgcagggcacagagaagcctcttctgcccctgccagatgtatggccggcagcttccccctctcatggtaggccagggactgggctttctccccactaagggcaaggccccagttttgaccaatcgcatggttctcctggcaggcctgctgtgtgccaaaaactcccacccaaggtccctcaggggatatttcactgaagaaccagttagaagtagaaacagctgtggggcttgggcccagcttaggagattgcccagatggcaagaggtcctgggctccttcttgaggggctgcctggcccgctccatcctactcccactaactacacctcagggcgggtgaggttccgacactgatcccagagatgccgtggatacgccagggtcccagggggaatctccccaagctcacactctctcccgcttatcgcctattctcacacctcttctcggtcccatcttctgcacccattgcccagtcttgctttctctttcccatattccttttctttttctcttgtgccaaactgacagaaaccgtcaccacactggtctttttctttaatgtctcattccccttgaggccagctgctatgccaggtggtgtctctgccaggctcctcaggcccagacagaggccagcccacaacctatgaccccctcccccaggacaccacctcccacccacagaccttccctttagctgttgacacaacttcccagctctgcaagtgtgccccctggatcaaggcgggtcccctcttgtttttttctttgctgccacgaggtggtccaagccttcagggtgggctcctatcaggctgggtgtgcgagtgtccatctgtccacatggatgtcgagggtggtttgtgtggagctgtgctcgtcagctgggtctgccctcttcccccttttctccttcttctctcctcatggactttttctgcaattgcagtcttaagcttcactctccaccacctggatggcatggcgcctgccaccaaacatcttcctggcctgcgctctgccctgccctgcctagcctctgctactcccacttcccaactccagggaatgcattacttttatttcaaaccctctgcctccttccttctttctcttcaaccccctccccaccttcaccttctcaaaaatggaaggaaaaaaaaactgtgaatggggaatgctgactgacaaaccaacacaactttcagaggcttcagtgtctgttctctggacatttcttttcacctcctgagcaccaaagtcgcagggccagttgcaggccgctgattgccatgttgatttttaacctgatattctttttaattgttttaaatttttcataggggagttttggacaaaacagtcactggggagatcactgccatttttacacacttgactttttaaaaatacaaccaaccaaccaccacaacttcttatacatttgggacatgagccagagtttaaaagggaaccaacaaaacactataacttaaaaggatggggttttggattttgtataataataaaaacaatacagcatatggctagggaaggacatggtgtatataattgtaaaatactgttctaaattattcaggcctatagtttccattactggagtcctccattgtgtggccacacagtgtcgttgatttaaaggagccagtgcttcccctctccccaggtagttggtcagctgtggactctgtgacctttgtctaaacctgtgttgtaagatcttgggacttcctctctttctatgtctatctcttccccccaacactttctcttcttagtctctctctttatttttcaatctctgaatattttagtctctctctgagtctcattttttaaaatgctcttttagaacgggaaacggctcagatcctgctgtggcacggggcctatgtgtctctgtcgcgtctgctgtgaagcacatgatgctctatttattgtagagagtgactttatttgctttctagaattgtttataacagatggtataagagaggtaataaacagagaaaaatctatgcttgtaaagaatacaaaagttaattttacctactataatatgactgtctgaaacttattttctctctgagaaataaatgttctaatgggc

SEQ ID NO: 521 - DNA, 2740 bp, Artificial
  cDNA Sequence
ccgggagaccctgacatatgcccaggcccagcggattgtcgaggtagacattgatggacgcctgcatcgtatcagcatctatgacccactcaaaatcattactgaagatgagctaactgcccaggatatcaccgaatgcaatagtaacaaggaaaacagtgaacagcctcagttccctggcaagtccaagaaaccctcatccaagggcaaaaagaaggaatcctgctccaagcatgcatctggtacttccttccacctcccacagcccagcttccgtatggtggactcaggcatccagccagaagcacccccgctgcctgctgcctactaccgctacattgagaagccacctgaagacctggatgcagaggtagagtatgacatggatgaggaggaccttgcctggctggacatggtgaatgaaaaacggcgagtagatgggcacagtttggtgtctgcagatacctttgagctgctggtagaccggcttgagaaagagtcatacttggagagtcgcagcagtggggcccaacagtcactcatcgatgaagacgctttctgctgtgtgtgcctggatgatgaatgtcacaatagcaatgttattctcttctgtgacatctgcaacctggctgtacaccaggagtgctatggcgtcccatacatccctgagggccagtggctatgccgctgctgcctgcagtctccctcccggcctgtggattgcatcctttgccccaataagggtggcgccttcaaacagaccagtgatgggcactgggcccatgtggtgtgtgccatctggatccctgaagtctgctttgctaacaccgtgttcttggaacctattgagggcattgacaatatcccgcctgcccgctggaaactaacctgctatatctgcaagcagaaagggctaggtgcagccatccagtgccataaggtgaactgctacacagcattccatgtgacatgtgcacagcgggctgggctcttcatgaagattgagcccatgcgcgaaaccagcctcaatggcaccatctttacagtgcgcaagactgcctactgtgaggcccactcgccaccaggtgcggccactgctaggaggaagggcgactcccctagaagcatcagtgagactggcgatgaggaagggctgaaggagggtgatggagaggaggaagaagaggaagaggtggaggaagaagagcaggaagctcaaggcggggtgagtggctccctcaagggagtgcccaagaaaagcaagatgagtttgaagcagaagatcaagaaggagccagaggaagcaggccaagacacaccctccactctccccatgcttgctgtcccacagataccctcttacaggttgaacaagatctgtagtggtctctcctttcagaggaaaaaccagtttatgcagcggcttcacaattattggctgttgaagcggcaggcacggaatggtgtccctcttatccggcgcttgcactcccatctgcagtcccaaagaaacgctgagcagcgagagcaggatgagaagacaagtgcagtgaaggaggagctgaagtattggcagaagctccggcatgacttggagcgggcgcggctgctgattgagctgattcggaagagagagaagctcaaacgagagcaggtcaaagtccagcaggctgccatggagctggagctgatgccattcaatgttctgttgaggacaacactggacctgctgcaggagaaggatcctgcacacatcttcgcagaaccagtcaacttgagtgaggttttatatgtttaggttccagattacctggaattcatatccaagccaatggatttttctactatgaggcggaagctggagtcccacctgtaccgcaccttggaggagtttgaggaggactttaaccttatagttaccaactgcatgaagtataatgctaaagacacaattttccaccgagcagctgtccgcctgcgggacctgggaggggccatcctacggcacgcccggcggcaggcagagaacatcggctatgaccccgagaggggcactcacctgcccgagtcacccaaattggaagacttttaccgcttctcctgggaagacgtggacaacatcctcatcccagagaaccgggcccatttgtccccagaggtgcagctgaaggagctgctggagaaactggacctggtgagcgccatgcggtccagtggggcccgcacccgtcgtgtccgcctgctacgccgggagatcaatgcccttcggcagaagctggcacagccaccaccaccacagccaccatcactcaacaagacagtatccaatggggagctgccagcagggccccagggggatgcagctgtgctggagcaggccttgcaggaggagccagaagacgatggggacagagatgactccaaactgcctcctccgccaaccctggagcccactgggcctgcaccttccttgtctgagcaagaatcccccccggagccccctactctgaaacccattaatgatagcaaacctccaagcaggttcctaaagcccagaaaggtggaagaagatgagctcttggaaaaatcaccactgcagctagggaatgagcctttgcaacgcttgctcaggcagggctgggcctgcatccgcttgccctgcctccatcccgcagggcacagagaagcctcttctgcccctgccagatgtatggccggcagcttccccctctcatggtag

SEQ ID NO: 522 - DNA, 702 bp, Artificial
  cDNA Sequence
atggagcccaatgctacgttcaccacgcagctcacggccacacctgagcgactgctccgactcatctctgctggggtctgtggcctcatcctgctggtggggctgtcagctaatgggctcatgctgctggtggtgggccggggcccgggctccccccacccgctccactccctgacccacagcctcatgatgaacatcacgccatctgacctgctcttcctggcctgcgtggtgcctgtgctgctgctgagcttcctgcagcacaactggtggctgggccctgccatctgcaccattagccaggccaccaacacagccaccacgttctgcatcttctatagcatggtggccacagctctcctgcgccatgtggctgtggcccggcctgacctggccttcccagccggctggggcaccctcttgctgctctgtggggccatgtgggccctgggccttacagaatccctgcccaactggctgttccagagggtggcagtggaggaggagacagcgggggctcccaagacccaggcctgcctcttgctcctgagccctgctgggacctcctgctacatcagcctgctgggagccctggccttcctgccatgcacgctggggctgggctgctctttcagccacgtgggctggctcctgtggacccagccccaaggtcccatgggagagagcatccaggagcattaa

SEQ ID NO: 523 - DNA, 2033 bp, Artificial
  cDNA Sequence
gagagagttggttggtgttgggccggaggaaagcgggaagactcatcggagcgtgtggatttgagccgccgcattttttaaccctagatctcgaaatgcatcgtgattcctgtccattggactgtaaggtttatgtaggcaatcttggaaacaatggcaacaagacggaattggaacgggcttttggctactatggaccactccgaagtgtgtgggttgctagaaacccacccggctttgcttttgttgaatttgaagatccccgagatgcagctgatgcagtccgagagctagatggaagaacactatgtggctgccgtgtaagagtggaactgtcgaatggtgaaaaaagaagtagaaatcgtggcccacctccctcttggggtcgtcgccctcgagatgattatcgtaggaggagtcctccacctcgtcgcagatctccaagaaggagaagcttctctcgcagccggagcaggtccctttctagagataggagaagagagagatcgctgtctcgggagagaaatcacaagccgtcccgatccttctctaggtctcgtagtcgatctaggtcaaatgaaaggaaatagaagacagtttgcaagagaagtggtgtacaggaaattacttcatttgacaggagtatgtacagaaaattcaagttttgtttgagacttcataagcttggtgcatttttaagatgttttagctgttcaaatctgtttgtctcttgaaacagtgacacaaaggtgtaattctctatggtttgaaatggatcatacgaggcatgtaataccaagaattgttactttacaatgttcccttaagcaaaattgaatttgctttgaacttttagttatgcacagactgataataaacctctaaacctgcccagcggaagtgtgtttttttttaaatttaaatacagaaacaactggcaaaaattgaactaagatttacttttttttccatagctgggatataggctgcagctatagttgaacaagcagtctttaaaaactgctgtgaaacacaggccatcagggaaaacgaaatgctgcactattaaattagaggtttttgaaaaatccaactctcatcctgggcagaggttgcctagttggtatagaatgttaagtttcaagaaagtttacctttgctttaggtcataagttccttatttgattgctgtatatggatacatggctgttcgtgacattctttatgtgcaaatttgtgatttcaaaaatgtcctgccagtttaagggtacattgtagagccgaactttgagttactgtgcaagatttttttttcatgctgtcatttgtaatatgttttgtgagaatccttgggattaaagttttggttacaaattgttctttaacttgaaagcctgtttttccttgcaaactcaaatctgtgagcttggtaccaagtccaggtataacattcctattggaagccatacttatattttcttgtaaagtgcttttgaattaataaaatattagcataattgtgtatagtcagttgaacccactgttaccattgttcttatcccatgggaagcagttggttacacgattcttattttataagaaacagctgagaggcactatggattagtcttctgaagtgaaggaaatatagatgtcacctaagtgatagttaacccattttttttttttttaggcatagaagccagttcagggtccataatatttagtgaccaacattttaaagtatagcagcaacctggttcttaaacacaaagtaagttgcccattaacaaatggcttttatctttagcatgaaaactttccacaggtctaaaaattgcttccattttataatttgaggtgttgcatgggaattctaagctgatccatcatgatgtaaaagttcacaatatggttcaaatgtaacagtgcagaattgaatatggaggcatgcataaccttcctcttagaaaatggcaggtgttgtaatttcaaatttttgtgcaattagattaaatcataatgcaacagtc

SEQ ID NO: 524 - DNA, 2261 bp, Artificial
  cDNA Sequence
agctgaggtgtgagcagctgccgaagtcagttccttgtggagccggagctgggcgcggattcgccgaggcaccgaggcactcagaggaggtgagagagcggcggcagacaacaggggaccccgggccggcggcccagagccgagccaagcgtgcccgcgtgtgtccctgcgtgtccgcgaggatgcgtgttcgcgggtgtgtgctgcgttcacaggtgtttctgctgcaggcgccatgtcagaaccggctggggatgtccgtcagaacccatgcggcagcaaggcctgccgccgcctcttcggcccagtggacagcgagcagctgagccgcgactgtgatgcgctaatggcgggctgcatccaggaggcccgtgagcgatggaacttcgactttgtcaccgagacaccactggagggtgacttcgcctgggagcgtgtgcggggccttggcctgcccaagctctaccttcccacggggccccggcgaggccgggatgagttgggaggaggcaggcggcctggcacctcacctgctctgctgcaggggacagcagaggaagaccatgtggacctgtcactgtcttgtacccttgtgcctcgctcaggggagcaggctgaagggtccccaggtggacctggagactctcagggtcgaaaacggcggcagaccagcatgacagatttctaccactccaaacgccggctgatcttctccaagaggaagccctaatccgcccacaggaagcctgcagtcctggaagcgcgagggcctcaaaggcccgctctacatcttctgccttagtctcagtttgtgtgtcttaattattatttgtgttttaatttaaacacctcctcatgtacataccctggccgccccctgccccccagcctctggcattagaattatttaaacaaaaactaggcggttgaatgagaggttcctaagagtgctgggcatttttattttatgaaatactatttaaagcctcctcatcccgtgttctccttttcctctctcccggaggttgggtgggccggcttcatgccagctacttcctcctccccacttgtccgctgggtggtaccctctggaggggtgtggctccttcccatcgctgtcacaggcggttatgaaattcaccccctttcctggacactcagacctgaattctttttcatttgagaagtaaacagatggcactttgaaggggcctcaccgagtgggggcatcatcaaaaactttggagtcccctcacctcctctaaggttgggcagggtgaccctgaagtgagcacagcctagggctgagctggggacctggtaccctcctggctcttgatacccccctctgtcttgtgaaggcagggggaaggtggggtcctggagcagaccaccccgcctgccctcatggcccctctgacctgcactggggagcccgtctcagtgttgagccttttccctctttggctcccctgtaccttttgaggagccccagctaccctttttctccagctgggctctgcaattcccctctgctgctgtccctcccccttgtcctttcccttcagtaccctctcagctccaggtggctctgaggtgcctgtcccacccccacccccagctcaatggactggaaggggaagggacacacaagaagaagggcaccctagttctacctcaggcagctcaagcagcgaccgccccctcctctagctgtgggggtgagggtcccatgtggtggcacaggcccccttgagtggggttatctctgtgttaggggtatatgatgggggagtagatctttctaggagggagacactggcccctcaaatcgtccagcgaccttcctcatccaccccatccctccccagttcattgcactttgattagcagcggaacaaggagtcagacattttaagatggtggcagtagaggctatggacagggcatgccacgtgggctcatatggggctgggagtagttgtctttcctggcactaacgttgagcccctggaggcactgaagtgcttagtgtacttggagtattggggtctgaccccaaacaccttccagctcctgtaacatactggcctggactgttttctctcggctccccatgtgtcctggttcccgtttctccacctagactgtaaacctctcgagggcagggaccacaccctgtactgttctgtgtctttcacagctcctcccacaatgctgaatatacagcaggtgctcaataaatgattcttagtgacttt

SEQ ID NO: 525 - DNA, 4514 bp, Artificial
  cDNA Sequence
taacttttccgtctgcaacctttaataattgagagggtatgcgcaactcagaaaagtgcgcccgctgaggttgggtgcagagtggactggaggaaaggcgacacccatttacggtgcggccccggacggggtccccagacacggccttcccggcgtgccacgcgcggaggggactcttaacgtgaagcgctgggtgactcagccgcgtggccgcgcggtccggggcggggggcgcgcgccgctgcggcacagccggtcccggctgcggcttctggctgcgcggcctgcgcgcgcctcccgggcggattccagccccgagcgggacagcgcggcggggagcgacgagatttctctctgatcaaacggacagttcaggactcagaatctaaggatgaatgttcaccgtggcagtgacagtgacaggttattgcggcaggaggccagctgcttagtggatgatactttagctgtagcccaagaaaaagaagcaaacagcctggcttcatctggtcctcataatcttacttatcctctaggtcccaggaatgaaggtgctttactccatgaactgtctaatgacggtgctcataagcagtttgatcactacctcgaagagctcatcttgcccatcatggtgggctgtgccaagaaaggagaacgagagtgccacattgttgtgctgacggatgaggattctgtggactgggatgaagaccaccctccaccaatgggggaggaatattcccaaattctttatagctccaagctctacagattcttcaaatatattgagaatagggatgttgcaaaaacagtgttaaaggaacggggcctaaaaaacattcgcattggaattgaaggttaccctacctgtaaagaaaaaattaagagaaggcctggcggccggtctgaagtcatctataattatgtacaacgccccttcatccagatgtcatgggaaaaggaagaagggaagagtcgccatgtggatttccagtgtgttcgaagcaaatccctcacgaatctggtagctgctggagatgatgtcttggaggaccaggagatattaatgcatcacccaccccaagtggatgaacttgaccggctaaatgccccactttctcagatggcttctaacgactttcaggattagggccagctgtgggtctactccttgttggagcccatctcacctgggatgcctgcagccagccctccctcgtgatttgtctcaccttgagtaggagacatgcttctcccctaaccttttcctttctgccataattaacatatgtccttttcagtaagtccatgcctctggcaggggatgaagaagtactcactggtaattagctaccatctttgcagcagccctggtaacttgaaaaatttgggtctggtgctgttcattgagtctttgtgtaactgcaaaagcaggaaaggaagtcaagactcctgttgcctcgtgcttagcaaagcagtccttatcctttatactctgttcttgggttttgtttttgtcttgttttataccaggcaaattgcttagtagcaaagggaccaaactgaaaaggtgacaatctctaacttctaaaagcagacaccaatcggatgctcattagaggttaatgaagatgccattcttggtggcctctgcacccaaattgcatctggaaagaactagggtctcattcagaatgtccaaaaggaaattcttaagagcttaaattcagatttgtgtctcattaatgcagtgaacaattcaaaaccacacagattccttggcaggaaggataatggaataacagtgttgatgagacctttttagcttcaaggtttcggagtctaaacaaatggatgattcatttggaatgaaactcacaatgcaagtagaaggacctctccaaatcaggccagttgggttatcctggcttggaatctggtgtgaaaccataggtcttaacactctggagcagcacattgctgtggatatgtccaggagaccttagatatggcttaaaggctttcaagatgaggacagaaattgcttacaattgctcagtttctcaacagaaagactcataagagtgccagcatggggtacatggagtgaagctgggtgggaagcatcatctgcacagtccctgtcctagtgcaggacttttctctgtatgttttcataccatgggatttttggatatcagtgtattttggttcttgaaatagcctaatagctgctcacacattgggtaggaatattataccaatgtcatccccaaaggaagggtgagctgaatggaaattaagcccagtcattttatttgatctattagctctgttatcagtgcatgatcacccagatcaccctcctcagcccacacagtgctgaaccatcttccctcctgttctccatggctattaatagtatagctaaatttagagtgcagagccagatataagtattttggaattatctcccagtttgtggtagaagctgactggaatacaggttgagtatctcttatccaaaatgctagggaccagaaaggtttcagattttttcagattttggaatacttaacagttgagcaccccaaatctgaaaggcttctgaacgtcatgtcagcactcaaaaaagtggattttggagcacttcaaatttcggatttttggatttgggatgctcatcctgtgtaggagaggctactcgattccatttaatgactgtcctagtcataatcatccaaagataaaagccaggtagatgttgaaagctctttccagggctgaaaaagtgttcttacgttctctgcatgtgactagcatcactgtggaaattaatgctctgttcttcactagaatgtagtaagtggttaaactgagctatcccccacctgatgactattggcatccatttgcaaggccaatggcctggattaagggttaggattatttgtagctagaaggtaattttatttctgtgaaactaattggctcatatttgaggttaggtgtggccttgaccttaccagtacatttatacccactaccagttgactagcccagataattgttaaatggtgcttcttttctgcttctcagtagacttccatgccattacaaaggaaatttgaattacctagtgtttgtatattccatgataactatgtataacttctgttacacagcttatgtattgttaacatttaagtgtaaaccatgccacagctaacacttaaaaatgaaaactaattagttcttgcttagggaaaatgccaggtatgaagtatggcatatacttgacactgtcctgtgtaaccctttactttgctcaggctttcaagattgagtcttttttcccccaaattaggttaacatgcatttgaccccaacctgtggggtttgagtaagctggaaatctgtgacggtaggctttctagtgtcacgaggtggtggtgactgaaggaaaagctgggatcacaggttccttctgatggagaggaaggtttatttctatgcccctcccaccaccctccacctagagctcacccaagcctgctccagtcccaggggcaggccattctgcaaaagcaggacctcacagaaacaagggctgggttgaggtcacccccttcagagttggttcctggccagatgggtaagaggcatttgtaattttaaaaatgtgaaacttgggtttggtgttttcttctaagtgcctaaataagcaagccaggctgttgatattttagccagagaaatcggcaagccaagattaacccgaatctgaagtttagaatcttgagtttgcatctgcatcatatcatgctgttttgatgaggaaacatttgccactgaggagttggagggagggcaagacgacagtgttaagtcagatcatttaatggtttcccctaagccctggaaaaatatttgaaagaatggcagcaaaaaggttaagaaagcaagccagatttactgcacaatatgcagtacccagtactactttaaatcccaagagaacagtgtgatgtctaatatatacaggtctatgaaaatactgtggaataagcccaggaaggttagatgtgtttgcaaataagttgcccaaagggtccccctctaagtaaaacaaatattcagaccacaggctttaatgtaaactgtcaaaaagtgggatgtggaggatttttgttaagtgtcaatcgaagttaaaaagcaagggtttttggccaggcgtggtggctcacgcctgtaatcccagcactttgggaggccgaggccggcaaatcacctaaggtcaggagttcgagaccagcctggccaacatggtgaaaccccgtctctactaaaaatacaaaaaaattagcccggtgtggtggcaagtgcctgtagtcccagctacttgggaggctgaggcaggagaactgcttgaacccgggaggtagaggttgcagtgagccacgatcatgccactgcactccagcctgggcaacagagcaagactccatctc

SEQ ID NO: 526 - DNA, 3569 bp, Artificial
  cDNA Sequence
ctcggccccgggctgccgcgccagcccgtctccgcggcgggggaccgggctgccttggcccctcagcgctcgcgtcttttccggcagttggaacgcttcctgttgtcctcacccgtaaccgcctgttgccccctgtctcagagtccctcacgcgtcccctcccgtctttggctcgttggctgccgccgccggggcttcgccagccttcaagtcgagactactggccgaaggggcgtctgcggctctccgccgtccccagccctgcctctccctgggctctgcagccatggcaatgacaggctcaacaccttgctcatccatgagtaaccacacaaaggaaagggtgacaatgaccaaagtgacactggagaatttttatagcaaccttatcgctcaacatgaagaacgagaaatgagacaaaagaagttagaaaaggtgatggaagaagaaggcctaaaagatgaggagaaacgactccggagatcagcacatgctcggaaggaaacagagtttcttcgtttgaagagaacaagacttggattggaagattttgagtccttaaaagtaataggcagaggagcatttggtgaggtacggcttgttcagaagaaagatacgggacatgtgtatgcaatgaaaatactccgtaaagcagatatgcttgaaaaagagcaggttggccacattcgtgcggagcgtgacattctagtggaggcagacagtttgtgggttgtgaaaatgttctatagttttcaggataagctaaacctctacctaatcatggagttcctgcctggaggggacatgatgaccttgttgatgaaaaaagacactctgacagaagaggagactcagttttatatagcagaaacagtattagccatagactctattcaccaacttggattcatccacagagacatcaaaccagacaaccttcttttggacagcaagggccatgtgaaactttctgactttggtctttgcacaggactgaaaaaagcacataggacagaattttataggaatctgaaccacagcctccccagtgatttcactttccagaacatgaattccaaaaggaaagcagaaacctggaaaagaaatagacgtcagctagccttctccacagtaggcactcctgactacattgctcctgaggtgttcatgcagaccgggtacaacaagctctgtgattggtggtcgcttggggtgatcatgtatgagatgctcatcggctacccacctttctgttctgagacccctcaagagacatataagaaggtgatgaactggaaagaaactttgacttttcctccagaagttcccatctctgagaaagccaaggatctaattttgaggttctgctgtgaatgggaacatagaattggagctcctggagttgaggaaataaaaagtaactctttttttgaaggcgttgactgggaacatatcagagagagacctgctgcaatatctattgaaatcaaaagcattgatgatacctcaaacttcgatgagtttccagaatctgatattcttaagccaacagtggccacaagtaatcatcctgagactgactacaagaacaaagactgggtcttcatcaattacacgtacaagcgctttgagggcctgactgcaaggggggcaataccttcctacatgaaagcagcaaaatagtactcttgccacggaatcctatgtggagcagagttctttgtataacatcatgcttttcctctcacactcttgaagagcttccaagaagttgatggaacccaccaatatgtcatagtaaagtctcctgaaatgtggtagtaagaggattttcttccataatgcatctgaaaaactgtaaacaaagacaaccatttctactacgtcggccataaacagctatcctgctttggaagagaagcatcatgagccaatttgataggtgttttaaaaataacttgagttttcctaagttcatcagaatgaaggggaaaaacagccatcatccaacattattgagattgtcgtgtatagtcatcgaatatcagccagttcctgtaattttgtgacacgctctctgccaagcccaccaagtatttcctttatagctaaaagttccatagtactaaggaaataaagcaataaagacagtctcagcagccaggattctggctgaaggaaatgatccgccaccctgagggtggtgatggtagtttctacccatacctcagcctcaggcgagtggcttatagcctccattcatggtgcactttatttatggtactaagataaagactgtcaatccattgatttatctcctcctgtcccccatctaaaatacccatgctgcttttctgagtgttgatgggggttaccagcttgatccactgttgctcttagaaggcccagaaagtctttgggcattgccaagaaatcccggattatgtggaaaaccctcactttctcttcacggctgtaccagaaaatccctaagacagatcttgccgtggactagcaatacctgcaagtgctgccaatgggaactcaatttattcctgggaacctaacgaggagagcccaggcctaggcaggaggcctggaaccctcttggctaaggtgctgttcctgttcctgcaaggtctccagaacccctttggaaatggtgaaggaaccagcccaatagaagtacagagccagctgacaagtccttgtaaagctcactcctcagtccttggcacagccatgttttgtcttctctcttggtatttcttctctcccaactttagccattttgccttggaatcatgattacaattttttcctttgcagatgccttcctgggggatactcctccccaccctaaagggtcgcctgcaacttaggcggattgggtctctctgctgtggcgttctctcttgagagaccctctgaattttagcacaaagtgccttctgtttcacagctgccaccacctttagaggaatttcgtcagaaaaatgtggaggctccatattaatgcattattttttaaaaagttttgataactcttaaagcatcatttgcacctatgtgggaactttgcctgttgcaaagtattgtggccgagctgcagctgggagcctgctttctgccagtcttgaggttctgaagatcagctttgaaaggaaagtatgtcctagcttagccattcagaagagaaaaatggaatatcagagttacagttgtcagtgaaactactttggattttaacctcttagaggaagaaaaaaggttagggaagtgtcaactctggatgaaggtgatgtgtttgcctctcagtctttcattcatagcctgctagtgaaaaggaagtaaatgagattcttttgtgtgactttgtagtctctttgtattaccaaatagttggggtgttgactcctgtgtgttttgcaagaatgtgtggtaagcctgggtaaagagaaggaactgcggtgttgggagagtctttgtgttggggagtggcaggggatgatttgtttcaggggaaaatgcccacattttaacttttaaacttctgaataaactgtgt

SEQ ID NO: 527 - DNA, 3897 bp, Artificial
  cDNA Sequence
gggcagatttgattttcccgcagcccgggcgccccggagccgaagcccgagccgaggaggtggcgctcgcagccgcgtctcagccccgtcgccgccggcgccaagacccagggagaggcggcgcagcccgggcgctcgggctccgcgctgccggcgccccgccacccccgccgccagcgccccatccggcgcctcccgctcctcacgcccctctccctgtcttctgcatcccctctacctctgcccacagacgcgcgtccctctcctggtgcccctctccacgactccgcgtttccctcccggtgccctctccccgagcccctctccccgcgcccctctctgccttccccgctgtgcccccgctccctgggctccttgcccttccccactgggcccctagcctcctcgcggcgtcacccgagccccctcctcgatccgcggcccccgctccctccgccctcttccctctctcacttcccacgccccctcttcgcgctcctctctcctccccttgccgcccagcccaggctctggagttgggggagagcccagggctccagtcgctccggaggaggcgtgaatcgcgcagggattgactaatttggggtggggggtgcggtgggcgatggagcagcctgaggacatggcgtcgctgagcgagttcgactccttggcgggcagcatcccggccaccaaggtggagatcaccgtgtcctgcaggaacctcctggacaaagacatgttttccaagtccgacccactgtgcgtcatgtatacccaagggatggagaacaagcagtggcgggagtttgggcgcaccgaagtcatcgacaacacgctcaatcctgacttcgtgcgcaagttcattgtggattactttttcgaggagaagcagaacctccgttttgatctatacgacgttgactctaagagtcctgatttatccaaacacgatttcctgggccaggccttctgcacccttggagagattgtggggtcccctgggagccgcctggaaaagcccctcacgataggcgcattcagcctgaattccaggacgggcaaacccatgccagctgtgtccaacggtggtgtcccaggaaagaaatgtggcaccatcatcctgtccgctgaggagctcagcaactgtagggatgtcgccaccatgcagttctgtgccaacaagctggacaagaaagatttctttgggaaatctgaccccttcttggtattctacagaagcaacgaggatggaacgttcaccatttgccacaagaccgaggtcatgaagaacaccctaaatccagtctggcaaactttctccattcccgtgagagccctctgcaacggcgactacgatcggaccatcaaggtggaggtgtacgactgggatcgggacggcagccatgacttcattggggagttcaccaccagttaccgggagctggcccgtgggcagagccaattcaacatctatgaggtggtaaacccgaaaaagaaaatgaagaaaaagaaatacgtgaattctggcacagtcaccctgctttcctttgctgtggagtcagagtgcaccttccttgactacatcaaaggagggacccagatcaacttcactgtggccattgatttcactgcctccaatgggaacccctcacagtccacatccctgcactacatgagcccctaccagctgaacgcctacgcgctggcgctgactgccgtcggagagatcatccagcactacgacagtgacaagatgttccctgccctgggcttcggggccaagctgcccccggatggcagagtgtcccacgagttcccactgaatggcaaccaggagaacccctcatgctgtggcatcgacggcatcctggaggcctaccaccgcagcctgcgcactgtgcagctgtacggccccaccaactttgcccccgtggtcacccacgtggccaggaatgcagcggccgtgcaggatggctcccagtactcggtgctgctcatcattactgatggggtcatctcggacatggcgcagaccaaggaggccattgtcaacgctgccaagctccccatgtccatcattatcgtcggcgtgggccaggcagagttcgacgccatggtggagctggatggcgacgacgtgcggatctcctcccgggggaagctggctgaacgcgacatcgtccagtttgtacccttccgggactacgtggaccgcacaggcaaccacgtgctgagcatggcccgcctggcccgagacgtgctggcagagatccctgaccaactggtgtcctacatgaaggcacagggcattcgcccgcgtcccccacccgcagcaccaacccactcgccctcgcagtccccagcccgcacgccccctgcgtcccccctgcacacgcacatctgaacctggtctcagcaggcaggtggctggggcctgggagaggccaggtgaatgggaggccagggccccagactccccgaagttggcctgcccggcctttgggacatctgtgtgcctgggaggctgccagggggtggggcttctgaagacccctcctcaatttcttggcctcacttattgcccaaacccagggagttaggggggtacgggtgaaagaggggtacacagggacccagcccttctcttcttccccaatacctggctctaacccagccaggaaggtgtaaacaataagggtgattggggtccctgtcgcccacccccggcaatcctatttgcttacctgtcaccctgaagcctgggcttggcctcctccagccccccatctccgtcccatcctcccatggtgtctactcctgtccctgagccccgccctgtggtctatcctgtgcccgatttccagtgaaccccatgaagctgatgggtttgcaggaaggcctgaacatgtgcaccctcccagggacactggatgcgctgggagccccggggaccccatggggtgctgtaatcatggaccgtaggccatgtgatgggcctgaagtggaggctgctcagcacagagccctttctggtgcctctcgaactcagtacgatgcaagttctagacacacagatggcctgtggaggcctctccctggtgtgggcccacaggtacttccatggttgactcctggcttcaggaatcccttcctccctccagaggcttcccagggccctcggtgcccacgcctctgcccatctggaggcctgagtaaggagtggctcagccccacgttcccacactgctcctgctctttgccctgtatcccatgaggctaggagacaggagtcctgggtttgagccctgcctccccccactgcctaatgtgggaacccaagcaaggcccttctaccttttgggcctcagtttccatgtctgtaccacaagagggttgaccagatggccccaggttttcctttaggtctgacatcctgagggtcattcatcccatgcccagttccccccatcctactcctaacagatgtgaccctacttgaggccgccttggcttttgggtcaccctgtctcatcccatcaccccaaacataccctagtccttcagcctggggctctggcatctgagcccgagctcctgcccctgctgtgggaaaggtggggaagaaggggatctccctcccgggcccacccagctgcccagcctttgcccactcggggagcagatcatgcatgccaatccctgttgccgcatggagctcctcagcccactgacctctccgtgcctggtgcaggccaggcccccgtcttccgcctgcctctgcttccccgtcatgcatggtggtggtgtttctacggtgtctggttctgtgcccgtctctgagacagtctctgtgtggaatttgccttaaactgaagtaaatttggttcttttagt

SEQ ID NO: 528 - DNA, 1703 bp, Artificial
  cDNA Sequence
aagtttgcattttcctctgttcttgagcccagcttcttctcgtctcccaccccagcttcccggcattggaagaagggaccgtcctcttccttgtcttggccacccaaatcctggtatcgaaagggttgaacggaccggaagtgtgcagcagcgacgggtccccagctaatcgacgccggaagtagcaattactagacaagcattccgccgccggcttcgctatggcggcaattcccccagattcctggcagccacccaacgtttacttggagaccagcatgggaatcattgtgctggagctgtactggaagcatgctccaaagacctgtaagaactttgctgagttggctcgtcgaggttactacaatggcacaaaattccacagaattatcaaagacttcatgatccaaggaggtgacccaacagggacaggtcgaggtggtgcatctatctatggcaaacagtttgaagatgaacttcatccagacttgaaattcacgggggctggaattctcgcaatggccaatgcggggccagataccaatggcagccagttctttgtgaccctcgcccccacccagtggcttgacggcaaacacaccatttttggccgagtgtgtcagggcataggaatggtgaatcgcgtgggaatggtagaaacaaactcccaggaccgccctgtggacgacgtgaagatcattaaggcatacccttctgggtagacttgctaccctcttgagcagctcttctgagatggccccagtgaaccagcttctagatgacatagaatgacatgtaatgctaaattcattttggctttgcaagtcatgaagcttaggaggcctggcatcttgggtgagttagagatggaagtacattttaataggatgcttcttttctcttcccccagtgcctaggttgccagagcatttgcacaaatgcccctgtttatcaataggtgactacttactacacatgaaccataatgctgcttcttgtgcatgtctgctctgatatacgtcgaacaatgtagcagccactgtcatttctcagtggttttgcctaaccaaacttcttcctaaggagatttatattctggcctacacagcagtccttgatggctgacagccacagaattccaaaccaagtagtgtctgtcagccctcttaactctgtgcacgccctatttcagtcttttacatttgttcttctagggaatgtatgcatctctatatatattttccctctcaaaaccagaacatcaacagtgctgtttctgacacttcagacatcccacgcaaagccacattgaatttttgccaaatgaaaaacacatccaacaatcaagtttctaagaaggtgtcaagtggggaataataataatgtataataatcaagaaattagtttattaaaaggaagcagaagcattgaccattttttcccagagaagaggagaaatctgtagtgagcaaaggacagaccatgaatcctccttgagaagtagtactctcagaaaggagaagcgccactcaagttcttttaacccaagactttagagaaattaggtccaagatttttatatgttcagttgtttatgtataaaaataactttctggattttgtggggaggagcaggagaggaaggaagttaatacctatgtaatacatagaaacttccacaataaaatgccattgatggttg

SEQ ID NO: 529 - DNA, 489 bp, Artificial
  cDNA Sequence
gattacctcttccatgtcatctttctgggagactccaacgtgggcaaaacatccttcctgcacctgctgcaccagaattctttcgccaccggattgacagctaccgtgggagtagattttcgggtcaaaaccttgctggtggacaacaagtgctttgtgctgcagctctgggacacagctggccaagagaggtaccacagtatgacgcgacagctgctccgcaaggctgacggggtggtgctcatgtacgacatcacctcccaggagagctttgcccacgtgcgctactggctagactgtctccaggatgcagggtcggatggggtggtcatccttctcctgggaaacaagatggactgtgaggaggaacggcaagtgtccgtggaagctgggcagcaactggcccaggaactgggggtctattttggggagtgcagtgccgccttgggtcacaacatcctggagcctgtagtaaacctggccaggtaa

SEQ ID NO: 530 - DNA, 1888 bp, Artificial
  cDNA Sequence
gcggcgcggggcgggcgcagcgggggtcggggcgctgggagcccgttgggccgcgaacgcagccgccacgctggggccgccgagatcgggtgcccgggatgagcctcatccggaaaaagggcttctacaagcaggacgtcaacaagacagcctgggagctgcccaagacctacgtgtccccgacgcacgtcggcagcggggcctatggctccgtgtgctcggccatcgacaagcggtcaggggagaaggtggccatcaagaagctgagccgaccctttcagtccgagatcttcgccaagcgcgcctaccgggagctgctgctgctgaagcacatgcagcatgagaacgtcattgggctcctggatgtcttcaccccagcctcctccctgcgcaacttctatgacttctacctggtgatgcccttcatgcagacggatctgcagaagatcatggggatggagttcagtgaggagaagatccagtacctggtgtatcagatgctcaaaggccttaagtacatccactctgctggggtcgtgcacagggacctgaagccaggcaacctggctgtgaatgaggactgtgaactgaagattctggattttgggctggcgcgacatgcagacgccgagatgactggctacgtggtgacccgctggtaccgagcccccgaggtgatcctcagctggatgcactacaaccagacagtggacatctggtctgtgggctgtatcatggcagagatgctgacagggaaaactctgttcaaggggaaagattacctggaccagctgacccagatcctgaaagtgaccggggtgcctggcacggagtttgtgcagaagctgaacgacaaagcggccaaatcctacatccagtccctgccacagacccccaggaaggatttcactcagctgttcccacgggccagcccccaggctgcggacctgctggagaagatgctggagctagacgtggacaagcgcctgacggccgcgcaggccctcacccatcccttctttgaacccttccgggaccctgaggaagagacggaggcccagcagccgtttgatgattccttagaacacgagaaactcacagtggatgaatggaagcagcacatctacaaggagattgtgaacttcagccccattgcccggaaggactcacggcgccggagtggcatgaagctgtagggactcatcttgcatggcaccgccggccagacactgcccaaggaccagtatttgtcactaccaaactcagcccttcttggaatacagcctttcaagcagaggacagaagggtccttctccttatgtgggaaatgggcctagtagatgcagaattcaaagatgtcggttgggagaaactagctctgatcctaacaggccacgttaaactgcccatctggagaatcgcctgcaggtggggccctttccttcccgccagagtggggctgagtgggcgctgagccaggccgggggcctatggcagtgatgctgtgttggtttcctagggatgctctaacgaattaccacaaacctggtggattgaaacagcagaacttgattcccttacagttctggaggctggaaatctgggatggaggtgttggcagggctgtggtccctttgaaggctctggggaagaatccttccttggctctttttagcttgtggcggcagtgggcagtccgtggcattccccagcttattgctgcatcactccagtctctgtctcttctgttctctcctcttttaacaacagtcattggatttagggcccaccctaatcctgtgtgatcttatcttgatccttattaattaaacctgcaaatactctagttccaaataaagtcacattctcaggttccaggtggacatga

SEQ ID NO: 531 - DNA, 3756 bp, Artificial
  cDNA Sequence
ggaaccgcgaccactggagccttagcgggcgcagcagctggaacgggagtactgcgacgcagcccggagtcggccttgtaggggcgaaggtgcagggagatcgcggcgggcgcagtcttgagcgccggagcgcgtccctgcccttagcggggcttgccccagtcgcaggggcacatccagccgctgcggctgacagcagccgcgcgcgcgggagtctgcggggtcgcggcagccgcacctgcgcgggcgaccagcgcaaggtccccgcccggctgggcgggcagcaagggccggggagagggtgcgggtgcaggcgggggccccacagggccaccttcttgcccggcggctgccgctggaaaatgtctcaggagaggcccacgttctaccggcaggagctgaacaagacaatctgggaggtgcccgagcgttaccagaacctgtctccagtgggctctggcgcctatggctctgtgtgtgctgcttttgacacaaaaacggggttacgtgtggcagtgaagaagctctccagaccatttcagtccatcattcatgcgaaaagaacctacagagaactgcggttacttaaacatatgaaacatgaaaatgtgattggtctgttggacgtttttacacctgcaaggtctctggaggaattcaatgatgtgtatctggtgacccatctcatgggggcagatctgaacaacattgtgaaatgtcagaagcttacagatgaccatgttcagttccttatctaccaaattctccgaggtctaaagtatatacattcagctgacataattcacagggacctaaaacctagtaatctagctgtgaatgaagactgtgagctgaagattctggattttggactggctcggcacacagatgatgaaatgacaggctacgtggccactaggtggtacagggctcctgagatcatgctgaactggatgcattacaaccagacagttgatatttggtcagtgggatgcataatggccgagctgttgactggaagaacattgtttcctggtacagaccatattaaccagcttcagcagattatgcgtctgacaggaacaccccccgcttatctcattaacaggatgccaagccatgaggcaagaaactatattcagtctttgactcagatgccgaagatgaactttgcgaatgtatttattggtgccaatcccctggctgtcgacttgctggagaagatgcttgtattggactcagataagagaattacagcggcccaagcccttgcacatgcctactttgctcagtaccacgatcctgatgatgaaccagtggccgatccttatgatcagtcctttgaaagcagggacctccttatagatgagtggaaaagcctgacctatgatgaagtcatcagctttgtgccaccaccccttgaccaagaagagatggagtcctgagcacctggtttctgttctgttgatcccacttcactgtgaggggaaggccttttcacgggaactctccaaatattattcaagtgcctcttgttgcagagatttcctccatggtggaagggggtgtgcgtgcgtgtgcgtgcgtgttagtgtgtgtgcatgtgtgtgtctgtctttgtgggagggtaagacaatatgaacaaactatgatcacagtgactttacaggaggttgtggatgctccagggcagcctccaccttgctcttctttctgagagttggctcaggcagacaagagctgctgtccttttaggaatatgttcaatgcaaagtaaaaaaatatgaattgtccccaatcccggtcatgcttttgccactttggcttctcctgtgaccccaccttgacggtggggcgtagacttgacaacatcccacagtggcacggagagaaggcccataccttctggttgcttcagacctgacaccgtccctcagtgatacgtacagccaaaaaggaccaactggcttctgtgcactagcctgtgattaacttgcttagtatggttctcagatcttgacagtatatttgaaactgtaaatatgtttgtgccttaaaaggagagaagaaagtgtagatagttaaaagactgcagctgctgaagttctgagccgggcaagtcgagagggctgttggacagctgcttgtgggcccggagtaatcaggcagccttcataggcggtcatgtgtgcatgtgagcacatgcgtatatgtgcgtctctctttctccctcacccccaggtgttgccatttctctgcttacccttcacctttggtgcagaggtttcttgaatatctgccccagtagtcagaagcaggttcttgatgtcatgtacttcctgtgtactctttatttctagcagagtgaggatgtgttttgcacgtcttgctatttgagcatgcacagctgcttgtcctgctctcttcaggaggccctggtgtcaggcaggtttgccagtgaagacttcttgggtagtttagatcccatgtcacctcagctgatattatggcaagtgatatcacctctcttcagcccctagtgctattctgtgttgaacacaattgatacttcaggtgcttttgatgtgaaaatcatgaaaagaggaacaggtggatgtatagcatttttattcatgccatctgttttcaaccaactatttttgaggaattatcatgggaaaagaccagggcttttcccaggaatatcccaaacttcggaaacaagttattctcttcactcccaataactaatgctaagaaatgctgaaaatcaaagtaaaaaattaaagcccataaggccagaaactccttttgctgtctttctctaaatatgattactttaaaataaaaaagtaacaaggtgtcttttccactcctatggaaaagggtcttcttggcagcttaacattgacttcttggtttggggagaaataaattttgtttcagaattttgtatattgtaggaatcctttgagaatgtgattccttttgatggggagaaagggcaaattattttaatattttgtattttcaactttataaagataaaatatcctcaggggtggagaagtgtcgttttcataacttgctgaatttcaggcattttgttctacatgaggactcatatatttaagccttttgtgtaataagaaagtataaagtcacttccagtgttggctgtgtgacagaatcttgtatttgggccaaggtgtttccatttctcaatcagtgcagtgatacatgtactccagagggacagggtggaccccctgagtcaactggagcaagaaggaaggaggcagactgatggcgattccctctcacccgggactctccccctttcaaggaaagtgaacctttaaagtaaaggcctcatctcctttattgcagttcaaatcctcaccatccacagcaagatgaattttatcagccatgtttggttgtaaatgctcgtgtgatttcctacagaaatactgctctgaatattttgtaataaaggtctttgcacatgtgaccacatacgtgttaggaggctgcatgctctggaagcctggactctaagctggagctcttggaagagctcttcggtttctgagcataatgctcccatctcctgatttctctgaacagaaaacaaaagagagaatgagggaaattgctattttatttgtattcatgaacttggctgtaatcagttatgccgtataggatgtcagacaataccactggttaaaataaagcctatttttcaaattt

SEQ ID NO: 532 - DNA, 3756 bp, Artificial
  cDNA Sequence
ggaaccgcgaccactggagccttagcgggcgcagcagctggaacgggagtactgcgacgcagcccggagtcggccttgtaggggcgaaggtgcagggagatcgcggcgggcgcagtcttgagcgccggagcgcgtccctgcccttagcggggcttgccccagtcgcaggggcacatccagccgctgcggctgacagcagccgcgcgcgcgggagtctgcggggtcgcggcagccgcacctgcgcgggcgaccagcgcaaggtccccgcccggctgggcgggcagcaagggccggggagagggtgcgggtgcaggcgggggccccacagggccaccttcttgcccggcggctgccgctggaaaatgtctcaggagaggcccacgttctaccggcaggagctgaacaagacaatctgggaggtgcccgagcgttaccagaacctgtctccagtgggctctggcgcctatggctctgtgtgtgctgcttttgacacaaaaacggggttacgtgtggcagtgaagaagctctccagaccatttcagtccatcattcatgcgaaaagaacctacagagaactgcggttacttaaacatatgaaacatgaaaatgtgattggtctgttggacgtttttacacctgcaaggtctctggaggaattcaatgatgtgtatctggtgacccatctcatgggggcagatctgaacaacattgtgaaatgtcagaagcttacagatgaccatgttcagttccttatctaccaaattctccgaggtctaaagtatatacattcagctgacataattcacagggacctaaaacctagtaatctagctgtgaatgaagactgtgagctgaagattctggattttggactggctcggcacacagatgatgaaatgacaggctacgtggccactaggtggtacagggctcctgagatcatgctgaactggatgcattacaaccagacagttgatatttggtcagtgggatgcataatggccgagctgttgactggaagaacattgtttcctggtacagaccatattgatcagttgaagctcattttaagactcgttggaaccccaggggctgagcttttgaagaaaatctcctcagagtctgcaagaaactatattcagtctttgactcagatgccgaagatgaactttgcgaatgtatttattggtgccaatcccctggctgtcgacttgctggagaagatgcttgtattggactcagataagagaattacagcggcccaagcccttgcacatgcctactttgctcagtaccacgatcctgatgatgaaccagtggccgatccttatgatcagtcctttgaaagcagggacctccttatagatgagtggaaaagcctgacctatgatgaagtcatcagctttgtgccaccaccccttgaccaagaagagatggagtcctgagcacctggtttctgttctgttgatcccacttcactgtgaggggaaggccttttcacgggaactctccaaatattattcaagtgcctcttgttgcagagatttcctccatggtggaagggggtgtgcgtgcgtgtgcgtgcgtgttagtgtgtgtgcatgtgtgtgtctgtctttgtgggagggtaagacaatatgaacaaactatgatcacagtgactttacaggaggttgtggatgctccagggcagcctccaccttgctcttctttctgagagttggctcaggcagacaagagctgctgtccttttaggaatatgttcaatgcaaagtaaaaaaatatgaattgtccccaatcccggtcatgcttttgccactttggcttctcctgtgaccccaccttgacggtggggcgtagacttgacaacatcccacagtggcacggagagaaggcccataccttctggttgcttcagacctgacaccgtccctcagtgatacgtacagccaaaaaggaccaactggcttctgtgcactagcctgtgattaacttgcttagtatggttctcagatcttgacagtatatttgaaactgtaaatatgtttgtgccttaaaaggagagaagaaagtgtagatagttaaaagactgcagctgctgaagttctgagccgggcaagtcgagagggctgttggacagctgcttgtgggcccggagtaatcaggcagccttcataggcggtcatgtgtgcatgtgagcacatgcgtatatgtgcgtctctctttctccctcacccccaggtgttgccatttctctgcttacccttcacctttggtgcagaggtttcttgaatatctgccccagtagtcagaagcaggttcttgatgtcatgtacttcctgtgtactctttatttctagcagagtgaggatgtgttttgcacgtcttgctatttgagcatgcacagctgcttgtcctgctctcttcaggaggccctggtgtcaggcaggtttgccagtgaagacttcttgggtagtttagatcccatgtcacctcagctgatattatggcaagtgatatcacctctcttcagcccctagtgctattctgtgttgaacacaattgatacttcaggtgcttttgatgtgaaaatcatgaaaagaggaacaggtggatgtatagcatttttattcatgccatctgttttcaaccaactatttttgaggaattatcatgggaaaagaccagggcttttcccaggaatatcccaaacttcggaaacaagttattctcttcactcccaataactaatgctaagaaatgctgaaaatcaaagtaaaaaattaaagcccataaggccagaaactccttttgctgtctttctctaaatatgattactttaaaataaaaaagtaacaaggtgtcttttccactcctatggaaaagggtcttcttggcagcttaacattgacttcttggtttggggagaaataaattttgtttcagaattttgtatattgtaggaatcctttgagaatgtgattccttttgatggggagaaagggcaaattattttaatattttgtattttcaactttataaagataaaatatcctcaggggtggagaagtgtcgttttcataacttgctgaatttcaggcattttgttctacatgaggactcatatatttaagccttttgtgtaataagaaagtataaagtcacttccagtgttggctgtgtgacagaatcttgtatttgggccaaggtgtttccatttctcaatcagtgcagtgatacatgtactccagagggacagggtggaccccctgagtcaactggagcaagaaggaaggaggcagactgatggcgattccctctcacccgggactctccccctttcaaggaaagtgaacctttaaagtaaaggcctcatctcctttattgcagttcaaatcctcaccatccacagcaagatgaattttatcagccatgtttggttgtaaatgctcgtgtgatttcctacagaaatactgctctgaatattttgtaataaaggtctttgcacatgtgaccacatacgtgttaggaggctgcatgctctggaagcctggactctaagctggagctcttggaagagctcttcggtttctgagcataatgctcccatctcctgatttctctgaacagaaaacaaaagagagaatgagggaaattgctattttatttgtattcatgaacttggctgtaatcagttatgccgtataggatgtcagacaataccactggttaaaataaagcctatttttcaaattt

SEQ ID NO: 533 - DNA, 3677 bp, Artificial
  cDNA Sequence
ggaaccgcgaccactggagccttagcgggcgcagcagctggaacgggagtactgcgacgcagcccggagtcggccttgtaggggcgaaggtgcagggagatcgcggcgggcgcagtcttgagcgccggagcgcgtccctgcccttagcggggcttgccccagtcgcaggggcacatccagccgctgcggctgacagcagccgcgcgcgcgggagtctgcggggtcgcggcagccgcacctgcgcgggcgaccagcgcaaggtccccgcccggctgggcgggcagcaagggccggggagagggtgcgggtgcaggcgggggccccacagggccaccttcttgcccggcggctgccgctggaaaatgtctcaggagaggcccacgttctaccggcaggagctgaacaagacaatctgggaggtgcccgagcgttaccagaacctgtctccagtgggctctggcgcctatggctctgtgtgtgctgcttttgacacaaaaacggggttacgtgtggcagtgaagaagctctccagaccatttcagtccatcattcatgcgaaaagaacctacagagaactgcggttacttaaacatatgaaacatgaaaatgtgattggtctgttggacgtttttacacctgcaaggtctctggaggaattcaatgatgtgtatctggtgacccatctcatgggggcagatctgaacaacattgtgaaatgtcagaagcttacagatgaccatgttcagttccttatctaccaaattctccgaggtctaaagtatatacattcagctgacataattcacagggacctaaaacctagtaatctagctgtgaatgaagactgtgagctgaagattctggattttggactggctcggcacacagatgatgaaatgacaggctacgtggccactaggtggtacagggctcctgagatcatgctgaactggatgcattacaaccagacagttgatatttggtcagtgggatgcataatggccgagctgttgactggaagaacattgtttcctggtacagaccatattgatcagttgaagctcattttaagactcgttggaaccccaggggctgagcttttgaagaaaatctcctcagagtctctgtcgacttgctggagaagatgcttgtattggactcagataagagaattacagcggcccaagcccttgcacatgcctactttgctcagtaccacgatcctgatgatgaaccagtggccgatccttatgatcagtcctttgaaagcagggacctccttatagatgagtggaaaagcctgacctatgatgaagtcatcagctttgtgccaccaccccttgaccaagaagagatggagtcctgagcacctggtttctgttctgttgatcccacttcactgtgaggggaaggccttttcacgggaactctccaaatattattcaagtgcctcttgttgcagagatttcctccatggtggaagggggtgtgcgtgcgtgtgcgtgcgtgttagtgtgtgtgcatgtgtgtgtctgtctttgtgggagggtaagacaatatgaacaaactatgatcacagtgactttacaggaggttgtggatgctccagggcagcctccaccttgctcttctttctgagagttggctcaggcagacaagagctgctgtccttttaggaatatgttcaatgcaaagtaaaaaaatatgaattgtccccaatcccggtcatgcttttgccactttggcttctcctgtgaccccaccttgacggtggggcgtagacttgacaacatcccacagtggcacggagagaaggcccataccttctggttgcttcagacctgacaccgtccctcagtgatacgtacagccaaaaaggaccaactggcttctgtgcactagcctgtgattaacttgcttagtatggttctcagatcttgacagtatatttgaaactgtaaatatgtttgtgccttaaaaggagagaagaaagtgtagatagttaaaagactgcagctgctgaagttctgagccgggcaagtcgagagggctgttggacagctgcttgtgggcccggagtaatcaggcagccttcataggcggtcatgtgtgcatgtgagcacatgcgtatatgtgcgtctctctttctccctcacccccaggtgttgccatttctctgcttacccttcacctttggtgcagaggtttcttgaatatctgccccagtagtcagaagcaggttcttgatgtcatgtacttcctgtgtactctttatttctagcagagtgaggatgtgttttgcacgtcttgctatttgagcatgcacagctgcttgtcctgctctcttcaggaggccctggtgtcaggcaggtttgccagtgaagacttcttgggtagtttagatcccatgtcacctcagctgatattatggcaagtgatatcacctctcttcagcccctagtgctattctgtgttgaacacaattgatacttcaggtgcttttgatgtgaaaatcatgaaaagaggaacaggtggatgtatagcatttttattcatgccatctgttttcaaccaactatttttgaggaattatcatgggaaaagaccagggcttttcccaggaatatcccaaacttcggaaacaagttattctcttcactcccaataactaatgctaagaaatgctgaaaatcaaagtaaaaaattaaagcccataaggccagaaactccttttgctgtctttctctaaatatgattactttaaaataaaaaagtaacaaggtgtcttttccactcctatggaaaagggtcttcttggcagcttaacattgacttcttggtttggggagaaataaattttgtttcagaattttgtatattgtaggaatcctttgagaatgtgattccttttgatggggagaaagggcaaattattttaatattttgtattttcaactttataaagataaaatatcctcaggggtggagaagtgtcgttttcataacttgctgaatttcaggcattttgttctacatgaggactcatatatttaagccttttgtgtaataagaaagtataaagtcacttccagtgttggctgtgtgacagaatcttgtatttgggccaaggtgtttccatttctcaatcagtgcagtgatacatgtactccagagggacagggtggaccccctgagtcaactggagcaagaaggaaggaggcagactgatggcgattccctctcacccgggactctccccctttcaaggaaagtgaacctttaaagtaaaggcctcatctcctttattgcagttcaaatcctcaccatccacagcaagatgaattttatcagccatgtttggttgtaaatgctcgtgtgatttcctacagaaatactgctctgaatattttgtaataaaggtctttgcacatgtgaccacatacgtgttaggaggctgcatgctctggaagcctggactctaagctggagctcttggaagagctcttcggtttctgagcataatgctcccatctcctgatttctctgaacagaaaacaaaagagagaatgagggaaattgctattttatttgtattcatgaacttggctgtaatcagttatgccgtataggatgtcagacaataccactggttaaaataaagcctatttttcaaattt

SEQ ID NO: 534 - DNA, 2036 bp, Artificial
  cDNA Sequence
agggccaaggagcggcccccgcgcgcgcggcccgccagcacctctccgtccccgggcgcgcacggccggcgcggcggcccagaagggaagagctcgtcgcgcagccccggcccgcacccccgctcctggagctccagccgctcgccctccaaatctcgctcgcgctctgcggagaagcggccccacagccccagccgctcgccgtcgcccaagaagcccctcagccgggacaaggacggcgagggccgcgcaaggcactctgaggccgaggccacccgcgcccggcgccgctcccgcagctactcgcccatccgcaagcggcgccgggactcgccaagcttcatggagccgcggcgcatcaccagcgccgcaagcgtcctattccatactaccggcccagcccctcttcctcctccagctgcttgagcagcgactactcgacccggagccacagccgcagccccagccccggccacagccacgggagctacagcagtcgcagccatgggacccgcagccggacacgcagcccctcgaggacccccagtcccagctaccacagccggagcagctctgagagcgggggcttctgagcccagacagactcagcttggtgcccccctggcactgggagaggcgaggggcgggccccaggaccccagtggggagggggctatatctccttgcccccaaggctacaaagaggtctcagggccagtgcacgggcagatgggaccggggaagactttgagggtgggcatccagtggacaaggagaagccagatgtgctgcttctacgggtgtcctctcccacctcctgtccacccactgtgcccggggaacaaagagccgttacgaacacaggaatctccccatcccccttcctgctgatgccaactcaccaggcttgggactgctgccggtggatggtaccagagtccatgatctgctctgtcacttcaccttagctcagtgcagccagggacaccttgcaaggtgccagccctgggagcccctcttccgcactacacagctccctccactcctctcttatcactgggcagacgaggaggtggtacagcacatgggtttggagctagacagaaggaagaacagcctaacccttggtgcacccccatccaagctggggagctgcatccttttgagctggctgcaggaggaccctggctgagggctggtggctggccccacagcctcccccaagctcctccactgacccaggagtgcccagacgggtggcccccaaaatcccagcctggggagctaggcacctcactcttggtctgacctctccaggccaggctctcctcaccccatgccctgggccaaggtcctaccagccatgactactgcatgacaagaggtggggggtacagacctcaggtacatttgaccctgaggttaaaaggggttcaggtcaagaggtgggagaggaaaggggtagatgggaggtggaatctgtaggaaagagaaaaagcaaagtcgttcactgactgagtagcccccagggagtggagacgggtccctggggagggagcagctgacaggtcagcagtgcccccagccccacccaagaggagggcagcgtgtgcctgtggtctgggacgtgggctggatggcagcccagggtcacaggcataggataacatgtgctttggacctgacaagggagtaccttgggggtctgatggggtcatggccagccgagcctctgtagagatggaggctacagccctcagaagggaggggaggaaagagactgagggccctggcctggggcgtcgatggggaagcggtggcccccagtcctcttctgctgctcccagccccctcctcctggggccctcagggatctcatgaagtcttccttggcccaaccaggcagatgccccgggctccagtggggggaggggtctggggtctggtccgggttccccgctttctctatgtcccccctccctctttctccgcagtgcggataaaaattggactcgaataaaacccttggtgcccgg

SEQ ID NO: 535 - DNA, 516 bp, Artificial
  cDNA Sequence
gcggctccatgcgtgaggctggtgccacgcggtctcccggtgttggcattgtctcaggccttctcctcagttctgcacacagctacaaaacaaaagaacagttgccagcacttggaagaggatgtgcaaaccaaatggaggacagatactccctctatggacaagatactcatggaagaagtcaagttagaagagcagctgaaggaggctgtggaagaagataagcaagcactggcagatactgagggctcagagcagagcagccaaaaattggtggaggagggaaatatgtatagcattcagggcttctgcaaggactcgttagaggttgcagatgttttggagaaggcaacacagtgtgttccagaagaagaaattaaagacaataaccctcacctgaagaacctctctagactcacaatgagtgaagtccagattcaggaagtgttcagcaagcactgccaagatgaactctgtcacagcaagttccacccttatgagcgtgagggtcttttt

SEQ ID NO: 536 - DNA, 1044 bp, Artificial
  cDNA Sequence
gatgtcctccaccgtgaacaacggggcggccagcatgcagtccacacccgacgccgcgaacggcttcccgcagcccagctcctcctcggggacctggccgcgggcggaagaggagctgcgcgccgcggagccgggcctggtgaagcgcgcgcaccgcgagatcctggaccacgagcgcaagcggcgggtggagctcaagtgcatggagctgcaggagatgatgtattcggaggaggagattcggcagaaagtggggacattccggcagatgctgatggagaaggagggagtgctcaccagggaggaccggcctgggggccacattgtggcggagaccccgcggctgaccgagggcgctgagccgggcctggagtacgcgccctttgacgatgacgacggcccagtggactgtgactgcccggcctcctgctaccgcggccaccgcgggtacaggaccaagcattggtctagcagctcggcatcgccccctcccaagaaaaagaagaaaaagaaaggcggccaccggagaagccgcaaaaagaggagactggagtccgaatgcagctgtgggagctcctcacccctccgcaagaagaagaagagtgtgaagaagcatcgccgagacaggtctgattctgggtcccggaggaagagacggcacagatctcgaagctccaagtgcaaaagaaaagagaagaacaaagagaagaagaggcctcacacagagtccccaggccggaggtctcatcgccatagcagtggcagctcccacagcccctccctctcctcccactacagtgattccagatctcccagcaggctgagccccaagcaccgagacgaagggcgaaagacgggcagccagcggtccagcggaagccggtcgccttccccgtcgggcggcagcggatgggggtcgccccagcggaacggcggcagcgggcagcggagcggagcgcacgggggccgccccggctcggcgcacagcccgcccgataagcccagctcgccctcgcccagggtccgtgacaaggcggcggccgc

SEQ ID NO: 537 - DNA, 432 bp, Artificial
  cDNA Sequence
atgcttgccccctgctcaggttgggagcttggctgcttccgtctctgtctccgtcaggtccgactgtgggctggcgctgggcgctgggcttgctgggcttgccaagccaggccgtacagctcaggtgggagcgagcgctggcccggatcggagactgaggtccctccgcctggcccggcgcgccgaactctgaaggagtggacactgcaggtgagcccgtttggtcggctgcgggcgcggctcccgtgccacctggccgtgaggcccctggaccccctcacctacccggatggcgaccgcgtgctggtcgcggtgtgcggcgtggagggcggcgtgcggggcctggacggcctgcaggtgaagtacgacgaggatctggaggagatggccattgtgtctgatactatccacccccaggcgtccgtggaggtg

SEQ ID NO: 538 - DNA, 540 bp, Artificial
  cDNA Sequence
ctgcctcgtgttgtctgttggcacactctcaagagtttgaacggatacaagaatctttcatctggtgccgaaacccgggaggggctccggtcttcgtcccccgtggacctacccctccgccccagaaagcaggccacagcagccggacaaaggaagctcctcagcctccagttgcttctctgtgcatgcacatcagtcactgatctcacctactggggccctgcaggccatggggccacagctccacacagaagcctcctagcaatccacctccacctggtgcctgcttcaagtgcggcaatgaaggccactggcccacacaatgcccaaacccaggtaaacccacgaggccatgccccctctgcggaggaccccactggaagttggactgtgagcggcccctgcaaggaccacccccatcccttcctgagccaatcaaaccctcctactcggatctcgtcagccttgccgctgaagactgatagtgccttggaacagacaccccagcaactaccatcgcttcatctgagccaagggtaa

SEQ ID NO: 539 - DNA, 1399 bp, Artificial
  cDNA Sequence
aagcgacttcctctttccagtgcatttaaggcgcagcctggaagtgccagggagcactggaggccacccagtcatgggggacaccttcatccgtcacatcgccctgctgggctttgagaagcgcttcgtacccagccagcactatgtgtacatgttcctggtgaaatggcaggacctgtcggagaaggtggtctaccggcgcttcaccgagatctacgagttccataaaaccttaaaagaaatgttccctattgaggcaggggcgatcaatccagagaacaggatcatcccccacctcccagctcccaagtggtttgacgggcagcgggccgccgagaaccgccagggcacacttaccgagtactgcggcacgctcatgagcctgcccaccaagatctcccgctgtccccacctcctcgacttcttcaaggtgcgccctgatgacctcaagctccccacggacaaccagacaaaaaagccagagacatacttgatgcccaaagatggcaagagtaccgcgacagacatcaccggccccatcatcctgcagacgtaccgcgccattgccaactacgagaagacctcgggctccgagatggctctgtccacgggggacgtggtggaggtcgtagagaagagcgagagcggttggtggttctgtcagatgaaagcaaagcgaggctggatcccagcgtccttcctcgagcccctggacagtcctgacgagacggaagaccctgagcccaactatgcaggtgagccatacgtcgccatcaaggcctacactgctgtggagggggacgaggtgtccctgctcgagggtgaagctgttgaggtcattcacaagctcctggacggctggtgggtcatcaggaaagacgacgtcacaggctacttcccgtccatgtacctgcaaaagtcagggcaagacgtgtcccaggcccaacgccagatcaagcggggggcgccgccccgcaggtcgtccatccgcaacgcgcacagcatccaccagcggtcgcggaagcgcctcagccaggacgcctatcgccgcaacagcgtccgttttctgcagcagcgacgccgccaggcgcggccgggaccgcagagccccgggagcccgctcgaggaggagcggcagacgcagcgctctaaaccgcagccggcggtgcccccgcggccgagcgccgacctcatcctgaaccgctgcagcgagagcaccaagcggaagctggcgtctgccgtctgaggctggagcgcagtccccagctagcgtctcggcccttgccgccccgtgcctgtacatacgtgttctatagagcctggcgtctggacgccgagggcagccccgacccctgtccagcgcggctcccgccaccctcaataaatgttgcttggagtg

SEQ ID NO: 540 - DNA, 4529 bp, Artificial
  cDNA Sequence
aggaggaggagggtgagagagaagctgggagagcagagaaaaggggccaccggtcgcccccccgcttccccgcacgcgctctccagccgcggccgcccgcctgccgcggtcaccccggcctctgcctctgtcccccagtgatcggatcaaggcgctgagcgaggccctgcctgcggggcggccatgcggcggtgacaggagcgcgaccgacacgcacgggcccctcgccccctctcgcctcccgtccgctcgccagctcccctcagccgaggctgctccgcggcggccgcagcccgcgcgcggcccacactcgcctcccctcggcacccccggccccggagctgcctggaggcggccgcactcggggatcatggcccaagttgcaatgtccaccctccccgttgaagatgaggagtcctcggagagcaggatggtggtgacattcctcatgtcagctctcgagtccatgtgtaaagaactggccaagtccaaagccgaagtggcctgcattgcagtgtatgaaacagacgtgtttgtcgtcggaactgaaagaggacgtgcttttgtcaataccagaaaggattttcaaaaagattttgtaaaatattgtgttgaagaagaagaaaaagctgcagagatgcataaaatgaaatctacaacccaggcaaatcggatgagtgtagatgctgtagaaattgaaacactcagaaaaacagttgaggactatttctgcttttgctatgggaaagctttaggcaaatccacagtggtacctgtaccatatgagaagatgctgcgagaccagtcggctgtggtagtgcaggggcttccggaaggtgttgcctttaaacaccccgagaactatgatcttgcaaccctgaaatggattttggagaacaaagcagggatttcattcatcattaagagaccttttttagagccaaagaagcatgtaggtggtcgtgtgatggtaacagatgctgacaggtcaatactatctccaggtggaagttgtggccccatcaaagtgaaaactgaacccacagaagattctggcatttccctggaaatggcagctgtgacagtaaaggaagaatcagaagatcctgattattatcaatataacattcaagcaggcccttctgaaactgatgatgttgatgaaaaacagcccctatcgaagcctttgcaaggaagccaccattcttcagagggcaatgaaggcacagaaatggaagtaccagcagaagattctactcaacatgtcccttcagaaacaagtgaggaccctgaagttgaggtgactattgaagatgatgattattctccaccgtctaagagaccaaaggccaatgagctaccgcagccaccagtcccggaacccgccaatgctgggaagcggaaagtgagggagttcaacttcgagaaatggaatgctcgcatcactgatctacgtaaacaagttgaagaattgtttgaaaggaaatatgctcaagccataaaagccaaaggtccggtgacgatcccgtaccctcttttccagtctcatgttgaagatctttatgtagaaggacttcctgaaggaattccttttagaaggccatctacttacggaattcctcgcctggagaggatattacttgcaaaggaaaggattcgttttgtgattaagaaacatgagcttctgaattcaacacgtgaagatttacagcttgataagccagcttcaggagtaaaggaagaatggtatgccagaatcactaaattaagaaagatggtggatcagcttttctgcaaaaaatttgcggaagccttggggagcactgaagccaaggctgtaccgtaccaaaaatttgaggcacacccgaatgatctgtacgtggaaggactgccagaaaacattcctttccgaagtccctcatggtatggaatcccaaggctggaaaaaatcattcaagtgggcaatcgaattaaatttgttattaaaagaccagaacttctgactcacagtaccactgaagttactcagccaagaacgaatacaccagtcaaagaagattggaatgtcagaattaccaagctacggaagcaagtggaagagatttttaatttgaaatttgctcaagctcttggactcaccgaggcagtaaaagtaccatatcctgtgtttgaatcaaacccggagttcttgtatgtggaaggcttgccagaggggattcccttccgaagccctacctggtttggaattccacgacttgaaaggatcgtccgcgggagtaataaaatcaagttcgttgttaaaaaacctgaactagttatttcctacttgcctcctgggatggctagtaaaataaacactaaagctttgcagtcccccaaaagaccacgaagtcctgggagtaattcaaaggttcctgaaattgaggtcaccgtggaaggccctaataacaacaatcctcaaacctcagctgttcgaaccccgacccagactaacggttctaacgttcccttcaagccacgagggagagagttttcctttgaggcctggaatgccaaaatcacggacctaaaacagaaagttgaaaatctcttcaatgagaaatgtggggaagctcttggccttaaacaagctgtgaaggtgccgttcgcgttatttgagtctttcccggaagacttttatgtggaaggcttacctgagggtgtgccattccgaagaccatcgacttttggcattccgaggctggagaagatactcagaaacaaagccaaaattaagttcatcattaaaaagcccgaaatgtttgagacggcgattaaggagagcacctcctctaagagccctcccagaaaaataaattcatcacccaatgttaatactactgcatcaggtgttgaagaccttaacatcattcaggtgacaattccagatgatgataatgaaagactctcgaaagttgaaaaagctagacagctaagagaacaagtgaatgacctctttagtcggaaatttggtgaagctattggtatgggttttcctgtgaaagttccctacaggaaaatcacaattaaccctggctgtgtggtggttgatggcatgcccccgggggtgtccttcaaagcccccagctacctggaaatcagctccatgagaaggatcttagactctgccgagtttatcaaattcacggtcattagaccatttccaggacttgtgattaataaccagctggttgatcagagtgagtcagaaggccccgtgatacaagaatcagctgaaccaagccagttggaagttccagccacagaagaaataaaagagactgatggaagctctcagatcaagcaagaaccagaccccacgtggtagacctcttccctcctaggcttaaagtatcagtggttgagaagagcttttcggacctgttactaccccaagctgtgtaatatacttgtataacagaaataccttctatacaaacctttttttctacttttagatagaaatgtctactttttcagcagttctgtgaattaaagagcagagtgactgtgggtctggaatggctggtgtacttgggaatgtactatcaggattttacagcaatgctgggaaatgacagggaaaatgacaggaatgaatctcaccagattttttatgtactcagcagagccttgagttacggtgtttattttccaatcaagtgaagatatctcctacttctcctactggaacatctcagcttctgcagtgaagaaaaattcctgtgatagttcagttctttagtttttctatttgaaaaaaaaaaatcatttaaatgatcctttgttcacggctctccttaatgactgagtgaacagttcctatctgtatatttgactaaaccttttcctaagctatctctcatggttcctatgtttttttatcataattaaaagcaaaaccatctggatcacctaacagtcagaggtcagtatctcagcgtgtgaattatagaggaaatacagagagaacctcttccacttttacttttcgtccaaataaaatgcatggtgtaccagaagttgaagatcgggttgaggattggggctagctcgatgacactaaggccccaacatcgcgggacctgctgtggcgcggattcttaggaacgctgttctagccggccccctctccaggggtcgccgtggccggcattatttcctagttcttcttgtaaccctgaggtgccagcgcggggagtgaggaggggtcagggggctaaggatgcaacctctgacgttctgcgccttcctaggagagtcttacatgtgttgagatttcacaagcaatgcgagttgtaaaataccagctctacaagaagctaggctctgtgacggcatagttttcagtagctttatcacaatattcacaatggagaattatatgacatggtagcagaaataggcccttttatgtgttgcttctattttacctcaaattgtagatatagggtaatcaataaaatccatccatgcctttcacacactaa

SEQ ID NO: 541 - DNA, 4469 bp, Artificial
  cDNA Sequence
aggaggaggagggtgagagagaagctgggagagcagagaaaaggggccaccggtcgcccccccgcttccccgcacgcgctctccagccgcggccgcccgcctgccgcggtcaccccggcctctgcctctgtcccccagtgatcggatcaaggcgctgagcgaggccctgcctgcggggcggccatgcggcggtgacaggagcgcgaccgacacgcacgggcccctcgccccctctcgcctcccgtccgctcgccagctcccctcagccgaggctgctccgcggcggccgcagcccgcgcgcggcccacactcgcctcccctcggcacccccggccccggagctgcctggaggcggccgcactcggggatcatggcccaagttgcaatgtccaccctccccgttgaagatgaggagtcctcggagagcaggatggtggtgacattcctcatgtcagctctcgagtccatgtgtaaagaactggccaagtccaaagccgaagtggcctgcattgcagtgtatgaaacagacgtgtttgtcgtcggaactgaaagaggacgtgcttttgtcaataccagaaaggattttcaaaaagattttgtaaaatattgtgttgaagaagaagaaaaagctgcagagatgcataaaatgaaatctacaacccaggcaaatcggatgagtgtagatgctgtagaaattgaaacactcagaaaaacagttgaggactatttctgcttttgctatgggaaagctttaggcaaatccacagtggtacctgtaccatatgagaagatgctgcgagaccagtcggctgtggtagtgcaggggcttccggaaggtgttgcctttaaacaccccgagaactatgatcttgcaaccctgaaatggattttggagaacaaagcagggatttcattcatcattaagagaccttttttagagccaaagaagcatgtaggtggtcgtgtgatggtaacagatgctgacaggtcaatactatctccaggtggaagttgtggccccatcaaagtgaaaactgaacccacagaagattctggcatttccctggaaatggcagctgtgacagtaaaggaagaatcagaagatcctgattattatcaatataacattcaaggaagccaccattcttcagagggcaatgaaggcacagaaatggaagtaccagcagaagattctactcaacatgtcccttcagaaacaagtgaggaccctgaagttgaggtgactattgaagatgatgattattctccaccgtctaagagaccaaaggccaatgagctaccgcagccaccagtcccggaacccgccaatgctgggaagcggaaagtgagggagttcaacttcgagaaatggaatgctcgcatcactgatctacgtaaacaagttgaagaattgtttgaaaggaaatatgctcaagccataaaagccaaaggtccggtgacgatcccgtaccctcttttccagtctcatgttgaagatctttatgtagaaggacttcctgaaggaattccttttagaaggccatctacttacggaattcctcgcctggagaggatattacttgcaaaggaaaggattcgttttgtgattaagaaacatgagcttctgaattcaacacgtgaagatttacagcttgataagccagcttcaggagtaaaggaagaatggtatgccagaatcactaaattaagaaagatggtggatcagcttttctgcaaaaaatttgcggaagccttggggagcactgaagccaaggctgtaccgtaccaaaaatttgaggcacacccgaatgatctgtacgtggaaggactgccagaaaacattcctttccgaagtccctcatggtatggaatcccaaggctggaaaaaatcattcaagtgggcaatcgaattaaatttgttattaaaagaccagaacttctgactcacagtaccactgaagttactcagccaagaacgaatacaccagtcaaagaagattggaatgtcagaattaccaagctacggaagcaagtggaagagatttttaatttgaaatttgctcaagctcttggactcaccgaggcagtaaaagtaccatatcctgtgtttgaatcaaacccggagttcttgtatgtggaaggcttgccagaggggattcccttccgaagccctacctggtttggaattccacgacttgaaaggatcgtccgcgggagtaataaaatcaagttcgttgttaaaaaacctgaactagttatttcctacttgcctcctgggatggctagtaaaataaacactaaagctttgcagtcccccaaaagaccacgaagtcctgggagtaattcaaaggttcctgaaattgaggtcaccgtggaaggccctaataacaacaatcctcaaacctcagctgttcgaaccccgacccagactaacggttctaacgttcccttcaagccacgagggagagagttttcctttgaggcctggaatgccaaaatcacggacctaaaacagaaagttgaaaatctcttcaatgagaaatgtggggaagctcttggccttaaacaagctgtgaaggtgccgttcgcgttatttgagtctttcccggaagacttttatgtggaaggcttacctgagggtgtgccattccgaagaccatcgacttttggcattccgaggctggagaagatactcagaaacaaagccaaaattaagttcatcattaaaaagcccgaaatgtttgagacggcgattaaggagagcacctcctctaagagccctcccagaaaaataaattcatcacccaatgttaatactactgcatcaggtgttgaagaccttaacatcattcaggtgacaattccagatgatgataatgaaagactctcgaaagttgaaaaagctagacagctaagagaacaagtgaatgacctctttagtcggaaatttggtgaagctattggtatgggttttcctgtgaaagttccctacaggaaaatcacaattaaccctggctgtgtggtggttgatggcatgcccccgggggtgtccttcaaagcccccagctacctggaaatcagctccatgagaaggatcttagactctgccgagtttatcaaattcacggtcattagaccatttccaggacttgtgattaataaccagctggttgatcagagtgagtcagaaggccccgtgatacaagaatcagctgaaccaagccagttggaagttccagccacagaagaaataaaagagactgatggaagctctcagatcaagcaagaaccagaccccacgtggtagacctcttccctcctaggcttaaagtatcagtggttgagaagagcttttcggacctgttactaccccaagctgtgtaatatacttgtataacagaaataccttctatacaaacctttttttctacttttagatagaaatgtctactttttcagcagttctgtgaattaaagagcagagtgactgtgggtctggaatggctggtgtacttgggaatgtactatcaggattttacagcaatgctgggaaatgacagggaaaatgacaggaatgaatctcaccagattttttatgtactcagcagagccttgagttacggtgtttattttccaatcaagtgaagatatctcctacttctcctactggaacatctcagcttctgcagtgaagaaaaattcctgtgatagttcagttctttagtttttctatttgaaaaaaaaaaatcatttaaatgatcctttgttcacggctctccttaatgactgagtgaacagttcctatctgtatatttgactaaaccttttcctaagctatctctcatggttcctatgtttttttatcataattaaaagcaaaaccatctggatcacctaacagtcagaggtcagtatctcagcgtgtgaattatagaggaaatacagagagaacctcttccacttttacttttcgtccaaataaaatgcatggtgtaccagaagttgaagatcgggttgaggattggggctagctcgatgacactaaggccccaacatcgcgggacctgctgtggcgcggattcttaggaacgctgttctagccggccccctctccaggggtcgccgtggccggcattatttcctagttcttcttgtaaccctgaggtgccagcgcggggagtgaggaggggtcagggggctaaggatgcaacctctgacgttctgcgccttcctaggagagtcttacatgtgttgagatttcacaagcaatgcgagttgtaaaataccagctctacaagaagctaggctctgtgacggcatagttttcagtagctttatcacaatattcacaatggagaattatatgacatggtagcagaaataggcccttttatgtgttgcttctattttacctcaaattgtagatatagggtaatcaataaaatccatccatgcctttcacacactaa

SEQ ID NO: 542 - DNA, 4466 bp, Artificial
  cDNA Sequence
aggaggaggagggtgagagagaagctgggagagcagagaaaaggggccaccggtcgcccccccgcttccccgcacgcgctctccagccgcggccgcccgcctgccgcggtcaccccggcctctgcctctgtcccccagtgatcggatcaaggcgctgagcgaggccctgcctgcggggcggccatgcggcggtgacaggagcgcgaccgacacgcacgggcccctcgccccctctcgcctcccgtccgctcgccagctcccctcagccgaggctgctccgcggcggccgcagcccgcgcgcggcccacactcgcctcccctcggcacccccggccccggagctgcctggaggcggccgcactcggggatcatggcccaagttgcaatgtccaccctccccgttgaagatgaggagtcctcggagagcaggatggtggtgacattcctcatgtcagctctcgagtccatgtgtaaagaactggccaagtccaaagccgaagtggcctgcattgcagtgtatgaaacagacgtgtttgtcgtcggaactgaaagaggacgtgcttttgtcaataccagaaaggattttcaaaaagattttgtaaaatattgtgttgaagaagaagaaaaagctgcagagatgcataaaatgaaatctacaacccaggcaaatcggatgagtgtagatgctgtagaaattgaaacactcagaaaaacagttgaggactatttctgcttttgctatgggaaagctttaggcaaatccacagtggtacctgtaccatatgagaagatgctgcgagaccagtcggctgtggtagtgcaggggcttccggaaggtgttgcctttaaacaccccgagaactatgatcttgcaaccctgaaatggattttggagaacaaagcagggatttcattcatcattaagagaccttttttagagccaaagaagcatgtaggtggtcgtgtgatggtaacagatgctgacaggtcaatactatctccaggtggaagttgtggccccatcaaagtgaaaactgaacccacagaagattctggcatttccctggaaatggcagctgtgacagtaaaggaagaatcagaagatcctgattattatcaatataacattcaagcaggcccttctgaaactgatgatgttgatgaaaaacagcccctatcgaagcctttgcaaggaagccaccattcttcagagggcaatgaaggcacagaaatggaagtaccagcagaagatgatgattattctccaccgtctaagagaccaaaggccaatgagctaccgcagccaccagtcccggaacccgccaatgctgggaagcggaaagtgagggagttcaacttcgagaaatggaatgctcgcatcactgatctacgtaaacaagttgaagaattgtttgaaaggaaatatgctcaagccataaaagccaaaggtccggtgacgatcccgtaccctcttttccagtctcatgttgaagatctttatgtagaaggacttcctgaaggaattccttttagaaggccatctacttacggaattcctcgcctggagaggatattacttgcaaaggaaaggattcgttttgtgattaagaaacatgagcttctgaattcaacacgtgaagatttacagcttgataagccagcttcaggagtaaaggaagaatggtatgccagaatcactaaattaagaaagatggtggatcagcttttctgcaaaaaatttgcggaagccttggggagcactgaagccaaggctgtaccgtaccaaaaatttgaggcacacccgaatgatctgtacgtggaaggactgccagaaaacattcctttccgaagtccctcatggtatggaatcccaaggctggaaaaaatcattcaagtgggcaatcgaattaaatttgttattaaaagaccagaacttctgactcacagtaccactgaagttactcagccaagaacgaatacaccagtcaaagaagattggaatgtcagaattaccaagctacggaagcaagtggaagagatttttaatttgaaatttgctcaagctcttggactcaccgaggcagtaaaagtaccatatcctgtgtttgaatcaaacccggagttcttgtatgtggaaggcttgccagaggggattcccttccgaagccctacctggtttggaattccacgacttgaaaggatcgtccgcgggagtaataaaatcaagttcgttgttaaaaaacctgaactagttatttcctacttgcctcctgggatggctagtaaaataaacactaaagctttgcagtcccccaaaagaccacgaagtcctgggagtaattcaaaggttcctgaaattgaggtcaccgtggaaggccctaataacaacaatcctcaaacctcagctgttcgaaccccgacccagactaacggttctaacgttcccttcaagccacgagggagagagttttcctttgaggcctggaatgccaaaatcacggacctaaaacagaaagttgaaaatctcttcaatgagaaatgtggggaagctcttggccttaaacaagctgtgaaggtgccgttcgcgttatttgagtctttcccggaagacttttatgtggaaggcttacctgagggtgtgccattccgaagaccatcgacttttggcattccgaggctggagaagatactcagaaacaaagccaaaattaagttcatcattaaaaagcccgaaatgtttgagacggcgattaaggagagcacctcctctaagagccctcccagaaaaataaattcatcacccaatgttaatactactgcatcaggtgttgaagaccttaacatcattcaggtgacaattccagatgatgataatgaaagactctcgaaagttgaaaaagctagacagctaagagaacaagtgaatgacctctttagtcggaaatttggtgaagctattggtatgggttttcctgtgaaagttccctacaggaaaatcacaattaaccctggctgtgtggtggttgatggcatgcccccgggggtgtccttcaaagcccccagctacctggaaatcagctccatgagaaggatcttagactctgccgagtttatcaaattcacggtcattagaccatttccaggacttgtgattaataaccagctggttgatcagagtgagtcagaaggccccgtgatacaagaatcagctgaaccaagccagttggaagttccagccacagaagaaataaaagagactgatggaagctctcagatcaagcaagaaccagaccccacgtggtagacctcttccctcctaggcttaaagtatcagtggttgagaagagcttttcggacctgttactaccccaagctgtgtaatatacttgtataacagaaataccttctatacaaacctttttttctacttttagatagaaatgtctactttttcagcagttctgtgaattaaagagcagagtgactgtgggtctggaatggctggtgtacttgggaatgtactatcaggattttacagcaatgctgggaaatgacagggaaaatgacaggaatgaatctcaccagattttttatgtactcagcagagccttgagttacggtgtttattttccaatcaagtgaagatatctcctacttctcctactggaacatctcagcttctgcagtgaagaaaaattcctgtgatagttcagttctttagtttttctatttgaaaaaaaaaaatcatttaaatgatcctttgttcacggctctccttaatgactgagtgaacagttcctatctgtatatttgactaaaccttttcctaagctatctctcatggttcctatgtttttttatcataattaaaagcaaaaccatctggatcacctaacagtcagaggtcagtatctcagcgtgtgaattatagaggaaatacagagagaacctcttccacttttacttttcgtccaaataaaatgcatggtgtaccagaagttgaagatcgggttgaggattggggctagctcgatgacactaaggccccaacatcgcgggacctgctgtggcgcggattcttaggaacgctgttctagccggccccctctccaggggtcgccgtggccggcattatttcctagttcttcttgtaaccctgaggtgccagcgcggggagtgaggaggggtcagggggctaaggatgcaacctctgacgttctgcgccttcctaggagagtcttacatgtgttgagatttcacaagcaatgcgagttgtaaaataccagctctacaagaagctaggctctgtgacggcatagttttcagtagctttatcacaatattcacaatggagaattatatgacatggtagcagaaataggcccttttatgtgttgcttctattttacctcaaattgtagatatagggtaatcaataaaatccatccatgcctttcacacactaa

SEQ ID NO: 543 - DNA, 681 bp, Artificial
  cDNA Sequence
atggcagccatgcgctggcgatggtggcagcggctgttaccttggaggttgctgcaggcccgtggctttccacaaaattctgcacccagcctgggcctaggagcgaggacttattcccagggcgactgctcgtattcgcgcacggcgctgtatgatctgctcggcgtcccctccacagccacgcaggcccaaatcaaggcggcttactaccgtcagtgctttctctaccacccggaccgcaactccgggagcgcggaggccgccgagcgcttcacgcgcatctcccaggcctacgtggtgctgggcagtgccaccctccgtcgcaagtatgatcgcggcctactcagcgacgaggacctgcgcggacctggcgtccggccctccaggacgcccgcacccgaccccggctcgccgcgtaccccgccgcccacctctcggacccacgacggttctcgggcctcccccggcgccaaccgcacgatgttcaactttgacgccttctaccaggcccactacggggaacaactggagcgggaacggcgcctgagggcccggcgggaggcccttcgcaaacggcaggagtatcggtccatgaaaggcctccgctgggaggatacccgagacacggctgccattttcctcatcttttcaatcttcatcatcatcggcttttatatttaa

SEQ ID NO: 544 - DNA, 2065 bp, Artificial
  cDNA Sequence
catgaaggaccgaacccaggagctccgcacggccaaggacagcgatgatgatgatgatgtcgctgtcaccgtggaccgagaccgcttcatggatgagttctttgagcaggtggaggagattcgaggcttcattgacaagatcgcagagaacgtggaggaggtgaagcggaagcacagtgccatcctggcatcccccaaccccgatgagaagacgaaggaggagctggaagaactcatgtccgacataaagaagacagcaaacaaagttcgttccaagttaaagagcatcgagcagtccatcgagcaagaggaaggcctgaaccgctcctccgctgacctgaggatccggaagacacagcactccacgctgtccagaaagtttgtggaggtcatgtcggagtacaacgccacgcagtccgactaccgcgagcgctgcaaaggccgcatccagaggcagctggagatcaccggcaggaccacgaccagtgaggagctggaggacatgctggagagtgggaaccccgccatctttgcctctgggatcatcatggactccagcatctcgaagcaggctctgagcgagattgagacgcggcacagtgagatcatcaagctggagaacagcatccgtgagctacacgacatgttcatggacatggccatgctcgtggagagccagggagagatgattgacaggatcgagtacaatgtggaacacgcggtagactatgtggagagggccgtgtctgacaccaagaaggccgtcaagtaccagagcaaggcgcgccggaagaaaatcatgatcatcatctgctgtgtgatcctgggcatcgtcatcgcctccactgttgggggcatcttcgcctagaagccacccaaactgccactccactccaggtgggccactccaaggaggccctggctgctgccacctggctgggctgccctcccaacccccgcctctggctcagagcaccctccctcccggcccccatgctcccttctctgccatgggccctccgtccccgccccgtgtcgtgtgcatgatctctgtgagtgtgcgtctgtacgggaagaggcagagggaggcagccagcggggcgtgatgcagtgtgcacagcgaggagcagacccaggcagggccgccagggtgacacaggccacccttccttgccttcagtaactcggtgggcccaggttctgctcttccctggggaccctaacctcgcctccagctgacctgccctgtcctctccagctgtccccacaagcagagccctgaggggtggggaccagctggccacatggtgctgcttttcaggttaggggagaggtggccctgagggacagcccagctctgagtctcagtcgctgatcactgccagggaggctcaggctgccatggctccaggctccctcccctgcctaggggcaaagtccatcgggtcctgggcctcagcttcccttcccacattcctccggccccaggagcaaccccttgggctaggtctgaccccaggtgtccctctggaaggggctggctggtgccctatttccagccaccccagcagctagggaggcaaagcaggctgcagtcagtccctcaagccagcgttgcatgtttgggatggtggctcctgttgtcttgcgctctgggaagtcagatgtcatttcaggcctgcagtctcatcctgcccttgccatcctcccatcgatgtgccacgtgggtgtcacgtgtcccagatgcagtattcggcagccagccggggagggctacctcctcctcctcaccaccttggggcttctcatgggaaatgtgcccccgccccaggaccctctcccttgtggacaggcagggagatgcatgcgagtgcatgcagcaggggatggggccgtgtccgtgtgccccaccctccctcggctttactcctgcccagtgactgtgaccactgtccgtgttgccttcttgaacagcgattccccccaaccccttcaccaaaggtcttggtacaaccagctgcccattttgtgaaatttttatgtagaataaacatttgtatctgta

SEQ ID NO: 545 - DNA, 1467 bp, Artificial
  cDNA Sequence
gggcggggctgcgagctagggcgggagaaggagcgcggggaggacgtaccttgtgagatgcgagccggccaacagcttgcaagcatgctccgctggacccgagcctggaggctcccgcgtgagggactcggcccccacggccctagcttcgcgagggtgcctgtcgcacccagcagcagcagcggcggccgagggggcgccgagccgaggccgcttccgctttcctacaggcttctggacggggaggcagccctcccggccgtcgtctttttgcacgggctcttcggcagcaaaactaacttcaactccatcgccaagatcttggcccagcagacaggccgtagggtgctgacggtggatgctcgtaaccacggtgacagcccccacagcccagacatgagctacgagatcatgagccaggacctgcaggaccttctgccccagctgggcctggtgccctgcgtcgtcgttggccacagcatgggaggaaagacagccatgctgctggcactacagaggccagagctggtggaacgtctcattgctgtagatatcagcccagtggaaagcacaggtgtctcccactttgcaacctatgtggcagccatgagggccatcaacatcgcagatgagctgccccgctcccgtgcccgaaaactggcggatgaacagctcagttctgtcatccaggacatggccgtgcggcagcacctgctcactaacctggtagaggtagacgggcgcttcgtgtggagggtgaacttggatgccctgacccagcacctagacaagatcttggctttcccacagaggcaggagtcctacctcgggccaacactctttctccttggtggaaactcccagttcgtgcatcccagccaccaccctgagattatgcggctcttccctcgggcccagatgcagacggtgccgaacgctggccactggatccacgctgaccgcccacaggacttcatagctgccatccgaggcttcctggtctaagagttgctggcaagaagatggccgggcgtggtggctcatgcctgtaattccagcactttgggaggctaaggcgggaggatgacttgaggccaggagttggagaccagcctggccaacatggtgaaaccctgtctctactaaaaatacaaaaattagcctggcgtggtggtgcacacctgtaatcccagctactctggaggctgaggcaggagaatcacttgaaccctggaggcagaggttgcaatgagccgagatcacaccactacactccagcctaggcaacagagcaagactctgtctcaaaaaaaacaaaacaaaaaggaggcacaaaaccccaggcttcaagtctctgcagcctgctccacatttgggcacagaaggactcagacaggcactgtgtgggcacgaggttttacaggggtggtcagacctcaggctttaatgaataaagacactactccc

SEQ ID NO: 546 - DNA, 519 bp, Artificial
  cDNA Sequence
gggcggggctgcgagctagggcgggagaaggagcgcggggaggacgtaccttgtgagatgcgagccggccaacagcttgcaagcatgctccgctggacccgagcctggaggctcccgcgtgagggactcggcccccacggccctagcttcgcgagggtgcctgtcgcacccagcagcagcagcggcggccgagggggcgccgagccgaggcttctggacggggaggcagccctcccggccgtcgtctttttgcacgggctcttcggcagcaaaactaacttcaactccatcgccaagatcttggcccagcagacaggccgtagggtgctgacggtggatgctcgtaaccacggtgacagcccccacagcccagacatgagctacgagatcatgagccaggacctgcaggaccttctgccccagctgggcctgcctgctccacatttgggcacagaaggactcagacaggcactgtgtgggcacgaggttttacaggggtggtcagacctcaggctttaa

SEQ ID NO: 547 - DNA, 1603 bp, Artificial
  cDNA Sequence
ggccggagccggagcggatcctggagccggagcggagcggagcggagcggagccggggcggagcgggccgagcgggccgagccagcagccgagctgggggcgcgggcgggcggcatgtaccgggcccgggcggcgcgggcggggccggagcccggcagcccggggcgctttgggatcctcagcaccgggcagctccgggacctgcttcaggatgagcccaagctggaccggatcgtgcggctcagcaggaagttccagggcctgcagctggagcgtgaggcctgcctggcctccaactacgcgctggccaaggagaacctggccctgcggccccgcctggagatgggccgggctgccctggccatcaaataccaggagcttcgtgaggtggccgagaactgcgcggacaagctgcagcgactggaggaaagcatgcatcgctggagtccccactgcgcgctgggctggctgcaggctgagctagaagaggcggagcaggaggcagaggagcagatggagcagctgctgctcggggagcaaagcctggaggccttcctgcctgccttccagcgtggccgcgccctggcccacctgaggcggacgcaggcagagaagctgcaggagctgctgcggcgtcgggagcgttctgcccagccggcccccacctcggctgctgatccccccaaatccttcccggctgcagctgtcctgcccactggggccgcccgggggccaccagcagtgccccggagcctgccccccttggactcccgcccagtgcccccactgaagggctcccccgggtgccccctcggcccggcccccctgctgagccctcggccctcgcagccagagcccccccaccggtaggatccacggtgcggccccccagttggggggcctagacaaacttgatgcgtggctcctcctcctcccccactgcctgggtggggggaggggcaggcccctccccctggcctcaggcaggccctggccctggaggctgagctggggaggagggtcccctggaagaggcccgagagggggctgggggtgggtgggcagggctttatgcctctggcgctgaagacaccctgccttttttgtttccgtgccccggggcctctagggtgatggaccagccccgttaaagaacttgactcaactacaggggcctgggaagatgcctgggtcccctaggggccttgccaaggggacctgtcgcaccccaccactccactgggctcgcacaacgccaaggccgccaggagtgttttacatcatgtcctgagcctacctttcccccaaattctggggcccacagcctaggagccaggtgatcaggcctcggctgtggggccagggacaccatggccctggggctactacgtgtccacacatgctccagaccctggggcaaggtaggccaggggcttctgacctgtgcaggtgagagtgggccatacccaggaaagaccattctgtatttttctgtccctgtctccttagaatggaagctttttgagggcaggtccttgtctttgtacgttctgtccccagccccgcctcttaggggccgtcaataaatgtgatgatgaggatg

SEQ ID NO: 548 - DNA, 1229 bp, Artificial
  cDNA Sequence
gacataaaaaccgggtgccggcaggcgccagtcgcaggtgtgctgctgaggcgtgagaatggcgtcccgcggccggcgtccggagcatggcggacccccagagctgttttatgacgagacagaagcccggaaatacgttcgcaactcacggatgattgatatccagaccaggatggctgggcgagcattggagcttctttatctgccagagaataagccctgttacctgctggatattggctgtggcactgggctgagtggaagttatctgtcagatgaagggcactattgggtgggcctggatatcagccctgccatgctggatgaggctgtggaccgagagatagagggagacctgctgctgggggatatgggccagggcatcccattcaagccaggcacatttgatggttgcatcagcatttctgctgtgcagtggctctgtaatgctaacaagaagtctgaaaaccctgccaagcgcctgtactgcttttttgcttctcttttttctgttctcgtccggggatcccgagctgtcctgcagctgtaccctgagaactcagagcagttggagctgatcacaacccaggccacaaaggcaggcttctccggtggcatggtggtagactaccctaacagtgccaaagcaaagaaattctacctctgcttgttttctgggccttcgacctttataccagaggggctgagtgaaaatcaggatgaagttgaacccagggagtctgtgttcaccaatgagaggttcccattaaggatgtcgaggcggggaatggtgaggaagagtcgggcatgggtgctggagaagaaggagcggcacaggcgccagggcagggaagtcagacctgacacccagtacaccggccgcaagcgcaagccccgcttctaagtcaccacgcggttctggaaaggcacttgcctctgcacttttctatattgttcagctgacaaagtagtattttagaaaagttctaaagttataaaaatgttttctgcagtaaaaaaaaagttctctgggccgggcgtggtggctcacacctgtaatcccagcaccttgggaggctgaggtgggaggatcatttgaggccaggagtttgagacctgcctgggcaacataatgaaacttcctttccagggaggaaaaaaaaaaaaaaaaaaagctctgagagcatcttattttgtttaaaggcaagaaataaaatttccttttgtgg

SEQ ID NO: 549 - DNA, 990 bp, Artificial
  cDNA Sequence
atggcggcctcagcaaaaaagaagaataagaaggggaagactatctccctaacagactttctggctgaggatgggggtactggtggaggaagcacctatgtttccaaaccagtcagctgggctgatgaaacggatgacctggaaggagatgtttctacaacttggcacagtaacgatgacgatgtgtacagggcgcctccaattgaccgttccatccttcccactgctccacgggctgctcgggaacccaatatcgaccggagccgtcttcccaaatcgccaccctacactgcttttctaggaaacctaccctatgatgttacagaagagtcaattaaggaattctttcgaggattaaatatcagtgcagtgcgtttaccacgtgaacccagcaatccagagaggctgaaaggttttggttatgctgaatttgaggacctggattccctgctcagtgccctgagtctcaatgaagagtctctaagtaacaggagaattcgagtggacgttgctgatcaagcactggataaagacagggatgatcctccttttggccgtgatagaaatcgggattctgacaaaacagatacagactggagggctcaccggtatcgggatgggtatcgggatggcccacgccgggatatggatcgatatggtggccgggatcgctatgatgaccgaggcagcagagactatgatagaggctatgattcccggataggcagtggcagaagagcatttggcagtgggtatcgcagggatgatgactacagagaaggcagggactgctatgaagaccaatatgacagacgggatgatcggtccccccccccccaaagacccaaactgaatctaaagcctcggagtactcctaaggaagatgattcctctgctagtaactcccagtccactcgagctgcttctatctttggaggggcaaagcctgttgacacagctgctagagaaagagaagtagaagaacggcta

SEQ ID NO: 550 - DNA, 760 bp, Artificial
  cDNA Sequence
cccggggcagcgcaaccgctggggccggcctcagtgggctgagtggtcggggcatcggggcccagagagcggctggtttcgaagtataaagcattccgcacgacgggggatggagaaggatgctgaagatggcgccccttctgagggagcagaggctcctccctctacggaagaggctgcccctccccgttcagaagaggaagaggccccgcgccctccgacagtggaggccccggcagaagatggtttctctccttccgcagaagatgctgtttcttctgtggtggattatcgggatctcattccttctgaagaagggatagttcttccagatgatcatgaagcggatctgaatagagttcgacagaggcttgcaccgcgaccggttcagtcagtgatttcggaagtgctgtccttgccgtcttcccggaggtcctccagataccgccggagtatgagtggccttcccaatctacaggaaacattaaaagagagacaggcaagatttagagaggcaagggaaagccgaagactgaaaattgacccttcatacaaatatatatttgaaattctagcagaaaatcttggcctggacatagtaactgttgaagaattaattttggattgcccatctctggaagcatttactaatttttttgcgaaagatggttgtaagacactgaaatttttgtaccaagaaggagatgtacctggtattgaatgtggtcgaactattgctggagcaactaaaggggcaaaa

SEQ ID NO: 551 - DNA, 1993 bp, Artificial
  cDNA Sequence
ctagttaaggcggcacagggccgaggcgtagtgtgggtgactcctccgttccttgggtcccgtcgtctgtgatactgcagcgcagccatggcagaaccgcagcccccgtccggcggcctcacggacgaggccgccctcagttgctgctccgacgcggaccccagtaccaaggattttctattgcagcagaccatgctacgagtgaaggatcctaagaagtcactggatttttatactagagttcttggaatgacgctaatccaaaaatgtgattttcccattatgaagttttcactctacttcttggcttatgaggataaaaatgacatccctaaagaaaaagatgaaaaaatagcctgggcgctctccagaaaagctacacttgagctgacacacaattggggcactgaagatgatgagacccagagttaccacaatggcaattcagaccctcgaggattcggtcatattggaattgctgttcctgatgtatacagtgcttgtaaaaggtttgaagaactgggagtcaaatttgtgaagaaacctgatgatggtaaaatgaaaggcctggcatttattcaagatcctgatggctactggattgaaattttgaatcctaacaaaatggcaaccttaatgtagtgctgtgagaattctcctttgagatttcagaagaaaggaaacaatgtgattcaagatatttacataccagaagcatctaggactgatggatcactgtcccgattcaaattattcttcagtccatttccccttcctatttcagctgttccttttcacctaactgttcagtcattctggttttcaagcagtgctttatctcatgtccttgaatatagttgtgtaactttattttttaggtaataattagaacagttcccttcagaggctgcatttgccttcttctgccacctaaatattacttcccttcaaatctgcctttgaatcatcatttttaaaaaaaaattaacatgtttttgttgtagttatcttctggggtttcaattcctcagaaacaacttttttcacaacggaaaggaaagaacactagtgttctttcagtaaagtacaaagtgtttattttacaaaagagtaggtactcttgagagcaattcaaatcatgctgacaaggatactgatagaaaaagtgatttcttcttattataaagtacatttaaagttcaaggactaaccttatttatttgggaaaggggaggaggaaggaaatgatatggtacccagacactgggctaggctgcaactttatctcatttaatactcccagctgtcatgtgagaaagaaagcaggctaggcatgtgaaatcactttcatggattattaatggatttaagagggcatcaatcagctcaactcaagatttcataatcatttttagtatttagattgtgcctcaaagttgtagtacctcacaatacctccactggtttcctgttgtaaaaaccttcagtgagtttgaccattgtgctcttggctcttgggctggagtaccgtggtgagggagtaaacactagaagtctttagtacaaaactgctctagggacacctggtgattcctacacaagtgatgtttatatttctcataaagagtcttccctatcccaaggtcttcatgatgccagtagccatatatgataaattatgttcagtgataacttagttatcagaaatcagctcagtggtcttccccgccatgattcacatttgatgagtttttaaaaatcaaagtgattttgaaaatctctaatggctcagaaaataaaaacatccagtttgtggatgactatatttagatttctctagactctagtggaagacctttggaaaggccatgccaaccgtgcttgtactgctagaagcactttatgtttcctttttgggtgaaatggatttatgtgagtgctttaaacaaatagcaatacttatagactgaaataaaatgaaacttcaaataag

SEQ ID NO: 552 - DNA, 2021 bp, Artificial
  cDNA Sequence
cagctctacatcctgtagattctcacacccagggcctccttcggcctcttctcaggggagtctcagagcaggagcctctctcccttgcccagtgaaagtcattctcccctctctcatccacctcacccgcggccacaatcctgagactttcccccgggaggcacacttctcctcgctgccctgctgctctcacggaaaccctgtcctgcttctcacactgacatctgctctctaatcacagaggatcctgtcattaaaagactcctggcctgggacaaagatctgagggtgtcggacaagtatctcctggctatggtcatagcgtatttcagccgggccggcctcccctcctggcaataccaacgcattcatttcttcctggctctctatctggccaatgacatggaggaggacgacgaggcccccaaacaaaacatcttctacttcctgtacgaggagacccgctctcatatacccttgctcagtgagctttggttccagttatgccgttacatgaacccgagggccaggaagaactgctctcagatagccttgttccggaagtatcggttccacttcttttgttccatgcgctgcagggcttgggtttccctggaggagttggaagagatccaggcttatgacccagagcactgggtgtgggcgcgagatcgcgcccacctttcctagagctccagggaccgtggaggcctgaggtcatcggcctgagagaagaacaccggacccaggggagatgtggattttcagcaggaactttattccaatgctaatggcagacatcaggaaggaggagaggaaccatttgtgcagatcatctagaagaacctggaccattcttgacagagctgaatacagtgatcacgttgtcctccaaggagcaggggtggggtggggtacttctaggagtccttggagaaaagtaagaaaccaggagtgtttccagttccaccctttcctgcggcaccacctccctttttatattgctgaatgccaacctccctggggcggaacctggaggtcctgtttcttatggacttggttgtcacagtccaggagcatttgaaggcacagtgcaggggctcagattggcacagaattctttgtgaaatatgagtgccacagactgtaacagatagcttcatgcacactatgcattttattggtttgtttggaaaatgttggccattgaattattaataggtttatttcaaatagtttggaaattgttgtacttttgaaaacatgctgttcctgtagagttttttgatgagagttatagttgttatatatacctaaagataattttcttttcatttttaagtgagaattctttttatcctaaatcttttattatctttaattttttttctgtattattatatgtgctcctgaagcgagcactctttttatctatgatacttccataataatctcttctatttatagctattggtagttccccaccagaaaaaaacataattctggtgatagaaatttttatttgctgtttaggtttgtgactgacttgtgagaattcagttgtgatttttaacatgtctcagatatatatactaacacgtctaatatatactatctattttattggtttattttgaaaaacatgggtatagaattatttaaatattattttatttactgaaatatttattaaatatatttatttatttaaatattattattactttaaatattattttaaatattttggaaatactggtatttttgaatagatgctgtttctataaagctgtgtgatgggtattataactgttgtatacacatacatataattttgttttcctttttaagagaggattcttttcatcctaaatcttttacctttcaatctttgtatctattattacacgtgctgctgaagggagcatggtttttatctatgatacttagttaacatatatattacatttatagctatgtggtagttcccctaaattcttgtaaaaataaatttttatttg

SEQ ID NO: 553 - DNA, 1337 bp, Artificial
  cDNA Sequence
atgggggacaccttcatccgtcacatcgccctgctgggctttgagaagcgcttcgtacccagccagcactatgtgagtagctggtacatgttcctggtgaaatggcaggacctgtcggagaaggtggtctaccggcgcttcaccgagatctacgagttccataaaaccttaaaagaaatgttccctattgaggcaggggcgatcaatccagagaacaggatcatcccccacctcccagctcccaagtggtttgacgggcagcgggccgccgagaaccaccagggcacacttaccgagtactgcggcacgctcatgagcctgcccaccaagatctcccgctgtccccacctccttgacttcttcaaggtgcgccctgatgacctcaagctccccacggacaaccagacaaaaaagccagagacatacttgatgcccaaagatggcaagagtaccgcgacagacatcaccggccccatcatcctgcagacgtaccgcgccattgccaactacgagaagacctcgggctccgagatggctctgtccacgggggacgtggtggaggtcgtggagaagagcgagagcggttggtggttctgtcagatgaaagcaaagcgaggctggatcccagcatccttcctcgagcccctggacagtcctgacgagacggaagaccctgagcccaactatgcaggtgagccatacgtcgccatcaaggcctacactgctgtggagggggacgaggtgtccctgctcgagggtgaagctgttgaggtaattcacaagctcctggacggctggtgggtcatcaggaaagacgacgtcacaggctacttcccgtccatgtacctgcaaaagtcagggcaagacgtgtcccaggcccaacgccagatcaagcggggggcgccgccccgcaggtcgtccatccgcaacgtgcacagcatccaccagcggtcgcggaagcgcctcagccaggacgcctatcgccgcaacagcgtccgttttctgcagcagcgacgccgccaggcgcggccgggaccgcagagccccgggagcccgctcgaggaggagcggcagacgcagcgctctaaaccgcagccggcggtgcccccgcggccgagcgccgacctcatcctgaaccgctgcagcgagagcaccaagcggaagctggcgtctgccgtctgaggctggagcgcagtccccagctagcgtctcggcccttgccgccccgtgcctgtatatacgtgttctatagagcctggcgtctggacgccgagggcagccccgacccctgtccagcgcggctcccgccaccctcaataaatgttgcttggagtgga

SEQ ID NO: 554 - DNA, 1488 bp, Artificial
  cDNA Sequence
atgtctgtgtccaaagaatataacctaagacgccactatcaaaccaatcacagcaagcattatgaccagtatacggaaagaatgcgtgacgagaagcttcacgagctgaaaaaagggctcaggaagtatctcttaggctcgtcagacaccgagtgtcccgagcaaaaacaagtgtttgcaaacccaagtccaacccagaaatcccccgtgcagcctgtagaggacctagctgggaacttatgggagaagttacgtgaaaaaatcaggtcttttgtggcatattctatcgcaatcgatgagatcaccgatataaataataccacccagttggccatattcatccgtggtgtcgatgagaatttcgatgtgtccgaagaacttctggatacggtgcccacgacgggtacaaaatctggaaacgagatcttttcgcgtgttgagaagagcctgaaaaagttctgtatcgactggtcgaaattagtaagcgtggcctccactggcaccccagcgatggtggatgccaataacgggcttgttacaaaactgaagtccagggtggcgacgttctgcaagggtgcggaactgaagtccatctgttgtataattcatccgaaatcactctgtgctcagaagttgaagatggaccacgtcatggacgtggtagtgaagtccgtgaactggatatgctcccggggactgaaccacagcgagttcacaaccttgctctatgagctggacagccagtatggtagcctcctgtactacacggagattaagtggctcagtcgcgggctcgtgctaaagagatttttcgaatccttggaagaaatcgactccttcatgtcatccagagggaaacccctgcctcaactgagctccatagattggatccgagacctggccttcttggttgacatgacgatgcatctgaacactttgaacatctctctccaaggacactcccaaatcgtcacgcagatgtatgacctgatccgggtgttcctagcaaaactgtgcctctgggagactcacttgacgaggaataatctggcccactttcccaccctgaaattggtttccagaaatgaaagcgatggcctgaactacattcccaaaatcgcggaactcaagaccgaattccagaaaaggctgtctgatttcaaactctacgaaagcgaactgactctgttcagctccccgttctccacgaagatcgacagtgtgcacgaggagctccagatggaggttatcgacctgcaatgcaacgcggtcctgaagacgaaatacgacaaggtgggaataccagaattctacaagtacctctggggtagctacccgaaatacaagcaccattgcgcaaagattctttccatgttcgggagcacctacatctgcgaacagctgttctccattatgaaactgagcaaaacaaaatactgctcccagttaaaggattcccagtgggattctgtactccacatcgcaacg

SEQ ID NO: 555 - DNA, 2018 bp, Artificial
  cDNA Sequence
cagctctacatcctgtagattctcacacccagggcctccttcggcctcttctcaggggagtctcagagcaggagcctctctcccttgcccagtgaaagtcattctcccctctctcatccacctcacccgcggccacaatcctgagactttcccccgggaggcacacttctcctcgctgccctgctgctctcacggaaaccctgtcctgcttctcacactgacatctgctctctaatcacagaggatcctgtcattaaaagactcctggcctgggacaaagatctgagggtgtcggacaagtatctcctggctatggtcatagcgtatttcagccgggccggcctcccctcctggcaataccaacgcattcatttcttcctggctctctatctggccaatgacatggaggaggacgacgaggcccccaaacaaaacatcttctacttcctgtacgaggagacccgctctcatatacccttgctcagtgagctttggttccagttatgccgttacatgaacccgagggccaggaagaactgctctcagatagccttgttccggaagtatcggttccacttcttttgttccatgcgctgcagggcttgggtttccctggaggagttggaagagatccaggcttatgacccagagcactgggtgtgggcgcgagatcgcgcccacctttcctagagctccagggaccgtggaggcctgaggtcatcggcctgagagaagaacaccggacccaggggagatgtggattttcagcaggaactttattccaatgctaatggcagacatcaggaaggaggagaggaaccatttgtgcagatcatctagaagaacctggaccattcttgacagagctgaatacagtgatcacgttgtcctccaaggagcaggggtggggtggggtacttctaggagtccttggagaaaagtaagaaaccaggagtgtttccagttccaccctttcctgcggcaccacctccctttttatattgctgaatgccaacctccctggggcggaacctggaggtcctgtttcttatggacttggttgccacagtccaggagcatttgaaggcacagtgcaggggctcagattggcacagaattctttgtgaaatatgagtgccacagactgtaacagatagcttcatgcacactatgcattttattggtttgtttggaaaatgttggccattgaattattaataggtttatttcaaatagtttggaaattgttgtacttttgaaaacatgctgttcctgtagagttttttgatgagagttatagttgttatatatacctaaagataattttcttttcatttttaagtgagaattctttttatcctaaatcttttattatctttaaatttttttctgtattattatatgtgctcctgaagcgagcactctttttatctatgatacttccataataatctcttctatttatagctattggtagttccccaccagaaaaaaacataattctggtgatagaaatttttatttgctgtttaggtttgtgactgacttgtgagaattcagttgtgatttttaacatgtctcagatatatatactaacacgtctaatatatactatctattttattggtttattttgaaaaacatgggtatagaattatttaaatattttatttactgaaatatttattaaatatatttatttatttaaatattattattactttaaatattattttaaatattttggaaatactggtatttttgaatagatgctgtttctataaagctgtgtgatgggtattataactgttgtatacacatacatataattttgttttcctttttaagagaggattcttttcatcctaaatcttttacctttcaatctttgtatctattattacacgtgctgctgaagggagcatggtttttatctatgatacttagttaacatatatattacatttatagctatgtggtagttcccctaaattcttgtaaaaataaatttttatttg

SEQ ID NO: 556 - DNA, 2047 bp, Artificial
  cDNA Sequence
agagcatgatggggcacgcgcggtagcgcgaggcggggcatgtaaccatagcgtgcgggtcatgatgaggcacggacgtggggggttaggtggggcacgtaattggagctcgcggggcaggatggggcatctaactggagcgacagagagcacgatggggcacttacaggggccggaggctggcccgggcagtgagtgtggatggcttggcaggtgagcctgctggagctggaggactggcttcagtgtcccatctgcctggaggtcttcaaggagcccctgatgctgcagtgtggccactcttactgcaagggctgcctggtttccctgtcctgccacctggatgccgagctgcgctgccccgtgtgccggcaggcggtggacggcagcagctccctgcccaacgtctccctggccagggtgatcgaagccctgaggctccctggggacccggagcccaaggtctgcgtgcaccaccggaacccgctcagccttttctgcgagaaggaccaggagctcatctgtggcctctgcggtctgctgggctcccaccaacaccacccggtcacgcccgtctccaccgtctacagccgcatgaaggaggagctcgcagccctcatctctgagctgaagcaggagcagaaaaaggtggatgagctcatcgccaaactggtgaacaaccggacccgaatcgtcaatgagtcggatgtcttcagctgggtgatccgccgcgagttccaggagctgcaccacctggtggatgaggagaaggcccgctgcctggaggggatagggggtcacacccgtggcctggtggcctccctggacatgcagctggagcaggcccagggaacccgggagcggctggcccaagccgagtgtgtgctggaacagttcggcaatgaggaccaccacaagttcatccggaagttccactccatggcctccagagcagagatgccgcaggcccggcccttagaaggcgcattcagccccatctccttcaagccaggcctccaccaggctgacatcaagctgaccgtgtggaaaaggctcttccggaaagttttgccagccccggagcctctcaagttggaccctgccactgcccacccactcctggagctctccaagggcaacacggtggtgcagtgcgggcttctggcccagcggcgagccagccagcctgagcgcttcgactacagcacctgcgtcctggccagccgcggcttctcctgcggccgccactactgggaggtggtggtgggcagcaagagcgactggcgcctgggggtcatcaagggcacagccagccgtaagggcaagctgaacaggtcccccgagcacggcgtgtggctgatcggcctgaaggagggccgggtgtacgaagcctttgcctgcccccgggtacccctgcccgtggccggccacccccaccgcatcgggctctacctgcactatgagcagggcgaactcaccttcttcgatgccgaccgccccgatgacctgcggccgctctacaccttccaggccgacttccagggcaagctctaccccatcctggacacctgctggcacgagaggggcagcaactcgctgcccatggtgctgcccccgcccagcgggcctggccccctcagccccgagcagcccaccaagctgtagggccgcccggagtcctgccggcccacaggcccatcccggcggggcaccggggactcgcgggcttctgctgggtcccgcctgaggtgatatcgtcactgtttaggaaggtcttcaggcctgtgtgtccctggaacatgtaatgatagggaacaggaccccagtccctttcccctcagccaagggtgtatttgtaaacttcggcccccaggccttggcagccagggacacactgaaatccccatggttcctgccacttgctaaccatgctatctgcgcagacgcttccgagggcagaaatagtcccatgtataccttttccatattactgtgaactttcaactactatcaaggataataaatttgacattatttctttctcttt

SEQ ID NO: 557 - DNA, 3813 bp, Artificial
  cDNA Sequence
ctgtggaagagaaatggccccagttcatcacccttctctagcccagcctcatcccgctcccagacaccggagaggccagcaaagaaaataagagaagaagagatgtgtcatcattccagttcttcaactccattggcagcagacaaggagtcccagggagaaaaggctgcagatacaaccccaaggaagaaacaaaactcgaattctcagtctacacctggcagctctgggcagcgtaagcggaaagttcagctgctgccttctcggcgaggggaacagctgaccttgcctccacctccccagcttggctattcgatcactgccgaggacctagacttagagaagaaggcttcattacagtggttcaaccaggccttggaggacaagagcgatgctgcctcgaactctgtcactgagaccccacctatcactcagccttcatttacctttaccctgcctgctgctgcacctgcctccccacccacctccctcctggccccaagcaccaacccactgttagagagcttgaagaagatgcagactcccccgagcctgccaccctgcccagaatctgctggagcagcaaccactgaggccctctcacctccaaagacacccaacctcctacccccgctgggtttatcacagtcagggccgccagggctgctccccagcccctcctttgactccaaccccccgaccactttgctggggctgatccctgctccatccatggtaccagccactgacaccaaggcacctccaacccttcaggcagagacgactaccaaaccccaagccacatctgccccgtcccccgcccccaagcaaagcttcctgtttggaacacagaacacctcaccttccagccctgccgcccctgctgcatcttcagcatctcccatgttcaagcccattttcacggctccacccaagagtgagaaggaaggccccacaccgcctggcccttcagtctcagccacagcgccctccagctcctccctccccacgaccaccagcaccacagccccgaccttccagcctgtctttagcagcatggggccacctgcatctgtgcccttgcctgctcccttcttcaagcagacaactactcccgccactgctcccaccacaactgccccgctcttcactggcctggccagcgccacctctgctgtggctcccatcacctctgccagtccatccacagactctgcttcgaagcctgcgtttggctttggcataaacagtgtgagcagcagcagtgtgagtaccacgaccagcaccgccactgccgcctcacagcctttcctcttcggggcgccccaggcctctgctgccagcttcaccccggccatgggctccatattccagtttggcaaacctcctgccttgcccacaaccaccacagtcaccaccttcagccagtccctgcccactgccgtgccaacggccaccagcagcagcgctgccgactttagtggttttggcagcaccctcgccacctccgccccggccaccagcagccagcccactctgacgttcagtaacacgagcacccccacgttcaacattccctttggctcaagcgccaagtccccgctcccatcatatccgggagccaacccccagcccgcatttggggccgctgaggggcagccaccgggggccgccaagccagcccttacccccagctttggcagctctttcacttttggaaactctgcagccccggctgctgcacccacacctgcacctccgtccatgatcaagatcgtgcctgcgcacgtgcctacgcccatccagcctacctttggcggtgccacgcactcggcgtttgggttgaaagccacggcttcggccttcggcgctcccgccagctcacagcccgcctttggcggctccactgctgtcttctccttcggtgcagccaccagctctggctttggagccaccacccagaccgccagcagcgggagcagcagctcggtgtttggcagcacaacaccatcacccttcacgtttgggggttcggcagcccccgctggcagtgggagctttgggatcaacgtggccaccccaggctccagcgccaccaccggagctttcagctttggagcaggacagagtgggagcacagccacctccacccccttcgcagggggcttaggtcagaacgccctgggcaccaccggccagagcacaccgtttgccttcaacgtgggcagcacaactgagagcaaacctgtgtttggaggcaccgccacccccacctttggtctgaacacccctgcgcctggagtgggcacatcaggcagcagcctctcctttggggcatcctcagcacccgcccaaggctttgttggtgttgcacctttcggatcggcggccccttcattttccattggtgcgggatccaagaccctaggggctcgacagcgactgcaggcccgaaggcagcacacccgcaaaaagtagcctttgtcccctgtccctgttccccccaccccttccctaaatctggaccttggcacgtgctagaaagagccttggacccttccagctgcgtaaagcaaacctaccccggatctctggcttcagccgccagggggcagtggcagccctggggccctttcccttctggaggaagcacaagcctcagggaaggggaagcaggatgcggagggccaaagcccgggacctctacttgaacagttccactggggaggctggagaactaaggaaacacctgtacatagtgtccgctgccctgactcccgcttagcgcacccttaggcaggcgccccttccacctttccccgagagccgtcgtcgctggagggggcagggtccagcccgcctggatcggtggtgtgcacctgatgggatttgggaaatgggctatccgtaaagctttatcttgcttggcttagctgtgagaagtggttctcttcctctggtcccttctggggactctgtttccccatttcttgctgctgtgtccctcaccggttccttgcaggattccctcctttttaaatgcccttgaatctagctttgccttggagaccccagtgggtgctgctcctgccattttcttcctgccaagcctgaatcaatgtttcatctccaaccctctgccagtttggcccctcagagcttggtggctcaagactgttagcctggcagagccaggggtgaagggagaagctcttggagcaggcaggatgcccaccgctgcttcagctgcctcctcgcccagctaccctttggccccattgggccctcgtctgcctctccaggattgtatgtttcaagccttgccctgtgttcctttgtctgacgctctgtgtattgctctttgaatcgagtttggaggaagagttgagttgtatgagtggcggcatgttggtagtgccggacttcctgtttcaagttttctggggcctcgctaattgaatgtggaaagtagcaccacttgacggctacaagtgccgactcctgaattttcccatggtgttctgacttcaagggctggcagccagggagaatgggcccaggggaagcaaagacctcttccctctgccgtttctgtcccacttaactgacctcactggaggctacatcacccaaagtagatgttagaaaacctaaattaatgaaccatatttttaaaatcctatttttcccaaacagggccctctgcagcccagcctttccttccgtccttctgaaaccacataccccaggcccaagcgccttgctgccacgcccaacctctttgggagaagtatgaatgcgtgtgtctaaatt

SEQ ID NO: 558 - DNA, 1672 bp, Artificial
  cDNA Sequence
aaaggcgcgcgggaacatggggctgtatgctgcagctgcaggcgtgttggccggcgtggagagccgccagggctctatcaaggggttggtgtactccagcaacttccagaacgtgaagcagctgtacgcgctggtgtgcgaaacgcagcgctactccgccgtgctggatgctgtgatcgccagcgccggcctcctccgtgcggagaagaagctgcggccgcacctggccaaggtgctagtgtatgagttgttgttgggaaagggctttcgagggggtgggggccgatggaaggctctgttgggccggcaccaggcgaggctcaaggctgagttggctcggctcaaggttcatcggggtgtgagccggaatgaggacctgttggaagtgggatccaggcctggtccagcctcccagctgcctcgatttgtgcgtgtgaacactctcaagacctgctccgatgatgtagttgattatttcaagagacaaggtttctcctatcagggtcgggcttccagcctcgatgacttacgagccctcaaggggaagcattttctcctggaccccttgatgccggagctgctggtgtttcccgcccagacagatctgcatgaacacccactgtaccgggccggacacctcattctgcaggacagggccagctgtctcccagccatgctgctggaccccccgccaggctcccatgtcatcgatgcctgtgccgccccaggcaataagaccagtcacttggctgctcttctgaagaaccaagggaagatctttgcctttgacctggatgccaagcggctggcatccatggccacgctgctggcccgggctggcgtctcttgctgtgaactggctgaggaggacttcctggcggtctccccctcggatccacgctaccatgaggtccactacatcctgctggatccttcctgcagtggctcgggtatgccgagcagacagctggaggagcccggggcaggcacacctagcccggtgcgtctgcatgccctggcagggttccagcagcgagccctgtgccacgcgctcactttcccttccctgcagcggctcgtctactccacgtgctccctctgccaggaggagaatgaagacgtggtgcgagatgcgctgcagcagaacccgggcgccttcaggctagctcccgccctgcctgcctggccccaccgaggcctgagcacgttcccgggtgccgagcactgcctccgggcctcccctgagaccacactcagcagtggcttcttcgttgctgtaattgaacgggtcgaggtgccaaggtgagtgagtgggggcgtgcttgggaggcgcaggatggcaccggcacatctaacatctacacttctctagctcagcctcacaggccaaagcatcagcaccagaacgcacacccagcccagccccaaagagaaagaagagacagcaaagagccgcagccggtgcttgcacaccgccttgcacatagcagaggctccgggctgactccttcctggtgggaaaggaagatgcctgtcctctccgtggaggaccctgggccctcaccgcaggaagcagtttgggttttgaaaggttattgggtcccttccttgggctgtgttcttgctggtgagcaaagtgttgcctgcaaaaataaaatgcagaacgtactct

SEQ ID NO: 559 - DNA, 2405 bp, Artificial
  cDNA Sequence
gtgtgtgtgtgtgtgtgtgtgtgtgtgtgtatcccctacagagaaatggaaaagaaaaaaattgtcttggaacaagaagtcaaaacgctaaatgactccctaaagaaagttgaaaacaaggttagtgctatagtggatgagaaggaaaatgtaataaaggaagttgaaggcaaacgagccttacttgaaatcaaagaacgagaacataaccaattggtcaagctattggaattagccagagagaatgaagcaacttcattaactgaaagagggatcttggatctcaatttacgcaacagtctcattgacaagcagaactaccatgatgaactttctcgtaagcaaagagagaaagaacgagattttcgaaatttaagaaagatggaactgctcttgaaagtgtcctgggatgcacttaggcaaactcaagcactgcatcaaaggcttctattagagaaaattatatcagaaatggagtctaagttagtagaacaacaacttgcagaagaaaacaagcttttaaaggagcaagaaaacatgaaagagctagtagtcaaccttctccgcatgactcaaatcaaaattgatgaaaaggaacaaaagtccaaggatttcctgaaagctcagcaaaaatacaccaacattgttaaagaaatgaaagcaaaggatcttgaaatcaggatacacaagaagaaaaaatgtgaaatttatcggagactgagagagtttgctaaactgtatgacaccattcgaaatgaaagaaacaaatttgttaacttactccacaaagctcatcagaaagtaaatgaaataaaagaaaggcataaaatgtcattaaatgaacttgaaattctgagaaatagtgccgttagtcaagaaagaaagctacaaaattccatgctgaaacacgccaacaatgttaccatcagagagagcatgcaaaacgatgtgcgcaaaattgtatcaaaacttcaggaaatgaaagaaaagaaggaagcccagttaaataacattgacagacttgccaacacgatcacaatgatcgaagaggagatggtgcagcttcgcaaaagatacgaaaaagctgttcagcatcgaaatgaaagtggcgttcagctgatagagcgggaagaagaaatatgcattttttatgaaaaaataaatatccaagagaagatgaaactaaatggagaaattgaaatacatctactggaagaaaagatccaattcctgaaaatgaagattgctgagaagcaaagacaaatttgtgtgacccagaaattactgccagccaagaggtccctggatgccgacctagctgtgctccaaattcagttttcacagtgtacagacagaattaaagacctggagaaacagttcgtaaagcctgatggtgagaatagagctcgcttccttccagggaaagatctgaccgaaaaagaaatgatccaaaaattagacaagctggaactacaactggccaagaaggaggagaagctgctggagaaggatttcatctatgagcaggtctccaggctcacagacaggctctgcagcaaaactcagggctgcaagcaggacacactgctcttagccaagaagatgaatggctatcaaagaaggatcaaaaatgcaactgagaaaatgatggctcttgttgctgagctgtccatgaaacaagccctaaccattgaactccaaaaggaagtcagggagaaagaagacttcatcttcacttgcaattccaggatagaaaaaggtctgccactcaataaggaaattgagaaagaatggttgaaagtccttcgagatgaagaaatgcacgccttggccatcgctgaaaagtctcaggagttcttggaagcagataatcgccagctgcccaatggtgtttacacaactgcagagcagcgtccgaatgcctacatcccagaagcagatgccactcttcctttgccaaaaccttatggtgctttggctccttttaaacccagtgaacctggagccaatatgaggcacataaggaaacctgttataaagccagttgaaatctgaatatgtgaacaaatccaggcctctcaaggaaaagacttcaaccaggcttccttgtacccacaggtgaaaaatgtgagcataatacttctaatattattgataagtaaggtaaccacaattagtcagcaacagagtacaacagggtttctatttacccaccaactactatacctttcatgacgttgaatgggacatagaactgtcctacatttatgtcaaagtatatatttgaatcgcttatattttctttttcactctttatattgagtacattccagaaatttgtagtaggcaaggtgctataaaaatgcactaaaaataaatctgttctcaatgaagtacggaaatgg

SEQ ID NO: 560 - DNA, 3331 bp, Artificial
  cDNA Sequence
ataccaaggacgcgacttcttgtttggagagggtggagctttggagtgagacccaggaggccaaatcccaaagagaaaaataggagcctaaataaggatcaggaccaagggaagggaatcgtgaaaaatggaagacagtagcacagacacagaaaaagaagaggaagaggagaaagatgaaaaggatcaagagcccatttatgccatagtgcccacaattaacattcaagatgagcggtttgttgatttatctgaaactccagctttcatttttctgcatgagttacatgctatgggaaaacttcctggaaccagaatggcagcgttaaaagccaagtataccttgctgcatgacgccgtgatgagcacacaagagtcagaggtccaactgctacagaatgccaaacgtttcactgagcaaatacaacagcagcagtttcacctgcagcaagctgataattttccagaagcattctccacggaggtctccaaaatgagagaacaacttctcaagtatcaaaatgaatataatgcagtgaaggaaagagagttccataatcagtacagattaaatagcttaaaggaagaaaaaatcatcatagtaaaagaatttgagaagataacaaagccaggagaaatggagaagaagatgaaaatattgagagaaagcactgaagaattacgtaaagaaataatgcagaagaaattagaaattaaaaatttacgagaagatttggcatctaaacaaaagcaattattaaaagagcagaaggaactagaagaattgttgggacatcaggtcgtcctaaaggatgaagtggcccaccatcaaaccattccagtacaaattggaaaagagatagaaaaaataacacgcaaaaaagtagaaatggaaaagaaaaaaattgtcttggaacaagaagtcaaaacgctaaatgactccctaaagaaagttgaaaacaaggttagtgctatagtggatgagaaggaaaatgtaataaaggaagttgaaggcaaacgagccttacttgaaatcaaagaacgagaacataaccaattggtcaagctattggaattagccagagagaatgaagcaacttcattaactgaaagagggatcttggatctcaatttacgcaacagtctcattgacaagcagaactaccatgatgaactttctcgtaagcaaagagagaaagaacgagattttcgaaatttaagaaagatggaactgctcttgaaagtgtcctgggatgcacttaggcaaactcaagcactgcatcaaaggcttctattagagatggaagctatccccaaagatgattctacattatctgagagaaggcgagagcttcacaaggaagttgaagtagctaagaggaatttggcccaacagaaaattatatcagaaatggagtctaagttagtagaacaacaacttgcagaagaaaacaagcttttaaaggagcaagaaaacatgaaagagctagtagtcaaccttctccgcatgactcaaatcaaaattgatgaaaaggaacaaaagtccaaggatttcctgaaagctcagcaaaaatacaccaacattgttaaagaaatgaaagcaaaggatcttgaaatcaggatacacaagaagaaaaaatgtgaaatttatcggagactgagagagtttgctaaactgtatgacaccattcgaaatgaaagaaacaaatttgttaacttactccacaaagctcatcagaaagtaaatgaaataaaagaaaggcataaaatgtcattaaatgaacttgaaattctgagaaatagtgccgttagtcaagaaagaaagctacaaaattccatgctgaaacacgccaacaatgttaccatcagagagagcatgcaaaacgatgtgcgcaaaattgtatcaaaacttcaggaaatgaaagaaaagaaggaagcccagttaaataacattgacagacttgccaacacgatcacaatgatcgaagaggagatggtgcagcttcgcaaaagatacgaaaaagctgttcagcatcgaaatgaaagtggcgttcagctgatagagcgggaagaagaaatatgcattttttatgaaaaaataaatatccaagagaagatgaaactaaatggagaaattgaaatacatctactggaagaaaagatccaattcctgaaaatgaagattgctgagaagcaaagacaaatttgtgtgacccagaaattactgccagccaagaggtccctggatgccgacctagctgtgctccaaattcagttttcacagtgtacagacagaattaaagacctggagaaacagttcgtaaagcctgatggtgagaatagagctcgcttccttccagggaaagatctgaccgaaaaagaaatgatccaaaaattagacaagctggaactacaactggccaagaaggaggagaagctgctggagaaggatttcatctatgagcaggtctccaggctcacagacaggctctgcagcaaaactcagggctgcaagcaggacacactgctcttagccaagaagatgaatggctatcaaagaaggatcaaaaatgcaactgagaaaatgatggctcttgttgctgagctgtccatgaaacaagccctaaccattgaactccaaaaggaagtcagggagaaagaagacttcatcttcacttgcaattccaggatagaaaaaggtctgccactcaataaggaaattgagaaagaatggttgaaagtccttcgagatgaagaaatgcacgccttggccatcgctgaaaagtctcaggagttcttggaagcagataatcgccagctgcccaatggtgtttacacaactgcagagcagcgtccgaatgcctacatcccagaagcagatgccactcttcctttgccaaaaccttatggtgctttggctccttttaaacccagtgaacctggagccaatatgaggcacataaggaaacctgttataaagccagttgaaatctgaatatgtgaacaaatccaggcctctcaaggaaaagacttcaaccaggcttccttgtacccacaggtgaaaaatgtgagcataatacttctaatattattgataagtaaggtaaccacaattagtcagcaacagagtacaacagggtttctatttacccaccaactactatacctttcatgacgttgaatgggacatagaactgtcctacatttatgtcaaagtatatatttgaatcgcttatattttctttttcactctttatattgagtacattccagaaatttgtagtaggcaaggtgctataaaaatgcactaaaaataaatctgttctcaatg

SEQ ID NO: 561 - DNA, 2610 bp, Artificial
  cDNA Sequence
acagagcctgggctcactgaccagcccaggaggaaccagcctctgccttaccaggccatcaatccctgaagccaggggatctgccctgccagacacgggcatgtgtgtgtgtgtttcaggcttatcatccttgcattgctgggggtttcgcaacacggggaacgttgctggtctggctgaggtttctgtcgtgccacccctcctgccctgcttatggagctactgtatgtgtcagggccgtttgcatcctgttactagtcagtctatcttaatgcactttaggaaactcttccctttccttgcacgtgctttgcgtatactagttccccataaagaatgtcactgcctgaaacagaacattctgtgaaatgcagggctgttggattcacatgttaaattgtttcatctcaatcacgagggttgtgtaggatccagggaagatttatcccggggggtcaagagatatcgatgccctcccagaaggagttgccagcccactgagcagggtggttctgccctcttgcctggcactggatctcaagtatttaagaagaaaagaatggaatacaaagaagttagaagcgctttggggcagattttccagcaagactgggtttgtctgcccctagggccactacactgtagtgtgcattgcaaatcatggtggagaaggtaccatttgatttaacatatcacttttccacctttacctaactacctttgtagtctgataacttgtgccagttagtattatttgctgcagtaattgactggccccctcagctcagtaactcccaaggctactgaactacagggttcagaaagtagaagggagccatgcagtccttccaccgagcgctgttccctcaatttatgaccccagaagggttaagagaaggcccaagtccctctgtttccagtggagcagaggttcttagcagtgagttttagtgttgaacaaaaatcaaagctagagcctactggggttgaggaatgtgttggtttctttctttctcggtcattccctgtttcacacagctctgataagttcaccttgtaggactaggtcacacttaggtgatgaaaaattttcatcctgtgttatgttttctcaatgactcagagaagggaaacccaggctgattcttcttccttctaacccatctcctgaaaactgctcagagcctaactattgctctgtttcatttcagggccaagattaacacccctcctgcaggaggaagacagccaccagcggctgctcatggggctgatggtgtctgagctaaaagaccattttttgagacacctacagggtgtagaaaagaagaaaattgaacagatggttctggactacatttcaaaactgctggatctcatttgccacatcgtagaaaccaattggaggaaacataatcttcattcctgggttctccacttcaatagtcgtggcagtgctgctgaatttgcagtttttcacatcatgaccaggattctggaagctacaaacagtttgtttttacctctgcctcctggttttcatactctgcacaccatcctcggggtccagtgtctccctttgcataacctgctgcattgcattgacagtggagtgttgcttctcactgaaacagctgtcataaggctcatgaaagatctggataatacagagaaaaatgaaaaactgaaattcagtatcattgtgcggcttcctccgcttattgggcagaagatttgtagactttgggatcatcctatgagttctaacatcatttcgcggaaccacgtgacgcgactgcttcagaactataagaaacagcctcggaattctatgattaacaagtcatcgttcagtgtagaatttctgcctctgaactacttcattgaaattctgacagatatagagtcctccaatcaagccctgtatccttttgaaggacatgacaatgtggatgcagaatttgtagaggaagcagctctgaaacacaccgcgatgcttttaggcttatgaaaaagaaaacgcaattggatctgctgctgccattttaatcttgctcattaaccttactcctttgagaattctttaacaatatttaaaattggtaacaaaaatagtttagccataattgtttagccatgtgagtttcaggttggtacacgttcagacagaactgctgtatcacattccaattttgaatagccagtgagcaatcaagtgtagagaaatgataaatggcctaagaaggcatacagtggcataaacgatgctcttcctagtagcttaataggccacaagctagtttctgttgcactctgaaataaaatatgctttaaaaatgtagggaacagtgcttagaaaagcaaaaactaggtgtgtcattgaaataataggcataaaaattaaatgttacataagaacactatttggaaagagggtccttttaaaaactgaatttgtactaaatcagatttgccatgtccagtacagaataatttgtacttagtatttgcagcagggtttgtctttgtgaattcagatgaaacatatttatttttttttatttataaaaggttgatttaggaatattttgtcagtcattaaaaaacctg

SEQ ID NO: 562 - DNA, 2273 bp, Artificial
  cDNA Sequence
tcagatgttttagaaaacgattatgagagcttacatgtattaaatgttgaaagaaatggaaatattatttatacctataaggatgataagggaaatgtcgtctttggattatatgattgtcaaaccagacaaaatgagcttctatatacctttgagaaagacttgcaagttttcagttgctctgtcaacagtgaaaggactttgcttgctgcaagtttagttcagtctactaaagaaggaaaaaggaacgaacttcaaccaggatcaaagtgcttgactttgttggttgaaatccaccctgttaacaatgtgaaggttctaaaggctgtggatagctatatttgggttcagtttctctacccacatattgaaagtcatcctcttccagagaaccatctgttactgatttcagaagagaaatatattgaacaatttcgtatccatgtcgcccaagaagatggaaatagagtggtgattaaaaattctggccatctcccaagagacagaatagctgaggatttcgtttgggctcagtgggatatgtcagaacagagattatattacattgacctgaagaaatcaaggagtatcttaaaatgtatccagttttatgctgatgagagctataacttaatgtttgaagtacccttggacatatcattaagcaactcaggatttaaacttgtcaactttggatgtgattatcatcaataccgagataaattttccaaacacctgactctgtgtgtttttaccaaccatacaggaagtttgtgtgtatgttacagcccgaagtgtgcctcttggggacaaatcacatattcagtgttttacattcataaaggacacagcaagaccttcaccacttctcttgagaatgttgggtcacacatgacaaagggcattacttttctcaaccttgactattatgtggctgtttacttacctggtcatttcttccacctacttaatgttcaacatccagacctgatctgccacaatctctttctgacaggaaataatgaaatgattgatatgctacctcattgccctttacagtcattgtcagggtccctggtattggattgttgttctggaaagctctatagagcactgctcagccagtcgtctttattacagcttctgcagaacacttgcttagactgtgagaagatggctgcgttgcactgcgcgctctactgcggtcaaggtgcgcagttcctggaagcccagattattcagtggatttctgagaatgtctctgcctgccattcatttgacctcattcaggaatttataattgcttcttcatactggagtgtatattcagagacaagtaacatggacaaactattgccacattcctcagtgctcacttggaatacagaaattcctggaataactcttgtgacagaagacattgcattgcctcttatgaaggtgctcagctttaagggctactgggaaaaactgaactccaacctagaatatgttaagtacgccaagccacacttccactataacaacagtgtggtcaggagagagtggcacaacctgatctctgaagaggtatgagtgggtcagtgagaacaaagccagcagcgaggcatagtggactggatccaggtgatgcctttaaatcataaggctggcttccatgtgcagcactcttcccaattgccagggacttgatcattgtcattactgatctcaatgggcagagatgcttctatgatctctgttctcctagggaggaaactgaaaagcagaaagtttaaggggacacacagcacattcatagtagaagtatgattaatatccatgtctcagatgtgttctcaggttacttatgtagttaaaaattgatattaaaaaatctaggtgttcccaacttagtggtcattaggggttggggtagttggagggagaatagtggacgtgactcactgtccaggggtgacccagggaaatctttgggggtgatcgaagacttctatgtgttgattgtggtggtacattgtgggacatgaatctaaacatgataaaatgacatagaatgacacacacacattgtgccaatgtcaatttttgattttgatattgtgctctagttaggtaagatataagcactgaggagactgggtggagggtacattgcatctctctctagtatcgctgcatgtagattagtgttgttgtgtgtagtatatagttgactcgcagtttcctgtgaatctgtaattgtttcagaataaaatatttcttaaaacttt

SEQ ID NO: 563 - DNA, 645 bp, Artificial
  cDNA Sequence
atggcggaaccgccgagccccgtgcactgtgtcgctgccgcggcccccaccgccaccgtctcggagaaagaaccgtttggcaagctgcaactctcctcccgggaccctccgggttctctgtccgccaagaaggtccggactgaggagaagaaggcaccgcggagagtgaacggagaagggggcagcggcgggaacagcaggcagctgcagccgccggcagcaccttcgcctcagagctatggcagccccgcgtcttggagctttgcccctctgtctgctgctccctccccgtcctcttctcggagcagtttctctttctccgctggcacggccgttccctcctcagcctccgcttccttgtctcagccggtgccgcgcaaactgctggtccctcctacgctgctgcacgctcagcctcaccatctcctcctgcccgccgccgccgccgctgcctcggctaacgccaagtcgcgcagacctaaggagaagcgggagaaggagaggaggaggcacggtctcggtggggcccgagaggccggcggggcctcccgggaggagaacggggaggtgaagccgctgccccgagataaaatcaaagacaaaattaaagagagagacaaagaaaaagaaagagaaaaaaagaaa

SEQ ID NO: 564 - DNA, 872 bp, Artificial
  cDNA Sequence
ctgagagatcctctaccgcagtcgtttgaggaggcggaactgaagttttttcttaattatcatgtgacgggttctggatttaatggggggaaaagggcggaaaaggacaaggatccaaactggcgaatttgctgatcttcgcgtccctctccgctttccggccggcagcgctgccagggtatatttccttttttccgatcctgcaacagcctctttaaactgtttaaatgagaatgtccttggctcagagagtactactcacctggcttttcacactactcttcttgatcatgttggtgttgaaactggatgagaaagcaccttggaactggttcctcatattcattccagtctggatatttgatactatccttcttgtcctgctgattgtgaaaatggctgggcggtgtaagtctggctttgaccctcgacatggatcacacaatattaaaaaaaaagcctggtacctcattgcaatgttacttaaattagccttctgcctcgcactctgtgctaaactggaacagtttactaccatgaatctatcctatgtcttcattcctttatgggccttgctggctggggctttaacagaactcggatataatgtcttttttgtgagagactgacttctaagtacatcatctcctttctattgctgttcaacaagttaccattaaagtgttctgaatctgtcaagcttcaagaataccagagaactgagggaaaataccaaatgtagttttatactacttccataaaacaggattggtgaatcacggacttctagtcaacctacagcttaattattcagcatttgagttattgagatccttattatctctatgtaaataaagtttgttttggacctc

SEQ ID NO: 565 - DNA, 711 bp, Artificial
  cDNA Sequence
tttagtacagaacctgctaaggccatcaaacctattgatcggaagtcagtccatcagatatgctctgggccagtggtactgagtctaagcactgcagtgaaggagttagtagaaaacagtctggatgctggtgccactaatattgtgctctctgtctcactgtcttttagatgccaaaccttagattttatgatgactcctcaaccgtttagatcttggttatctcagagggatcgtcagctttttaagaaagttttgagagaaaagcaagtgaagaaaagcatagtcaatgctcaacatcacgggtctctcactgaacacaccacggtattctctcacagcgatgtcaccatttctacctgccacgcatcggtgaaggttgggactcgactggtgtttgatcacgatgggaaaatcatccagaaaaccccctacccccaccccagagggaccacagtcagcgtgaagcagttattttctacactacctgtgcgccataaggaatttcaaaggaatgttaagaaggtacacaatataaaaagggtggtggtgccgcaggaaagggtggaactggaaacactcctggtttcttacttttctccaaggactcctagaaggaccccacccccctccccccacccctgctcccaggaggacaacgtgatcactgtattcagctccatcaagaatggtccaggttcttctagatga

SEQ ID NO: 566 - DNA, 2186 bp, Artificial
  cDNA Sequence
aaaaggaagaaggagtggtcagatgaatctgaggaggagccggagaaggagctcgcccctgagcctgaggagacctgggtagtggagatgctgtgtgggctcaagatgaagctgaagcaacagcgagtgtcacccatcctccctgagcaccacaaggacttcaacagtcagcttgcccctggggtagatcccagccccccgcataggtccttttgctggaaaaggaagagggagtggtgggacgaatctgaggagtcgttggaggaggagccacggaaggtgctcgcccctgagcctgaggagatctgggtggtggagatgctgtgtggcctcaagatgaagctgaagcgacggcgagtgtcgctcgtgctccctgagcaccacgaggccttcaacaggctgcttgaggatcctgtcattaaaagattcctggcctgggacaaagatctgagggtgtcggacaagtatctcctggctatggtcatagcgtatttcagccgggccggcctcccctcctggcaataccaacgcattcatttcttcctggctctctacctggccaatgacatggaggaggacgacgaggaccccaaacaaaacatcttctacttcctgtatgggaagacccgctctcgcatacccttggtccgtaaccgtcggttccagttatgccgttgcatgaacccgagggccaggaagaaccgctctcagatagccctgttccagaaacttcggttccagttcttctgttccatgagcggcagggcttgggtttcccgggaggagttggaggagatccaggcttatgacccagagcactgggtgtgggcgcgagatcgcgctcgcctttcctagagctccagggaccgtggaggcctgaggtcatcggcctgagagaagaacaccggacccacgggagatgtggattttcagcaggaactttattccaatgctaatggcagtcaacaggaaagaggagaggaaccatttgtgcagatcatctagaagaacctggaccattcttgatggagctgaatacagtgatcacgttgtcctcctgggagcaggggtggggggaggggggtggggtccttctaggagtccttggagaaaagtaagaaaccaggagtgtttccagttccaccctttcctgcggcaccaccaccctttttatattgctgaatgccaacctccctggggcggaacctgaggtcctgtttcttacggacttggttgccacagtccaggagcatttgaaggcacaatgcaggggctcagattggcacagaattcttttgtgaaatatcagtgccacagattgtaacagatagcttcatgcacactctgcattttattggtttgtttggaaaatgttggccattgaattattcatagatttatttcaaatagtttggaaattgttgtacttttgaaaacatgctgttcctgtagttttttgatgagagttatagttgttatatatacataaagataattttcttttcatttttaagagacaattctttttatcctaaatattttattatctttaaatttgtttctgtattattatatgtgctcctgaagtgagcactctttttatctatgatatttccataataatctcttctatttatagctattggtagttccccaccagaaaaaaacataattctggtgatagaaatttttatttgctgtttaggtctgtgactgaattgtgagaattcagttgtgatttttaacatgtctcagatatatatactaacacgtctaatatatactatctaatttattggtttattttgaaaaacatgggtatagaattatttaaatattattttatttattgaaatattaaatatatttatttatttgaatattattacttgaaatattattttaaatattttggaaatactggtatttttgaatagatgctgtttctataaagctgtgtgatgggtgttataactgttatatacacatacgtataattttgctttcctttttaagagaggattcttttcatcctaaatcttttacctttcaatctttgtatctattattacacgtgctgctgaagggagcatggtttttatctatgatacttagttaacatatatattacatttatagctatgtagtagttcccctaaattcttgtaaaaataaatttttatttg

SEQ ID NO: 567 - DNA, 381 bp, Artificial
  cDNA Sequence
tcagcccctggggtagatcccagccccccgcataggtccttttgctggaaaaggaagagggagtggtgggacgaatctgaggagtcgttggaggaggagccacggaaggtgctcgcccctgagcctgaggagatctgggtggtggagatgctgtgtggcctcaagatgaagctgaagcgacggcgagtgtcgctcgtgctccctgagcaccacgaggccttcaacaggctgcttgaggatcctgtcattaaaagattcctggcctgggacaaagatctgagggtgtcggacaagtatctcctggctatggtcatagcgtatcagccgggccggcctcccctcctggcaataccaacgcattcatttcttcctggctctgtg

SEQ ID NO: 568 - DNA, 1311 bp, Artificial
  cDNA Sequence
ccggcggctgcggcggctggagcaggcgagcggcggcggccgatagcgagtgtcagggccggccggggcggcgcttctcggcctgtcgctggtcggcctcctactgtacctcgtgcctgctgcggctgcgctggcctggctggccgtggggactaccgcggcctggtggggactgagccgcgagccccgaggttcgcgccccttgtcctccttcgttcagaaggcgcgacatcggcgaacactgttcgcttcgcctccggccaagtcgacagccaacggaaacctcctagagccgcggaccctgctcgaaggacctgaccctgccgaactgctcctcatgggcagttacctgggcaagcccgggccgccgcagcccgcccccgctccggagggccaggacctgcggaataggcctggccgccgcccgcccgcccggcgccgcgctccacaccgccctccccgccgacccatcgcgttcaccacttttacccctctctccccactcctcttctccgaccctccgggaggccttccccacgggatcgtgggactttaccagatcggtttgtaataacacctcgaagacgctatccgatccatcaggcccagtattcctgtccgggggtacttcccacagtgtgctggaatggttatcacaagaaggctgtgctgtcccctcgcaactccaggatggtgtgtagcccagtgactctgaggatcgcccctcctgacagaagattttcgcgttctgcgataccagagcagataatcagctcaacactgtcctcaccatcaagtaatgccccagacccatgtgcaaaggagactgtactgagtgccctcaaagagaagaagaagaaaaggacagtggaggaagaagaccaaatattccttgatggccaggaaaataaaagaagctgtcttgtcgacggtctcactgatgcctcttctgcattcaaagttcctcgacccgggccagatacactccagttcacagtggatgtcttccactttgctaatgactccagaaacatgatatacatcacctgccacctgaaggtcaccctagctgagcaggacccagatgaactcaacaaggcctgttccttcagcaagccttccaacagctggttcccagtggaaggcctggctgacatctgtcaatgctgtaacaaaggtgactgtggcactccaagccattccaggaggcagcctcgtgtcgtgagccagtggtccacgtctgcttccaaccgcaggcatgtgacagaagaagcagatgtcaccgtggggactgatcttcctggacaggag

SEQ ID NO: 569 - DNA, 1893 bp, Artificial
  cDNA Sequence
atgaatggtgccggccctggccccgccgcagccgccccggtcccagtcccggtcccggtcccggactggcggcagttctgcgagctgcatgcgcaggcggccgccgtggactttgcgcacaagttctgccgtttcctgcgggacaacccagcttacgacacgcccgacgccggcgcctccttctcccgccacttcgccgccaacttcctggacgtcttcggcgaggaggtgcgccgcgtgctggtggctgggccgacgactcggggcgcggccgtgagcgcagaggccatggagccggagctcgcggacacctctgcactcaaggcggcgccctacggccactcgcggagctcggaggacgtgtccacgcacgcggccaccaaggcccgcgttcgcaagggcttctcgctgcgcaacatgagcctgtgcgtggtggacggcgtgcgcgacatgtggcaccggcgcgcctcgcccgagcccgacgcggcagctgccccgcgcaccgccgagccccgcgacaagtggacgcggcgcctgaggctgtcgcggacgctggctgccaaggtggagctggtggacattcaacgcgagggggcgctgcgcttcatggtggccgacgacgcggccgcgggctccgggggctcggctcagtggcagaagtgccgcctgctcctgcgcagggctgtggccgaggaacgcttccgcctggagttcttcgtgccgcccaaagcctccaggcccaaggtcagcatcccactgtcagccatcattgaggtccgcaccaccatgcccctggaaatgccagagaaggataacacattcgtcctcaaggtagagaatggagccgaatacatcttggagaccatcgactctctgcagaagcactcgtgggtagctgacatccagggctgcgtggaccccggccaggatcaccctcctttaaaataccccctacctccaatcgccagcagactctgtgaggcctgctctatggggccagggcctggggacctggaaggaagttggaccaggtcttgtcttcaccccaagagagcctcagagcactgggagttgggcagagatggcagtgaacgtcacctctcttctcacatttatttatttgtccccctttctccttccccccatgttcctcacactgtcatccccacctcaggggaacagggtgcagagacggatcccgaggctgaacccgagctggagctatccgactacccatggttccacgggacactgtcccgggtcaaggctgctcaactggttctggcaggggggccccggaaccacggcctcttcgtgatccgccaaagtgagactcggcctggggagtacgtgctgaccttcaacttccagggcaaggccaaggcaagtcacctgcgcctgtccctgaacggccacggccagtgtcacgtacagcatctgtggttccagtctgtgcttgacatgctccgccacttccacacacaccccatcccactggagtcagggggctcggccgacatcacccttcgcagctatgtgcgggcccaggaccccccaccagagccgggccccacgccccctgccgcgcccgcgtccccggcctgctggagcgactcgcccggccagcactacttctccagcctcgccgcggccgcctgcccgcctgcctcgccctccgacgccgccggcgcctcctcgtcttccgcctcgtcgtcctctgccgcgtcggggcccgcccccccgcgccccgtcgagggccagctcagcgcgcggagccgcagcaacagcgccgagcgcctgctggaggccgtggccgccaccgccgccgaggagcccccggaggccgcgcccggccgcgcgcgcgccgtggagaaccagtactccttctactag

SEQ ID NO: 570 - DNA, 2336 bp, Artificial
  cDNA Sequence
aaaaggaagagggagtggtcagatgaatctgaggaggagccggagaaggagctcgcccctgagcctgaggagacctgggtagtggagatgctgtgtgggctcaagatgaagctgaagcaacagcgagtgtcatccatcctccctgagcaccacaaggacttcaacagtcagcttgcccctggggtagatcccagccccccgcataggtccttttgctggaaaaggaagatggagtggtgggacgaatctgaggagtcgttggaggaggagccacggaaggtgctcgcccctgagcctgaggagatctgggtggcggagatgctgtgtggcctcaagatgaagctgaagcgacggcgagtgtcgctcgtgctccctgagcaccacgaggccttcaacaggctgcttgaggatcctgtcattaaaagattcttggcctgggacaaagatctgagggtgtcggacaagtatctcctggctatggtcatagcgtatttcagccgggctggcttcccctcctggcaataccaacgcattcatttcttcctggctctctacctggccaatgacatggaggaggacgacgaggactccaaacaaaacatcttccacttcctgtataggaagaaccgctctcgcatacccttgctccgtaagcgttggttccagttaggccattccatgaacccgagggccaggaagaaccgctctcgcatacccttgctccgtaagcgtcggttccagttataccgttccacgaacccgagggccaggaagaaccgctctcgcatacccttgctccgtaagcgtcggttccagttataccgttccatgaactcgagggccaggaagaaccgctctcagatagtcctgttccagaaacgacggttccacttcttctgttccatgagctgcagggcttgggtttccccagaggagttggaggagatccaggcttatgacccagagcactgggtgtgggcgcgagatcgcgctcacctttcctagagctccagggaccggggaggcctgaggtcatcggcctgagagaagaacactggacccaggggagatgtggattttcagcaggaactttattccaatgctaatggcagacaccaggcaggaggagaggaaccatttgtgcagatcatctagaagaacctggaccattcttgatggagctgaatacagtgatcacgttgtcctcctaggagcaggggtggggggaggggggtggggtccttctaggagtccttggagaaaagtaagaaaccaggagcgtttccagttccaccctttcctgcggcaccaccaccctttttatattgctgaattccaacctccctggggcggaacctggaggtcctgtttcttacggacttgcagtccaggaggatttgaaggcacaatgcaggggctcagattgggacagaattcttttgtgaaatatcagtgccacagattgtaacagatagcttcatgcacactctgcattttattggtttgtttggaaaatgtcggccattgaattattcatagatttatttcaaatagtttggaaattgttgtacttttgaaaacatgctgttcctgtagttttttgatgagagttatagttgttatatatacataaagataattttcttttcatttttaagagacaattcttttatcctaaatattttattatctttaaatttgtttctgtattattatatgtgctcctgaagcgagcactctttttatctatgatacttccataataatctcttctatttatagctattggtagttccccaccagaaaaatacataattctggtgatagaaatttttatttgctgtttaggtttgtgactgaattgtgagaattcagttgtgatttttaacatgtctcagatatatatactaacacgtctaatatatactatctattttattggtttattttgaaaaacatgggtatagaattatttaaatattattttatttatttaaatatttattaaatatatttatttatttaaatattatttttacattaaatattattttaaatattttggaaatactggtatttttgaatagatgctgtttctacaaagctgtgtgatgggtattataactgttatatacacatacatataattttgttttcctttttaagagaggattcttttcatcctaaatcttttacctttcaatctttgtatctattattacacgtgctgctgaagggagcatggattttatctatgatacttagttaacatatatattacatttatagctatgtagtagttcccctaaattcttgtaaaaataaatttttatttg

SEQ ID NO: 571 - DNA, 381 bp, Artificial
  cDNA Sequence
tcagcccctggggtagatcccagccccccgcataggtccttttgctggaaaaggaagatggagtggtgggacgaatctgaggagtcgttggaggaggagccacggaaggtgctcgcccctgagcctgaggagatctgggtggcggagatgctgtgtggcctcaagatgaagctgaagcgacggcgagtgtcgctcgtgctccctgagcaccacgaggccttcaacaggctgcttgaggatcctgtcattaaaagattcttggcctgggacaaagatctgagggtgtcggacaagtatctcctggctatggtcatagcgtatcagccgggctggcttcccctcctggcaataccaacgcattcatttcttcctggctctgtg

SEQ ID NO: 572 - DNA, 2272 bp, Artificial
  cDNA Sequence
ggccaggccgcgcccccgcgtgcgtgcgcggcccggcagagccgtgcgggcgcccgcgtactcactagctgaggtggcagtggttccaccaacatggagctctcgcagatgtcggagctcatggggctgtcggtgttgcttgggctgctggccctgatggcgacggcggcggtagcgcgggggtggctgcgcgcgggggaggagaggagcggccggcccgcctgccaaaaagcaaatggatttccacctgacaaatcttcgggatccaagaagcagaaacaatatcagcggattcggaaggagaagcctcaacaacacaacttcacccaccgcctcctggctgcagctctgaagagccacagcgggaacatatcttgcatggactttagcagcaatggcaaatacctggctacctgtgcagatgatcgcaccatccgcatctggagcaccaaggacttcctgcagcgagagcaccgcagcatgagagccaacgtggagctggaccacgccaccctggtgcgcttcagccctgactgcagagccttcatcgtctggctggccaacggggacaccctccgtgtcttcaagatgaccaagcgggaggatgggggctacaccttcacagccaccccagaggacttccctaaaaagcacaaggcgcctgtcatcgacattggcattgctaacacagggaagtttatcatgactgcctccagtgacaccactgtcctcatctggagcctgaagggtcaagtgctgtctaccatcaacaccaaccagatgaacaacacacacgctgctgtatctccctgtggcagatttgtagcctcgtgtggcttcaccccagatgtgaaggtttgggaagtctgctttggaaagaagggggagttccaggaggtggtgcgagccttcgaactaaagggccactccgcggctgtgcactcgtttgctttctccaacgactcacggaggatggcttctgtctccaaggatggtacatggaaactgtgggacacagatgtggaatacaagaagaagcaggacccctacttgctgaagacaggccgctttgaagaggcggcgggtgccgcgccgtgccgcctggccctctcccccaacgcccaggtcttggccttggccagtggcagtagtattcatctctacaatacccggcggggcgagaaggaggagtgctttgagcgggtccatggcgagtgtatcgccaacttgtcctttgacatcactggccgctttctggcctcctgtggggaccgggcggtgcggctgtttcacaacactcctggccaccgagccatggtggaggagatgcagggccacctgaagcgggcctccaacgagagcacccgccagaggctgcagcagcagctgacccaggcccaagagaccctgaagagcctgggtgccctgaagaagtgactctgggagggcccggcgcagaggattgaggaggagggatctggcctcctcatggcactgctgccatctttcctcccaggtggaagcctttcagaaggagtctcctggttttcttactggtggccctgcttcttcccattgaaactactcttgtctacttaggtctctctcttcttgctggctgtgactcctccctgactagtggccaaggtgcttttcttcctcccaggcccagtgggtggaatctgtccccacctggcactgaggagaatggtagagaggagaggagagagagagagaatgtgatttttggccttgtggcagcacatcctcacacccaaagaagtttgtaaatgttccagaacaacctagagaacacctgagtactaagcagcagttttgcaaggatgggagactgggatagcttcccatcacagaactgtgttccatcaaaaagacactaagggatttccttctgggcctcagttctatttgtaagatggagaataatcctctctgtgaactccttgcaaagatgatatgaggctaagagaatatcaagtccccaggtctggaagaaaagtagaaaagagtagtactattgtccaatgtcatgaaagtggtaaaagtgggaaccagtgtgctttgaaaccaaattagaaacacattccttgggaaggcaaagttttctgggacttgatcatacattttatatggttgggacttctctcttcgggagatgatatcttgtttaaggagacctcttttcagttcatcaagttcatcagatatttgagtgcccactctgtgcccaaataaatatgagctggggatt

SEQ ID NO: 573 - DNA, 321 bp, Artificial
  cDNA Sequence
ggccaggccgcgcccccgcgtgcgtgcgcggcccggcagagccgtgcgggcgcccgcgtactcactagctgaggtggcagtggttccaccaacatggagctctcgcagatgtcggagctcatggggctgtcggtgttgcttgggctgctggccctgatggcgacggcggcggtagcgcgggggtggctgcgcgcgggggaggagaggagcggccggcccgcctggcccaggagcttttttcctgttggaattggggagcatctgcagtcatttaccacatgccagctttgtgactcaattaagtatcttttacaaaagtga

SEQ ID NO: 574 - DNA, 1461 bp, Artificial
  cDNA Sequence
agttcctacccgcgagagggaagaagcaggaggtctcagcatgaaacagcagcagtggtgtgggatgactgccaaaatgggcaccgtgttgtcaggggtcttcaccatcatggccgtagacatgtatctcatctttgaacagaagcacctagggaatggcagttgcactgagatcacaccaaagtacaggggtgcaagtaacatcataaataacttcatcatctgctggagttttaaaatcgtcctcttcctgtctttcatcaccatcctcatcagctgcttcctcctgtactcagtgtatgcccagatcttcaggggcctggtcatctacattgtctggatttttttctatgaaactgcaaacgtcgtaatacaaatcctcaccaacaatgactttgacattaaagaggtcagaatcatgcgctggtttggcttggtgtctcgtacagtcatgcactgtttctggatgttctttgtcatcaactatgcccacataacctacaaaaaccggagccagggcaatataatttcctacaagagacgaatttctacagcggagattctccacagcagaaataaaagattatcaatttcgagtgggttcagtggctcacacctggaatcccagtactttgagaggcagaggaggtgctctggtaaaacaagtataaaatgaatgtcaggatgttctccctcatggtgggcatcttctctgtccttaataccacccagttcttcatctttgacctgaaccagaagacacacatttgctatgaggccaagttcagcatctacgtggactcaaagtcggagctagtcacttggaccctgttccacagggctaatatcagcactggcctctccctcaccaccatcatcatcggctgcttcctcttttattgtatccacaagaatatctacatggggctgctgatctatgccatgtggatcatcacttacgagctcatcaacttctccatagtcctgctcctcaacgggatcatcaaagatcacttcaagacgctgagttatttgcactggatcttccaaatctcacacatgctcctgcactttttctgtctgcccttcatcgtcaagcatgcatacaacctttacaaggaatcccagactgtgggcaggaaacgccgccacaggctctgctccaccattgcagtgaactcatgactacctgtccgtctgggaatgttgtaccggaagttaaactgaaccatgccagatgccaggaaaggtgggagggaatggtgttcctcaacaatggaaccctccctaccctgcctgtcttctgttgatgctgcttggtttgtcagggcttttgagttttacgcactgaggaatgattctcgggagagggcaggttgtgcggatcaattattttacagatgtgttgtgtgacttgttttagcagttaatgatatgtggccttgtgcttacttaaccatc

SEQ ID NO: 575 - DNA, 1546 bp, Artificial
  cDNA Sequence
agttcctacccgcgagagggaagaagcaggaggtctcagcatgaaacagcagcagtggtgtgggatgactgccaaaatgggcaccgtgttgtcaggggtcttcaccatcatggccgtagacatgtatctcatctttgaacagaagcacctagggaatggcagttgcactgagatcacaccaaagtacaggggtgcaagtaacatcataaataacttcatcatctgctggagttttaaaatcgtcctcttcctgtctttcatcaccatcctcatcagctgcttcctcctgtactcagtgtatgcccagatcttcaggggcctggtcatctacattgtctggatttttttctatgaaactgcaaacgtcgtaatacaaatcctcaccaacaatgactttgacattaaagaggtcagaatcatgcgctggtttggcttggtgtctcgtacagtcatgcactgtttctggatgttctttgtcatcaactatgcccacataacctacaaaaaccggagccagggcaatataatttcctacaagagacgaatttctacagcggagattctccacagcagaaataaaagattatcaatttcgagtgggttcagtggctcacacctggaatcccagtactttgagaggcagagcttccacactagcatatttacctgtctgtctccagtgccaagctcagcccccagcacctgtagatacacaatagatgtctgctgagaggtgctctggtaaaacaagtataaaatgaatgtcaggatgttctccctcatggtgggcatcttctctgtccttaataccacccagttcttcatctttgacctgaaccagaagacacacatttgctatgaggccaagttcagcatctacgtggactcaaagtcggagctagtcacttggaccctgttccacagggctaatatcagcactggcctctccctcaccaccatcatcatcggctgcttcctcttttattgtatccacaagaatatctacatggggctgctgatctatgccatgtggatcatcacttacgagctcatcaacttctccatagtcctgctcctcaacgggatcatcaaagatcacttcaagacgctgagttatttgcactggatcttccaaatctcacacatgctcctgcactttttctgtctgcccttcatcgtcaagcatgcatacaacctttacaaggaatcccagactgtgggcaggaaacgccgccacaggctctgctccaccattgcagtgaactcatgactacctgtccgtctgggaatgttgtaccggaagttaaactgaaccatgccagatgccaggaaaggtgggagggaatggtgttcctcaacaatggaaccctccctaccctgcctgtcttctgttgatgctgcttggtttgtcagggcttttgagttttacgcactgaggaatgattctcgggagagggcaggttgtgcggatcaattattttacagatgtgttgtgtgacttgttttagcagttaatgatatgtggccttgtgcttacttaaccatc

SEQ ID NO: 576 - DNA, 2643 bp, Artificial
  cDNA Sequence
cccgagaggagtcggtggcagcggcggcggcgggaccggcagcagcagcagcagcagcagcagcagcaaccactagcctcctgccccgcggcgctgccgcacgagccccacgagccgctcaccccgccgttctcagcgctgcccgaccccgctggcgcgccctcccgccgccagtcccggcagcgccctcagttgtcctccgactcgccctcggccttccgcgccagccgcagccacagccgcaacgccacccgcagccacagccacagccacagccccaggcatagccttcggcacagccccggctccggctcctgcggcagctcctctgggcaccgtccctgcgccgacatcctggaggttgggatgctcttgtccaaaatcaactcgcttgcccacctgcgcgccgcgccctgcaacgacctgcacgccaccaagctggcgcccggcaaggagaaggagcccctggagtcgcagtaccaggtgggcccgctactgggcagcggcggcttcggctcggtctactcaggcatccgcgtctccgacaacttgccggtggccatcaaacacgtggagaaggaccggatttccgactggggagagctgcctaatggcactcgagtgcccatggaagtggtcctgctgaagaaggtgagctcgggtttctccggcgtcattaggctcctggactggttcgagaggcccgacagtttcgtcctgatcctggagaggcccgagccggtgcaagatctcttcgacttcatcacggaaaggggagccctgcaagaggagctggcccgcagcttcttctggcaggtgctggaggccgtgcggcactgccacaactgcggggtgctccaccgcgacatcaaggacgaaaacatccttatcgacctcaatcgcggcgagctcaagctcatcgacttcgggtcgggggcgctgctcaaggacaccgtctacacggacttcgatgggacccgagtgtatagccctccagagtggatccgctaccatcgctaccatggcaggtcggcggcagtctggtccctggggatcctgctgtatgatatggtgtgtggagatattcctttcgagcatgacgaagagatcatcaggggccaggttttcttcaggcagagggtctcttcagaatgtcagcatctcattagatggtgcttggccctgagaccatcagataggccaaccttcgaagaaatccagaaccatccatggatgcaagatgttctcctgccccaggaaactgctgagatccacctccacagcctgtcgccggggcccagcaaatagcagcctttctggcaggtcctcccctctcttgtcagatgcccgagggaggggaagcttctgtctccagcttcccgagtaccagtgacacgtctcgccaagcaggacagtgcttgatacaggaacaacatttacaactcattccagatcccaggcccctggaggctgcctcccaacagtggggaagagtgactctccaggggtcctaggcctcaactcctcccatagatactctcttcttctcataggtgtccagcattgctggactctgaaatatcccgggggtggggggtgggggtgggtcagaaccctgccatggaactgtttccttcatcatgagttctgctgaatgccgcgatgggtcaggtaggggggaaacaggttgggatgggataggactagcaccattttaagtccctgtcacctcttccgactctttctgagtgccttctgtggggactccggctgtgctgggagaaatacttgaacttgcctcttttacctgctgcttctccaaaaatctgcctgggttttgttccctatttttctctcctgtcctccctcaccccctccttcatatgaaaggtgccatggaagaggctacagggccaaacgctgagccacctgcccttttttctgcctcctttagtaaaactccgagtgaactggtcttcctttttggtttttacttaactgtttcaaagccaagacctcacacacacaaaaaatgcacaaacaatgcaatcaacagaaaagctgtaaatgtgtgtacagttggcatggtagtatacaaaaagattgtagtggatctaatttttaagaaattttgcctttaagttattttacctgtttttgtttcttgttttgaaagatgcgcattctaacctggaggtcaatgttatgtatttatttatttatttatttggttcccttcctattccaagcttccatagctgctgccctagttttctttcctcctttcctcctctgacttggggaccttttgggggagggctgcgacgcttgctctgtttgtggggtgacgggactcaggcgggacagtgctgcagctccctggcttctgtggggcccctcacctacttacccaggtgggtcccggctctgtgggtgatggggaggggcattgctgactgtgtatataggataattatgaaaagcagttctggatggtgtgccttccagatcctctctggggctgtgttttgagcagcaggtagcctgctggttttatctgagtgaaatactgtacaggggaataaaagagatcttatttttttttttatacttggcgttttttgaataaaaaccttttgtctt

SEQ ID NO: 577 - DNA, 3278 bp, Artificial
  cDNA Sequence
ccccgcgctgcgcggagcagggaccaggcggttgcggcggcgacagccatggccggcgcgctggcaggtctggccgcgggcttgcaggtcccgcgggtcgcgcccagcccagactcggactcggacacagactcggaggacccgagtctccggcgcagcgcgggcggcttgctccgctcgcaggtcatccacagcggtcacttcatggtgtcgtcgccgcacagcgactcgctgccccggcggcgcgaccaggaggggtccgtggggccctccgacttcgggccgcgcagtatcgaccccacactcacacgcctcttcgagtgcttgagcctggcctacagtggcaagctggtgtctcccaagtggaagaatttcaaaggcctcaagctgctctgcagagacaagatccgcctgaacaacgccatctggagggcctggtatatccagtatgtgaagcggaggaagagccccgtgtgtggcttcgtgacccccctgcaggggcctgaggctgatgcgcaccggaagccggaggccgtggtcctggaggggaactactggaagcggcgcatcgaggtggtgatgcgggaataccacaagtggcgcatctactacaagaagcggctccgtaagcccagcagggaagatgacctcctggcccctaagcaggcggaaggcaggtggccgccgccggagcaatggtgcaaacagctcttctccagtgtggtccccgtgctgctgggggacccagaggaggagccgggtgggcggcagctcctggacctcaattgctttttgtccgacatctcagacactctcttcaccatgactcagtccggcccttcgcccctgcagctgccgcctgaggatgcctacgtcggcaatgctgacatgatccagccggacctgacgccactgcagccaagcctggatgacttcatggacatctcagatttctttaccaactcccgcctcccacagccgcccatgccttcaaacttcccagagccccccagcttcagccccgtggttgactccctcttcagcagtgggaccctgggcccagaggtgcccccggcttcctcggccatgacccacctctctggacacagccgtctgcaggctcggaacagctgccctggccccttggactccagcgccttcctgagttctgatttcctccttcctgaagaccccaagccccggctcccaccccctcctgtacccccacctctgctgcattaccctccccctgccaaggtgccaggcctggagccctgccccccacctcccttccctcccatggcaccacccactgctttgctgcaggaagagcctctcttctctcccaggtttcccttccccaccgtccctcctgccccaggagtgtctccgctgcctgctcctgcagccttcccacccaccccacagtctgtccccagcccagcccccacccccttccccatagagcttctacccttggggtattcggagcctgcctttgggccttgcttctccatgcccagaggcaagccccccgccccatcccctaggggacagaaagccagcccccctaccttagcccctgccactgccagtccccccaccactgcggggagcaacaacccctgcctcacacagctgctcacagcagctaagccggagcaagccctggagccaccacttgtatccagcaccctcctccggtccccagggtccccgcaggagacagtccctgaattcccctgcacattccttcccccgaccccggcccctacaccgccccggccacctccaggcccggccacattggccccttccaggcccctgcttgtccccaaagcggagcggctctcacccccagcgcccagcggcagtgaacggcggctgtcaggggacctcagctccatgccaggccctgggactctgagcgtccgtgtctctcccccgcaacccatcctcagccggggccgtccagacagcaacaagaccgagaaccggcgtatcacacacatctccgcggagcagaagcggcgcttcaacatcaagctggggtttgacacccttcatgggctcgtgagcacactcagtgcccagcccagcctcaaggtgagcaaagctaccacgctgcagaagacagctgagtacatccttatgctacagcaggagcgtgcgggcttgcaggaggaggcccagcagctgcgggatgagattgaggagctcaatgccgccattaacctgtgccagcagcagctgcccgccacaggggtacccatcacacaccagcgttttgaccagatgcgagacatgtttgatgactacgtccgaacccgtacgctgcacaactggaagttctgggtgttcagcatcctcatccggcctctgtttgagtccttcaacgggatggtgtccacggcaagtgtgcacaccctccgccagacctcactggcctggctggaccagtactgctctctgcccgctctccggccaactgtcctgaactccctacgccagctgggcacatctaccagtatcctgaccgacccgggccgcatccctgagcaagccacacgggcagtcacagagggcacccttggcaaacctttatagtcctggccagaccctgctgctcactcagctgccctgggggctgctttccctgggcacgggctccagggatcatctctgggcactcccttcctgccccaggccctggctctgcccttccctggggggtggagcagggtccaggtttcacacttgccacctcctggaggtcaagaagagcagagtccccgtccctgctctgccactgtgctccagcaccgtgaccttgggtgactcgtccgctgtctttggaccgctgtgtttcaatctgcaaaatggggatggggaaggttcaatcagcagatgacccccaggccttggcagctgtgacattgggggcctaggctggcaactccgggggctcaacggtggaaagaggaggatgctgtttctctgtcacctccacttgctccccgacaggtggggcacagacctctgttcctgagcagagaagcagaaaaggaggttccctctctctgctccttcactgctgacccagaggggctgcaggatggtttcccctgggagaggccaggagggcctgatcccaggagacaccagggccagagtgaccacagcagggcaggcatcatgtgtgtgtgtgtgtgtggatgtgtgtgtgtgggttttgtaaagaattcttgaccaataaaagcaaaaactgtctgctggtt

SEQ ID NO: 578 - DNA, 3127 bp, Artificial
  cDNA Sequence
ccccgcgctgcgcggagcagggaccaggcggttgcggcggcgacagccatggccggcgcgctggcaggtctggccgcgggcttgcaggtcccgcgggtcgcgcccagcccagactcggactcggacacagactcggaggacccgagtctccggcgcagcgcgggcggcttgctccgctcgcaggtcatccacagcggtcacttcatggtgtcgtcgccgcacagcgactcgctgccccggcggcgcgaccaggaggggtccgtggggccctccgacttcgggccgcgcagtatcgaccccacactcacacgcctcttcgagtgcttgagcctggcctacagtggcaagctggtgtctcccaagtggaagaatttcaaaggcctcaagctgctctgcagagacaagatccgcctgaacaacgccatctggagggcctggtatatccagtatgtgaagcggaggaagagccccgtgtgtggcttcgtgacccccctgcaggggcctgaggctgatgcgcaccggaagccggaggccgtggtcctggaggggaactactggaagcggcgcatcgaggtggtgatgcgggaataccacaagtggcgcatctactacaagaagcggctccgtaagcccagcagggaagatgacctcctggcccctaagcaggcggaaggcaggtggccgccgccggagcaatggtgcaaacagctcttctccagtgtggtccccgtgctgctgggggacccagaggaggagccgggtgggcggcagctcctggacctcaattgctttttgtccgacatctcagacactctcttcaccatgactcagtccggcccttcgcccctgcagctgccgcctgaggatgcctacgtcggcaatgctgacatgatccagccggacctgacgccactgcagccaagcctggatgacttcatggacatctcagatttctttaccaactcccgcctcccacagccgcccatgccttcaaacttcccagagccccccagcttcagccccgtggttgactccctcttcagcagtgggaccctgggcccagaggtgcccccggcttcctcggccatgacccacctctctggacacagccgtctgcaggctcggaacagctgccctggccccttggactccagcgccttcctgagttctgatttcctccttcctgaagaccccaagccccggctcccaccccctcctgtacccccacctctgctgcattaccctccccctgccaaggtgccaggcctggagccctgccccccacctcccttccctcccatggcaccacccactgctttgctgcaggaagagcctctcttctctcccaggtttcccttccccaccgtccctcctgccccaggagtgtctccgctgcctgctcctgcagccttcccacccaccccacagtctgtccccagcccagcccccacccccttccccatagagcttctacccttggggtattcggagcctgcctttgggccttgcttctccatgcccagaggcaagccccccgccccatcccctaggggacagaaagccagcccccctaccttagcccctgccactgccagtccccccaccactgcggggagcaacaacccctgcctcacacagctgctcacagcagctaagccggagcaagccctggagccaccacttgtatccagcaccctcctccggtccccagggtccccggcagtgaacggcggctgtcaggggacctcagctccatgccaggccctgggactctgagcgtccgtgtctctcccccgcaacccatcctcagccggggccgtccagacagcaacaagaccgagaaccggcgtatcacacacatctccgcggagcagaagcggcgcttcaacatcaagctggggtttgacacccttcatgggctcgtgagcacactcagtgcccagcccagcctcaaggtgagcaaagctaccacgctgcagaagacagctgagtacatccttatgctacagcaggagcgtgcgggcttgcaggaggaggcccagcagctgcgggatgagattgaggagctcaatgccgccattaacctgtgccagcagcagctgcccgccacaggggtacccatcacacaccagcgttttgaccagatgcgagacatgtttgatgactacgtccgaacccgtacgctgcacaactggaagttctgggtgttcagcatcctcatccggcctctgtttgagtccttcaacgggatggtgtccacggcaagtgtgcacaccctccgccagacctcactggcctggctggaccagtactgctctctgcccgctctccggccaactgtcctgaactccctacgccagctgggcacatctaccagtatcctgaccgacccgggccgcatccctgagcaagccacacgggcagtcacagagggcacccttggcaaacctttatagtcctggccagaccctgctgctcactcagctgccctgggggctgctttccctgggcacgggctccagggatcatctctgggcactcccttcctgccccaggccctggctctgcccttccctggggggtggagcagggtccaggtttcacacttgccacctcctggaggtcaagaagagcagagtccccgtccctgctctgccactgtgctccagcaccgtgaccttgggtgactcgtccgctgtctttggaccgctgtgtttcaatctgcaaaatggggatggggaaggttcaatcagcagatgacccccaggccttggcagctgtgacattgggggcctaggctggcaactccgggggctcaacggtggaaagaggaggatgctgtttctctgtcacctccacttgctccccgacaggtggggcacagacctctgttcctgagcagagaagcagaaaaggaggttccctctctctgctccttcactgctgacccagaggggctgcaggatggtttcccctgggagaggccaggagggcctgatcccaggagacaccagggccagagtgaccacagcagggcaggcatcatgtgtgtgtgtgtgtgtggatgtgtgtgtgtgggttttgtaaagaattcttgaccaataaaagcaaaaactgtctgctggtt

SEQ ID NO: 579 - DNA, 1667 bp, Artificial
  cDNA Sequence
gggggcgacggccgctgtgacgctgcggcggcggcgggcgggcggcggcgcgtgaggcgcgcgatccccggtgtcttgggagcagtgccccggcccccgccgctcccgccgccgccatgtcgggccggtcggtccgggcggagacccgcagccgggccaaggacgacatcaagaaggtgatggcggccatcgagaaagtgcggaaatgggagaagaagtgggtgactgtgggtgacacgtccctgaggatatttaagtgggttcctgtgacagacagcaaggagaaagaaaagtcaaaatcgaacagttcagcagcccgagaacctaatggctttccttctgatgcctcagccaattcctctctccttcttgaattccaggacgaaaacagcaaccagagttccgtgtctgacgtctatcagcttaaggtggacagcagcaccaactcaagccccagcccccagcagagtgagtccctgagcccagcacacacctccgacttccgcacggatgactcccagcccccaacgctgggccaggagatcctggaggagccctccctgccctcctcggaagttgctgatgaacctcctaccctcaccaaggaagaaccagttccactagagacacaggtcgttgaggaagaggaagactcaggtgccccgcccctgaagcgcttctgtgtggaccaacccacagtgccgcagacggcgtcagaaagctagcaccatcccggccctccgcctcctggccctgcctctatttattgcattctggttctggccgcgccgcgttgctggggtaagggcaagcactggggtcaagagcctgcacacatgagccttccgggctggaaggctggcgtaggacttggggctgtagcatcatcttcctgaccctggcacctgtgtctacttgctcccgagaagaggagcgctcatgtcttttttgcaccccaagttggctggagcatcggccaccccaagattcatctgtgacctccaggcagcagtctctgctccagaatctctggacggagctgctggcagcttctgcgagaagagagagatgtggaaggcaccttctagaagagagcgtgcctcaggttacttgaacttgaacggagactgtagactcccggactttcccctaggactgggggccctgtaggctgctgttggaggactgggtagagacattggagggaagggaagggcttttctccacacaagggcagagagtccgtctagatttcttgctgtcctgccagctctgcccatgcctgaggtggtcctacctctcacgggcaccctagctgctgacagccctttgtggccgccgtccccatcccctgccctcagcacacacatctgcacacacgcagctttgttctcacctctacctgtcattccagcatccctgcctcttgtcacaaactgccccagcaagaatttgaggttctgacaacagtacccatcccccacagtaccccttcagctcagtttctagaaagctcccttttctttgaaatctgcatgttgaattgaactttgtgattttattttttgtttcaaaaaagtttaagaaaatggaaatgggcaacagtgagtgaagacatattttagcactgaatagaatatttttaaaattaaactatttgaaatatg

SEQ ID NO: 580 - DNA, 963 bp, Artificial
  cDNA Sequence
atggggctaccctgggggcagcctcacctagggctgcagatgctcctcctggcgttgaactgtctccggcccagcctgagcctgggtgagtgggggtcctggatggacgcgtccagccagacccaaggggctgggggccctgctggagtgattggaccctgggcgcccgcccccctccgattgggagaggcagccccagggacccccacgcccgtctccgtggctcaccttttgtcccccgtggccacagagctggtgccctacacaccacagataacagcttgggacctggaagggaaggtcacagccaccaccttctccctggagcagccgcgctgtgtcttcgatgggcttgccagcgccagcgataccgtctggctcgtggtggccttcagcaatgcctccaggggcttccagaacccggagacactggctgacattccggcctccccacagctgctgaccgatggccactacatgacgctgcccctgtctccggaccagctgccctgtggcgaccccatggcgggcagcggaggcgcccccgtgctgcgggtgggccatgaccacggctgccaccagcagcccttctgcaacgcgcccctccctggccctggaccctatcgggaagacccccggatccatcgacacctggccagggcggcgaagtggcagcatgatcgtcattacctccatcctctcttctctggccggcctcctactcttggccttcttggcagcctctaccatgcgcttctccagcctgtggtggccggaggaggccccggagcagctgcggatcggctccttcatgggcaagcgctacatgacccaccacatcccacccagagaggccgccacactgccggtgggctgcaagcctggcctggaccccctccccagcctcagcccctagcctggcctctttgcatggggctgggggagatggggcgctgggagtga

SEQ ID NO: 581 - DNA, 831 bp, Artificial
  cDNA Sequence
atggggctaccctgggggcagcctcacctagggctgcagatgctcctcctggcgttgaactgtctccggcccagcctgagcctggagctggtgccctacacaccacagataacagcttgggacctggaagggaaggtcacagccaccaccttctccctggagcagccgcgctgtgtcttcgatgggcttgccagcgccagcgataccgtctggctcgtggtggccttcagcaatgcctccaggggcttccagaacccggagacactggctgacattccggcctccccacagctgctgaccgatggccactacatgacgctgcccctgtctccggaccagctgccctgtggcgaccccatggcgggcagcggaggcgcccccgtgctgcgggtgggccatgaccacggctgccaccagcagcccttctgcaacgcgcccctccctggccctggaccctatcgggtgaagttcctcctgatggacaccaggggctcacccagggctgagaccaagtggtcagaccccatcactctccaccaagggaagacccccggatccatcgacacctggccagggcggcgaagtggcagcatgatcgtcattacctccatcctctcttctctggccggcctcctactcttggccttcttggcagcctctaccatgcgcttctccagcctgtggtggccggaggaggccccggagcagctgcggatcggctccttcatgggcaagcgctacatgacccaccacatcccacccagagaggccgccacactgccggtgggctgcaagcctggcctggaccccctccccagcctcagcccctag

SEQ ID NO: 582 - DNA, 758 bp, Artificial
  cDNA Sequence
actgccctggcttcctgcgcctcttcaggtcatcgcttgctctcgttcccaggctttggcctctagtggacgagaatcaccgagtctgcggggctggacgctgactgcccgggccagcacctaggcgggcgggagctgtgcggcccagggttcacgcgggccgggtagaggctcgagccgggacccccgaggcggatctgggccccgagaaggacccccgcctggatttgccccgtaggcccggcccgggcccctcgggagcagaacagctttggtgaggtggacaggaggtgacctcgcgagcagacgcgcgcgccagcgacagcagcccgccccggcctctcgggagccgtggggcagaggctgcggagccccaggaggggccggagccctcatgacttcagtgacctgcttctgcccctctaggtctatcagccacagtctctgcaagtttccaagagcagcagaaaatgaacacattgcaggggccagtgtcattcaaagatgtggctgtggatttcacccaggaggagtggcagcaactggaccctgatgagaagatagcatacggggatgtgatgttggagaactacagccatctagtttctgtggggtatgattatcaccaagccaaacatcatcatggagtggaggtgaaggaagtggagcagggagaggagccgtggataatggaaggtgaatttccatgtcaacatagtccaggtaagttagtagattatcacatgttaaaaaacact

SEQ ID NO: 583 - DNA, 2173 bp, Artificial
  cDNA Sequence
atacttgcgcgccgacgccgccgctcgcttgtgaaactggaaggctgccatggctagcccagccgcctcctcggtgcgaccaccgaggcccaagaaagagccgcagacgctcgtcatccccaagaatgcggcggaggagcagaagctcaagctggagcggctcatgaagaacccggacaaagcagttccaattccagagaaaatgagtgaatgggcacctcgacctcccccagaatttgtccgagatgtcatgggttcaagtgctggggccggcagtggagagttccacgtgtacagacatctgcgccggagagaatatcagcgacaggactacatggatgccatggctgagaagcaaaaattggatgcagagtttcagaaaagactggaaaagaataaaattgctgcagaggagcagaccgcaaagcgccggaagaagcgccagaagttaaaagagaagaaattactggcaaagaagatgaaacttgaacagaagaaacaagaaggacccggtcagcccaaggagcaggggtccagcagctctgcggaggcatctggaacagaggaggaggaggaagtgcccagtttcaccatggggcgatgacaatgtttgccacagcctctgcctggaacctggctcgtgctgtgaccagaagggaaaggcggctgtttggctctttctcccccgcaaggacccgctgacccgctggatggagagcaaaggagacccctcccgagccgctcacagtcctgtatttggcaggtttgggagcctgaggggccatctccctgacactcagaggcactgccttgcagacaccatccgtgctcctggtaaagggggacagagagcctcaccttgccacatatttgaacagtgatgagtttggggctggtttctgggaagggaacgtttatttagtaaagagcagaacacccttgcgttttgttgggacatgtggaccgtgagtcgcaaacactctggagaaggctgagatgccaccattcccacggggactgaagacacattacgtggacctggtcccaggctcagtgaggagatggcctcagctgtggggctggtccatgttgcccactcactccagtgggaagtggggaccacgccatagagggtctgctcccactgcagctcccggtgctctcgtgttctgggaaggcctgggtgtgtgcacaaggaggcccgggccagggacttcaccaggggctgggtcacaagggcacagggtgtgtggaaagcgctgtgggggaagagccggtcaccggagagtgagcaggcggagactccaagctgggctgagccagagcagaaggcgagggattcccagccggacgggggttctctcaccaacagctgtgatttcatcccgaagtggaagggggtctaaacagaacaggctgagagaggcgggactgggtcaagtgggtggagctcctccttgcatgactgcaactgtcggggctttccgccggctcacagcagttggggccagcggggagaagagaggcggaactgctgtgtcctcatgtggcgcagcctcaaactggcatccaggcactgggcccatgcagagaaggcacctgcagagagcagggcagcccggcgcaggggcatgcgcctagaatcccagctactcggaaggccaaggcaggaggaccgcttgagtccagggattcaaggccaacctgggcaatagagcgagaccctgtctcttaaaaaacgatgatgatgaacacagaggacggggcactgtgctgggagccagggggcctgggaggagccgagaccagccttttacctcggggttttgaggccaacagggacgacagagacagtttctagttagagccttggctccatttttggatgatttagccccgagttcctgagtctattttatgccccttacgtactttgatagaactaaggaaatagtggttttgagtgaagggaaaggaaacccagaaacattttacgttgcttttacttctgtagtgtagattgccccggcccctctctgagccctgtagcatctgtgatagcttctgtcccttcatcggttcatgtcacagggattttctttcccaggaagcggacacggagagtcagccctaataaatgagcacatgccctggctgtacattttgaaacctg

SEQ ID NO: 584 - DNA, 107 bp, Artificial
  cDNA Sequence
gcaccacaacaaccctgtggcactgaatggcggtagaagatggcagcctgaaatgatcttgaaggaagccattgaaaaccatcagaacatgattaagcagtttaaag

SEQ ID NO: 585 - DNA, 933 bp, Artificial
  cDNA Sequence
cccgagtcctgttgcccacacgcccgaggcgcgctggattggcggagcatggcccaggaggagggtgggagcctgcccgaggtgcgggcgcgggtcagggccgcgcatggcatccccgacctggcccaaaagctccatttctatgaccgctgggctccggactacgaccaggatgtggccaccctgctgtaccgtgcgccccgcctcgcagtggactgcctcacacaagcccttccaggcccgccccacagtgccctgatcctggacgtggcctgtggcacaggcctagtggctgccgagctgcgggctccaggcttcctccagctgcatggggtggatgggagcccagggatgctggaacaggcccaggcccccggcctctatcagcgcctcagcctctgcaccctgggccaggagcctctgcccagcccggaagggaccttcgacgcggtgctgatagtcggtgccctcagtgacggccaggtgccctgcaatgcgatacctgagctacatgtcaccaagccaggtgggctggtgtgtctgaccaccaggaccaactcgtccaaccttcaatacaaggaggctctggaggccaccctggacaggctggagcaggctgggatgtgggaaggcctggtggcctggcctgtggaccgcctgtggaccgctgggagctggctacctccgagctggaggtggtatccggcatctctgccaaggatggcttcatctccggcattgtctacctgtaccgaaagtggaaggcgacccaggttgaggaagtgagatccagcccccagcccccagctggcccctgactccatgtggccttagctgggcccatctgctgggcctcctctgcctcccctgtaaaatgggacctccgaaccaaccctgcccctcagaaatgccctgcctattaaatgagctccc

SEQ ID NO: 586 - DNA, 663 bp, Artificial
  cDNA Sequence
atgtccatgggcctggagatcacgggcaccgcgctggccgtgctgggctggctgggcaccatcgtgtgctgcgcgttgcccatgtggcgcgtgtcggccttcatcggcagcaacatcatcacgtcgcagaacatctgggagggcctgtggatgaactgcgtggtgcagagcaccggccagatgcagtgcaaggtgtacgactcgctgctggcactgccacaggaccttcaggcggcccgcgccctcatcgtggtggccatcctgctggccgccttcgggctgctagtggcgctggtgggcgcccagtgcaccaactgcgtgcaggacgacacggccaaggccaagatcaccatcgtggcaggcgtgctgttccttctcgccgccctgctcaccctcgtgccggtgtcctggtcggccaacaccattatccgggacttctacaaccccgtggtgcccgaggcgcagaagcgcgagatgggcgcgggcctgtacgtgggctgggcggccgcggcgctgcagctgctggggggcgcgctgctctgctgctcgtgtcccccacgcgagaagaagtacacggccaccaaggtcgtctactccgcgccgcgctccaccggcccgggagccagcctgggcacaggctacgaccgcaaggactacgtctaa

SEQ ID NO: 587 - DNA, 848 bp, Artificial
  cDNA Sequence
gcttctcccagctggagtaggtgggggaggccagacatggaggcccttcctccagtcagatccagccttttggggatcctgttgcaggttacgaggctctcagtgctgttggttcagaaccgagatcacctctataatttcctgctcctcaagatcaacctcttcaaccactgggtgtcagggctggcccaggaggcccgggggtcctgtaactggcaggcccacctacccctgggagctgcagcctgccccctgggccaggctctctgggctgggctggctctgatacaggtccccgtatggctggtgctacagggacccaggctgatgtgggctggcatgtggggcagcaccaagggcctgggcctggccttgctcagtgcctgggagcagctgggcctgtctgtggccatctggacagatctgtttttgtcatgtctgcacggcctgatgttggtggccttgctcttggtggtagtgacctggagggtgtgtcagaagtcccactgcttccgactgggcaggcagctcagtaaggccttgcaagtgaactgcgtggtaaggaagctcctggtacagctgagacgtctgtattggtgggtggagactatgactgccctcacctcctggcacctggcctatctcatcacctggaccacctgcctggcctcccacctgctgcaggctgcctttgagcacacgacccagctggccgaggcccaggaggttgaaccccaggaggtctcagggtcttccttgctgccctcactgtctgcgtcctcggactcagagtctggaacagttttgccagagcaagaaactcccagagaataaatgtatccccatct

SEQ ID NO: 588 - DNA, 495 bp, Artificial
  cDNA Sequence
atgtggccgaagttcaaccccagcgagatcaaagtcgtatacctgaggtgcactgggggtgaagtcagtgccacgtctgcgctgggccccaagatcggccccctggacctgtctccaaaaaaggttggtgatgacattgccaaggcaacgggtgactggaagggcctgaggattacagtgaaactgaccattgagaacagacaggcccagattgaggtggtgccttctgcttctgccctgatcatcaaagcccttaaggaaccaagagacagaaagaaacagaaaaacattaaacacagtgggaatatcacttttgatgagatcgtcaacattgctccacggatgcggcaccgatctttagccagagatctcactggaaccattaaagagatcctggggactgcccagtctgtgggctgcaatgttgatggccgccaccctcatgacatcatagatgacatcaacagtggtgctgtggaatgcccagctagttaa

SEQ ID NO: 589 - DNA, 3476 bp, Artificial
  cDNA Sequence
agcgacgcgtggagaagcggcccacgtgtctgcccagagtcaagtcctgtgttcttcccgctccttacgcatccgcggtccagggcgccctttcagccccgctggtgttcgcccaccccgggccgcgtgagtggggccccacgcagctccccgcactccgtgggccaacttggccaagcaactctgtccggggagcggtgcttgcggggggtgagtaccgggcactgcgcatgcggagctccaaattcaaacagctgttttcagaggctggagggcgggcggactggtagcagctggggctaggagaggctttctctaggaggcggccgctcgggagccatggtggaccggggccctctgctcacctcggccatcatcttctacctggccatcggggcggcgatcttcgaagtgctggaggagccacactggaaggaggccaagaaaaactactacacacagaagctgcatctgctcaaggagttcccgtgcctgggtcaggagggcctggacaagatcctagaggtggtatctgatgctgcaggacagggtgtggccatcacagggaaccagaccttcaacaactggaactggcccaatgcaatgatttttgcagcgaccgtcattaccaccattggatatggcaatgtggctcccaagacccccgccggtcgcctcttctgtgttttctatggtctcttcggggtgccgctctgcctgacgtggatcagtgccctgggcaagttcttcgggggacgtgccaagagactagggcagttccttaccaagagaggtgtgagtctgcggaaggcgcagatcacgtgcacagtcatcttcatcgtgtggggcgtcctagtccacctggtgatcccacccttcgtattcatggtgactgaggggtggaactacatcgagggcctctactactccttcatcaccatctccaccatcggcttcggtgactttgtggccggtgtgaaccccagcgccaactaccacgccctgtaccgctacttcgtggagctctggatctacttggggctggcctggctgtccctttttgtcaactggaaggtgagcatgtttgtggaagtccacaaagccattaagaagcggcggcggcgacggaaggagtcctttgagagctccccacactcccggaaggccctgcaggtgaaggggagcacagcctccaaggacgtcaacatcttcagctttctttccaagaaggaagagacctacaacgacctcatcaagcagatcgggaagaaggccatgaagacaagcgggggtggggagacgggcccgggcccagggctggggcctcaaggcggtgggctcccagcactgcccccttccctggtgcccctggtagtctactccaagaaccgggtgcccaccttggaagaggtgtcacagacactgaggagcaaaggccacgtatcaaggtccccagatgaggaggctgtggcacgggcccctgaagacagctcccctgcccccgaggtgttcatgaaccagctggaccgcatcagcgaggaatgcgagccatgggacgcccaggactaccacccactcatcttccaggacgccagcatcaccttcgtgaacacggaggctggcctctcagacgaggagacctccaagtcctcgctagaggacaacttggcaggggaggagagcccccagcagggggctgaagccaaggcgcccctgaacatgggcgagttcccctcctcctccgagtccaccttcaccagcactgagtctgagctctctgtgccttacgaacagctgatgaatgagtacaacaaggctaacagccccaagggcacatgaggcagggccggctccccaccccacctttgatggcctcttcccccctcaccctagggtgtcccgagatgaccgggacgcctggcccctggtgggggggcagcctcggaactgggagtggggggccaggggccttcctaaccttccatcatcctcagctagatgtatgcccgggacagggcctctgttctccagctgaaccataccctggctgtgggggcatctgtcctgagcttggctggtgtatctcacaatgcaaagacatgctggctggcgggacaggtgggcaggactgaccctgaggaggccttgcctgcagggtctttgtctcaccatttggtggagtatcacacggttctctgaggtctggggcctcagctgtttaagtttaccggtattactgagctcggcatttggagagggagctctgaagtgtctggggaggtaccgctgtgcgtggggtcaggtgtttccgtaccacagcaggagcagggcccgcccgcatcccagctgtgggcctgccggtcaggtcgggcacctactacaaaccgtagtggggtggaggctgctggaggtgggagtgaggagatgagggcagggtctcaaacagtcctgactcacagggcctggaaacaagtcctatgtgggcctggggcctggggtcctcatcctccttgttggtctactcaggcccagcccagagctgtgttccctgtctcaggtcaagcagtggcagacgcaaggctttctgtgggcccccaagtggtaggagggagagtagcagagcatgggttactggaagccgggactgctagggctggtggccagggagctgcaagagtgaggctcagctctggctggttctgcccttacccctcctgcccgcctgagaactgcacaccctgcccgctggccccaggacctgcactcccaatcctgctgtcttctccttccctgtgccctgaacaaggacctcactgcccgccttcccctcccaccagccccctggggctggcccactgtgtcctgaatgtttttgttattttttgttttattttttaaacaaactgctgtttttatatacctggaatctgttgttggcttcagagccagtggttaaagagcagggtcccaaggattgggagatctagtgtctgccctcctgccctgcaactcaattgggcctttttcggtgacctcatccaaggccatgatgtcaagggccatgtccccaagcagaggtggagaaggggacactgaggtgagcaaaagcaggaaggggcatccactgcgggtgactggaggccgggcaggaagcaagtcatcagagccgctcagctccgttcactctctgccttctgccccactactgtggggcagtggggccagagcccacctccccaacatgtgaagacagtgatgggcacgtgcccacacccccacttctctagccgtttgcagaggccgccacccagcaggggcctgaaaaggagcagcctcgtatttttctgtgaaatgttttaatgaaccatgttgttgctggttgtcctggcatcgcgcacactgtatgtacatactggcaacgatgtcaaatgtaatttattttaacatttttacaataaaacatgaggtggacaggc

SEQ ID NO: 590 - DNA, 2638 bp, Artificial
  cDNA Sequence
cgctcggcgccccggccgggccactgggccacaggccacgcggccacgcagtccgagcgggagccgagccgggcggggcgagggcagctccggaacgtcccagggatggaagtgcttggatgcggtgctgctggctgcggatgtgcgcaaggagatgggatggagagcctgagttggcattcgtataaatgacctgcctggctcccaccatgagtgctgagcttaacgtgcctatcgacccctctgctcctgcctgccctgagcccggccataagggcatggattaccgggactgggtccgccgcagctacctggaactggtcacctctaaccaccactcggtacaggccctgtcgtggcggaagctctacctgagcagggccaagctgaaggcctccagcaggacctccgccctcctctccggctttgccatggtggccatggtggaggtgcagctggagacgcagtaccagtacccgcggccgctgctgattgccttcagcgcctgcaccacggtgctggtggccgtgcacctgttcgccctcctcatcagcacctgcatcctgcccaatgtggaggccgtgagcaacatccacaacctgaactccatcagcgagtccccgcatgagcgcatgcacccctacatcgagctggcctggggcttctccaccgtgcttggcatcctactcttcctggccgaggtggtgctgctctgctggatcaagttcctccccgtggatgcccggcgccagcctggccccccacctggccctgggagtcacacgggctggcaggccgccctggtgtccaccatcatcatggtgcccgtgggcctcatcttcgtggtcttcaccatccacttctaccgctccctggtgcgccacaaaacggagcgccacaaccgcgagatcgaggagctccacaagctcaaggtccagctggacgggcatgagcgcagcctgcaggtcttgtgaggggccgagggccggggctgggagcggccctgtgcccgggagtccgcagaggcggggatttgtcagatgcagacattttgcaaggctgccgggtagttcaagaccaaagttttcctcttgtcttaataccataaggactggatgacttctcctgagatagaaccgtttggttcaatgagggactgtgttgctaagagcgttgggggcaaagccaggctggttccttggcctcggggtttcctgggtcggggacacggtgaagaggctccagcgggacctgcccatcagtcctgggccaggaggggctccaagcagcacccagcggtccgggggagtctcagacccggcatgcgtggctggcagacctgggagagccagggcagggttttgcgttcagagaaggattgccccagagacccgtggtggacttcatgggtgctgagtggcccgtgtgacagtgatgacacgaaggcttcggcgtttgagtgggtgcaggtgcacgccagggcttggtgcttccctgcctggccctggagggagctgggtggcctggcttcaggggaagacaggagccaggacacacgtcagcccagcaggtgtggggggtgctgcagccctcggcagtggggtcaggccctgggggatgtttccaatggtgggcagcctggccaggccggagaagacatgttcacgggcatctatcagatgcccccttgaggaggctgagttatttgagggctgctgcaaagtacgctaggctcaaattctcttttcccagccagagccctggccacacggactcagaggggccaccggggtggggaaaggacccctcccccaccccccgcagccactggcctccagctctcggccacagaatggcctctaaggctgactcagccactcccttgggctgtggcagcaggaggcgggggctctggctcaggccccggagcctgtgcagcttgcccatggccctaggcagcgaggggacagcctgggggacttcctgcctaggcaaggtcattggccgggcctggcctgtggatagtggggccaggggccggcccaggccaaatgagtgccctccttgttatgacaccaagtgactacaagggaggcaagacccctccaggcctctcagccgacactgggtcccaccacacacagtgactgtgccgtgcagtgcaggttctggccttttccttgaaggcatctggtagacccgaagccacgctctcgggccgcacatgcacgccgcagcaccagctgccctgagctgcttgtacaaccaaacacctttcccctcttctccagctgtaacctggagagtcagccatgccttgtcttttgttctcataaatagtcactggggccgggcgcagtgactcacgcctgtaatcccagcactttgggaggcctaggtgggcggatcacttgaggtcaggagttcgagaccagcctggccaacatggtgaaaccctgtctctactaaaaaaatacagaaaattagctgggcgtggtggcgggcgcctgtagccccagctacttgggaggctgaggcgggagaatggcaatggcgtgaacccgggaggcagagcttgcagtgagctgagatggcgccactgcactccagcctgggcgacagagccagactccatctc

SEQ ID NO: 591 - DNA, 741 bp, Artificial
  cDNA Sequence
atgaacgcccctccagccttcgagtcgttcttgctcttcgagggcgagaagaagatcaccattaacaaggacaccaaggtacccaatgcctgtttattcaccatcaacaaagaagaccacacactgggaaacatcattaaatcacaactcctaaaagacccgcaagtgctatttgctggctacaaagtcccccaccccttggagcacaagatcatcatccgagtgcagaccacgccggactacagcccccaggaagcctttaccaacgccatcaccgacctcatcagtgagctgtccctgctggaggagcgctttcgggtgagggcggggcctggaggggcagacggggtgggctggacactggcccgtgtgcccaggcctgggacagccctggcctgtttcttcggaggtcctgggggagaggcggcagtgatggaagagcagggacttccaccacaggctccaggacatgtggactgaggggctgtggagtctgggcctgtggctcccgtctgccccatgggacttctgtagtgctgcagggtccctcgggtgctgtgggccagatcggggcggggacctactgtcctttgggggtgctcttctacgtcccttgttggtgattggcaaggcctggtccttccaggtctctgggaggcagctcacccccgggtggcccacacctgttcctggcagggcgcatgggaatctagaacagtttagaggggaaagagccacagc

SEQ ID NO: 592 - DNA, 597 bp, Artificial
  cDNA Sequence
ggtggcggcggcggcggacccttggggtctggacgcaacggcggcgggagcatgaacgcccctccagccttcgagtcgttcttgctcttcgagggcgagaagaagatcaccattaacaaggacaccaaggtacccaatgcctgtttattcaccatcaacaaagaagaccacacactgggaaacatcattaaatcacaactcctaaaagacccgcaagtgctatttgctggctacaaagtcccccaccccttggagcacaagatcatcatccgagtgcagaccacgccggactacagcccccaggaagcctttaccaacgccatcaccgacctcatcagtgagctgtccctgctggaggagcgctttcgggtggccataaaagacaagcaggaaggaattgagtaggggccagagggggctctgctcggcctgtgagccccgttcctacctgtgcctgaccctccgctccaggtaccacaccgaggagagcggccggtcccagccatggcccgccttgtggccacccctcaccctgacaccgacgtgtcctgtacatagattaggttttatattcctaataaagtatagcgggagaga

SEQ ID NO: 593 - DNA, 2043 bp, Artificial
  cDNA Sequence
gcgcgatggcggcggctgccgccgagacccccgaagtccttcgggaatgcggttgcaagggcatccggacctgtctgatctgcgagcggcagcgcggcagtgacccgccctgggagctgcccccagcgaaaacataccgtttcatttactgctccgacaccggctgggccgtgggcacagaggagtctgactttgagggctgggccttccccttcccaggagtgatgctgatcgaggactttgtgacccgggaggaagaagccgagttggtgcggctcatggaccgtgacccctggaagctctcccagtctggacggaggaagcaggactatggccccaaagtcaactttcggaaacagaagctaaagaccgagggcttctgcggcctccccagcttcagccgggaggtggtgcggaggatgggcctctacccggggctggagggcttccggcccgtcgagcagtgcaacctggactactgccccgagcggggctctgccattgacccccacctggacgacgcctggctgtggggggagcggctggtcagcctcaacctcctgtcccccaccgtgctgtccatgtgtcgggaggcgcccgggagcctgctcctctgctcggccccgtcggctgccccggaggccttggtggacagcgtgatagcacccagccggtcggtgctatgccaggaggtggaggtggccatccccttacccgcccgctccctgctggtcctcaccggggcggcacggcaccagtggaagcatgccatccaccgcagacacatcgaggcccgccgcgtctgcgtcactttccgggagctgtcggctgagtttggccctggagggaggcagcaagagctgggccaggaactgctgcggatcgccctctccttccagggaagacccgtgtgaaccgcctccttggctccagacttgactgatcccgggattgaaatgaggagcacagaacagggcctcctgcaactcacggggtttcaagagaagatggctgacccctgatgctgtgagcagtgtgagccctgcccaggagcaggttttgatgggaacgtacctccaggcagcccccttccacctggaccgtggccacacttttttggttatttagtttgtcacagtcttggggacatgggatcatttgagcttaaaaaatactgggggccgggcacagtggctcacacctgtaatcctaacactttgggaggctgaggtgggcggatcacttgatgccaggagttcgagaccagcctggccaacacggtgaaaacccgtctctacaaaaactacaaaaattagccgggtgtggtgactcacagccgtaatcccagctactcgggaggctaaggtgggagaattgcttgaacctgggaggcggaggttgcagtgagccaagatcacgccactgcactccagcctcggtgacagagcaagactgttttgaaaaaaaaaaaaaatgggaacattttaaatgattttcacctttattatgcatctattttcatggggtttcccgatatctcactgtccagtcccttcatttggggaatgtgttggattagggaacagggttgaagatttgaagtttagactaaagagctgggaacagcttcagagtcaggctcagcctgactcatgcttgacacccccacgcccagggagggttgggggatgtgaggagggcagggaaatctgagagcctccttccagccccataacgctgttaacaagtaggaaaaattaaagctcccggccaggcgcggtgactcacacctgtaatccgagtactttgcggggctcaggtgggaggattgcttgaggccagcctgggcaacatagtgagacccccatctctacaaaaaatacaaacattagctgggcgtctgggcatggtggcacacacctgtagtcccagctactcgaaaggctgaggcgggaggatggctttaccaccatgtcaaggctgcagtgagctcatgatcataccactgcacttaacttggcaacagagcaagaccctgtccct

SEQ ID NO: 594 - DNA, 2204 bp, Artificial
  cDNA Sequence
ccttccggtcgttaacgcccacgggctcgcgcggcgccgcctcctgggctcagttaccgcggacgccagtgccgggctccaggagacgcagggcgacgccacacgccggggtggccgactgggtcagcgcgggctgcgcctcctcgccatgggccccctctcggcgcggctgctaatgcagcgcgggcgccccaagagcgaccggctggggaagatccggagtctggacctgtcaggattggagctgctttccgagcacctggaccccaaactcctgtgccgcctgacgcagctgcaggagcttgacctgtctaacaaccacctggagacgctgccggacaacctgggcctgtcccacctgcgtgtcctccgctgcgccaacaaccagctgggggatgttactgccttgtgccagttccccaagctcgaggaactcagcctggagggcaaccccttcctgacggtcaatgacaacctgaaagtctcctttctcctgcccacgctccgtaaggtcaatggcaaggatgcgtcctcaacttactctcaggtggagaacctgaatcgggagctgaccagcagggtcacagctcactgggagaagttcatggccacactgggtcctgaagaggaggctgagaaggcccaggcggactttgtgaagtcggctgtcagggatgtccgctacgggcccgagtccctcagcgagttcacccagtggcgggtgcggatgatctctgaggagctggtggccgccagtaggacccaggtgcaaaaggctaacagcccagagaagcccccagaagctggagctgcccacaagcccagggccagactggcggccttgaaacggccagacgacgtcccactcagcctctctcccagcaagcgggcgtgtgcctccccgtcggcccaggtggagggcagccctgtggcaggctccgatggcagccagcctgctgtgaagctggagcccctgcacttcctgcagtgccacagcaagaacaacagcccccaggacctcgagacccagctgtgggcctgtgccttcgagccggcctgggaggagggggccacatcccagaccgtggccacgtgcggcggggaggctgtgtgcgtaattgattgccagacgggcatcgtgctccacaagtacaaggcacccggcgaggagttcttttctgtggcctggaccgctctgatggtggtcacacaggctggccacaagaagcgctggagtgtgctggcggctgcaggcctacggggcctggtccggctgctgcacgtgcgtgccggcttctgctgcggggtcatccgagcccacaagaaggccatcgccaccctgtgcttcagccccgcccacgagacccatctcttcacggcctcctatgacaagcggatcatcctctgggacatcggggtgcccaaccaggactacgaattccaggccagccagctgctcacactggacaccacctctatccccctgcgcctctgccctgtcgcctcctgcccggacgcccgcctgctggccggctgcgagggcggctgctgctgctgggacgtgcggctggaccagccccaaaagaggagggtgtgtgaagtggaattcgtcttctctgagggctccgaggcatctggacggagagtggatgggctggcatttgtgaatgaggacatcgtggcctccaaggggagcggcctgggcaccatctgcctgtggagctggaggcagacgtgggggggccggggcagccagtccacggtggcagtggtggtcctggcgcggctgcaatggtcgtccaccgagttggcctacttctcgctcagcgcctgccctgataaggggattgtgctctgtggggatgaggagggcaacgtgtggctctacgacgtcagcaacatcctgaagcagccacccctgctgccggcagccctgcaggcccccacacagatcctgaagtggccccagccctgggcccttggccaggtggtgaccaagaccatggtgaacacagtggtggccaatgcctccttcacctacctcaccgccctgacggactccaacatcgtagccatctgggggaggatgtagcctcacaccatcgcaaaggaccagggacacagctaactaacttattcagctttgggccgatgggggtgggggggggtctttcagtgaatatttttattaaactctactgtgg

SEQ ID NO: 595 - DNA, 726 bp, Artificial
  cDNA Sequence
cagtcccagctgctagtgtcgctgttgctgctactgacccgtgtccagcctgggacagacgtggagcacatcagctatgtgccccagctctcaaacgacaccttggcggggaggctcaccctgtccaccttcacgctggagcagcctctaggccagttcagcagccacaacatctctgacttggataccatctggctggtggtggccctcagcaacgccacccagagcttcacggccccacggacaaaccaggacatccctgctcctgccaacttctcccagaggggctactatctcacactgagggccaaccgggtgctgtaccagaccagaggccagctccatgtcctccgcgtcggcaatgatacccactgccaaccaacaaaaattggctgcaaccatcccctaccaggacccggcccctacagggtgaagttcctggtgatgaatgacgaaggacccgtggctgaaacaaagtggtccagcgacactcgcctgcagcaagcccaggcacttcgggctgtccccggcccccagagcccgggcaccgtggtcatcatcgccatcctgtctatcctcctggccgtcctcctcacggtcctcctggctgtgctcatatacacctgctgcaggagcacttccctatcaggcccagaggaggcagggagtgtgagaagatacaccacgcacctcgcgttcagcactcctgccgagggggcttcctga

SEQ ID NO: 596 - DNA, 5560 bp, Artificial
  cDNA Sequence
ggaccccggtgtctggcttcccccgagccggcaccccgcgatggccaagcgcagctcgctgtacatccgcatcgtggaggggaagaaccttcccgccaaggacatcactggcagcagcgacccctactgcatcgtgaaggtggacaatgagcccatcatcaggacagccacagtgtggaagaccctgtgccccttctggggtgaggagtaccaagtgcacctgccgcccaccttccacgctgtggctttctatgtcatggatgaggatgccctcagccgggacgacgttatcggaaaggtctgccttacaagggacaccatagcctctcaccctaagggtttcagcgggtgggcccacctgacagaggtcgaccccgacgaggaggtgcagggcgagatccacctgcggctggaagtgtggccaggggcccgggcctgccggctacgctgctctgtgctggaggccagggatctggccccaaaggaccgcaatggcacatctgaccccttcgtccgagtgcgctacaagggccggacacgggagacctcgatcgtgaagaagtcatgctacccacgctggaatgagacgtttgaatttgagctgcaggagggggccatggaggcgctgtgcgtggaggcctgggactgggaccttgtcagccgaaacgacttcctgggcaaagtggtgattgatgtccagagactgcgggtggtgcagcaggaggagggctggttccggctgcagcccgaccagtccaagagccggcggcatgacgagggcaacctgggctccttgcagctggaggtgcggctgcgggacgagacggtgctgccctccagctactaccagccactggtgcacctgctgtgccacgaggtcaagctgggcatgcagggcccagggcagctgatcccactcatcgaggagacaaccagcaccgagtgtcgccaggacgtggccacgaacctgctcaagctcttcctggggcaggggctggccaaggacttcctggacctgctcttccagctggagctgagtcgcaccagtgagaccaacaccctgttccggagcaactctctggcctcaaagtccgtggagtcttttctgaaggtggccgggatgcagtacctgcacggcgtcctgggccccatcatcaacaaggtgtttgaggagaagaagtacgtggagctggaccccagcaaagtggaagttaaggatgtagggtgctccgggctgcaccgcccgcagaccgaggccgaggtgctggagcagagcgcgcagacgctgcgcgcccacctgggggccctgctgagcgcgctcagccgctcggttcgcgcgtgccccgccgtggtgcgcgccaccttccgccagctcttccggcgcgtgcgcgagcgcttccccggcgcccagcacgagaatgtaccgttcatcgccgtcaccagcttcctgtgcctgcgcttcttctctcccgccatcatgtcgcccaagctcttccacctgcgggagcgccacgcggacgcccgcaccagccgcaccctgctcctgttggccaaggcagtccagaacgtgggcaacatggacacgccggcttccagggccaaggaggcttggatggagccgctgcagcccaccgtgcaccagggcgtggcgcagctgaaggacttcatcaccaagctcgtggacatcgaggagaaggacgagctggacctgcagcggacgctgagtttgcaggcgccacctgtgaaggaggggccactcttcatccacaggaccaagggcaagggccccctcatgtcctcctccttcaagaagctctacttctccctcactaccgaggccctcagcttcgcgaagacgcccagctccaagaaaagcgccctcatcaagttagccaacatccgggcagcggaaaaggttgaggaaaagagctttggcggctcgcacgtcatgcaggtcatctacacggacgacgccggcaggccccagactgcctacctgcagtgcaagtgtgtgaatgagcttaaccagtggctgtctgcgctgcggaaggtgagcatcaacaacaccggactgctgggctcctaccaccctggcgtcttccgtggggacaagtggagctgctgccaccaaaaagagaagacaggtcagggctgcgataagacccggtcacgggtgaccctgcaggagtggaatgaccctcttgaccatgaccttgaggcccagctcatctaccggcacctgctgggcgtggaggccatgctgtgggagaggcaccgggagctgagcgggggcgcagaggcaggcacggtgcccacgagccctggcaaagtccccgaggactcattggcccggctgctccgggtgctgcaggacctccgcgaggcccatagctccagcccggccggctccccaccctcagagcccaactgcctcctggagctgcagacgtgaggcccgccctacgctccccttgctgagtcccctgccaagcgctcggagcccccccaggacactctgcaccccctcaccccggtcctcctcattagggtgcagggcctaggtctcttccaggtgggggaggggggagagtcaggaataaggggatccccagaagtgcagagctgagcaggcttgggcctgtcatggctggccggaagtgtccccagctccctacagacgctgtagccatcactgcctctccagggaccctcctctcctgcccaggacagacccagccagaaccactgctaggatgggccgcacccaggggtctggcctccagggacctagagaatgggagggagaacggggccccaggagacccggccgccaccccacccgctacccttgggtgccacagggctgtgctgttgccaacagtaaacctgctcttactgtccaggctctggggtcttgtgatgagggtctggggagaaagtgggcccggggggaccccggaggctgtcggtggatgtgccgatgatggggctgacagtatgggctctgggcatccctgttcccccctctttcttccccccactcttctggggtcgggggttcctttcccttcccagttgctgtccctgggtcccctctttcatgtcccacaggccacagagcccagtgtgtccaaccagctgttctctcctcaaagcagcccccaagcaagtcccttctctagggtgtccctgaggacagcacagaggcgggactcagagaccccattcctcttcacgcagcccttaccccaagccctctagctgtgtggctggcagtgttggccacgtaggggctcccatccccccaccattgtgtcacatgggctgccaggctcagctcccagctgcgtccacagtgacctggatcagggtggggacaaggactggaccctccttctccagaaggccttcagctcttgccttgccatgcagtcacctccttccccctctgaccccagatcccaaaggtgcaccgttgccccagcccctttctggccccatggggtttctctgatgccttcatcatagaggcccggggctggtccgatggttggcaaaacttgactccggcccagtccccactcttggggacttagaacccctgctgtcctgggatctggcctgcctttctttggtcagtccctgtggtcccccaccagctccccctcccatagggctgcccaccaagccctgcccccagcccaagaggagcccccactgcctgcggggcagtgatgtctggccaccggctcacaccaatgacttggtcctggggtggcagaagcagcaggtgacaggagcagggcccctgtccctctcttctggccctgtggtacccaggccacacgttgtgcccgctcttggggctgaccggctgcagggaccaccagccgctgctactgtgggccgccccggggcagggtgggcagggcttttgtgggttatgaggacacagaagtccctgaggcccccagacctggctcagccaacctccttcctcccccggttgccccccactctaaagcctcctccctcccagcgtccactggctccaggctcctcacaacagcagctcatagacacggggcatctccaggtggtcctagccctccagatgtttctagctctccaggtgggcgctgttttcacgtctgcctgcatccattcattccttcattcctcacctttatcctgttatctctatttttttaagctaccaggaaggaaagggaagaagagatcacgaaactgggacccccagaagggaggagtgggctttgaacttagacatctacctcagagctcaaataggttgtttaaaatcacattcaattttcagatgaaggggaactttataattttttttttttttttttttgagacagagtctcactgtgttgcccaggctggagtgcaaatggcttgatcttggttcactgcaacctctgcctcccaggttcaagcaattctcttgcctcagcctcccgagtagctgggactaaaggcgtgtgccaccatgcccagctaattcttgtatttttagtagagacggagtttctccatgttggccagactggtctcgaactcctgacctcaggtgatctgaccgccttggcctccgaaagtgctgagattacagttgcgagccactgtgcgtggccagaactttataataagagacttgaagctgggtgtgacggtgcacacctctagtcccagctactcgggaggccaagacagaaggatcaccttgaggccaggagtttaaggccagcctgggcaacatagcaaaacctagtccctaaaattaaaaaaaaaaaaaaaaaaaagggaaaataaaggagacttgaaatttttgaactaaatagtggtgatggctacacattgtgaatgtaattaacaccactgagttaaacacttaaaatggttaaaatggcaaattgtatgttatacctattttactacaataaaaagtataaaaaagagaagatatttaaccaattgcaacaaaacaaaatgttaagaaatgatctttttatgaggcaattggaaatttgaacactaatcaactataggatgattggaattattaattttgtaaaggtgtgataagatactgcacttggctgggcacagtggcacatgcctgtaatcccagctacttggcaggctgaggtgggagaatcgcttgagctcaggagttcgagaccagcctgggcaacgtggcgaaatccccgtctttacaaaaacaaacaaacaaacaaaaaagatattgcagttgtgttgtaagcgtccttatctttcagagctacatagtggaatgtttatggaatatttaggataaatgatataggcatttgggatttgctgcaaaatgacccagaggcaggggtcagggggagaggtagagatgagacaagaggtagaggggagaggtagaggtagccacgagctgataattacagacaagagatgcggagtatgtgggggctcattatcctgcatagtctatctttgtatatctttgaacttttcaagaataaaaaagcttaaaaagtat

SEQ ID NO: 597 - DNA, 1512 bp, Artificial
  cDNA Sequence
ccctgctggggtgagcagcactgtaaagatgaagctggctaactggtactggctgagctcagctgttcttgccacttacggttttttggttgtggcaaacaatgaaacagaggaaattaaagatgaaagagcaaaggatgtctgcccagtgagactagaaagcagagggaaatgcgaagaggcaggggagtgcccctaccaggtaagcctgccccccttgactattcagctcccgaagcaattcagcaggatcgaggaggtgttcaaagaagtccaaaacctcaaggaaatcgtaaatagtctaaagaaatcttgccaagactgcaagctgcaggctgatgacaacggagacccaggcagaaacggactgttgttacccagtacaggagccccgggagaggttggtgataacagagttagagaattagagagtgaggttaacaagctgtcctctgagctaaagaatgccaaagaggagatcaatgtacttcatggtcgcctggagaagctgaatcttgtaaatatgaacaacatagaaaattatgttgacagcaaagtggcaaatctaacatttgttgtcaatagtttggatggcaaatgttcaaagtgtcccagccaagaacaaatacagtcacgtccagttcaacatctaatatataaagattgctctgactactacgcaataggcaaaagaagcagtgagacctacagagttacacctgatcccaaaaatagtagctttgaagtttactgtgacatggagaccatggggggaggctggacagtgctgcaggcacgtctcgatgggagcaccaacttcaccagaacatggcaagactacaaagcaggctttggaaacctcagaagggaattttggctggggaacgataaaattcatcttctgaccaagagtaaggaaatgattctgagaatagatcttgaagactttaatggtgtcgaactatatgccttgtatgatcagttttatgtggctaatgagtttctcaaatatcgtttacacgttggtaactataatggcacagctggagatgcattacgtttcaacaaacattacaaccacgatctgaagtttttcaccactccagataaagacaatgatcgatatccttctgggaactgtgggctgtactacagttcaggctggtggtttgatgcatgtctttctgcaaacttaaatggcaaatattatcaccaaaaatacagaggtgtccgtaatgggattttctggggtacctggcctggtgtaagtgaggcacaccctggtggctacaagtcctccttcaaagaggctaagatgatgatcagacccaagcactttaagccataaatcactctgttcattcctccaggtattcgttatctaatagggcaattaattccttcagcactttagaatatgccttgtttcatatttttcatagctaaaaaatgatgtctgacggctaggttcttatgctacacagcatttgaaataaagctgaaaaacaatgc

SEQ ID NO: 598 - DNA, 607 bp, Artificial
  cDNA Sequence
gcgcacatagcgacttggtgggcgcgtccagtgatgactgggggatcccggcaagtaacatgactaaaaagaagcgggagaatctgggcgtcgctctagagatcgatgggctagaggagaagctgtcccagtgtcggagagacctggaggccgtgaactccagactccacagccgggagctgagcccagaggccaggaggtccctggagaaggagaaaaacagcctaatgaacaaagcctccaactacgagaaggaactgaagtttcttcggcaagagaaccggaagaacatgctgctctctgtggccatctttatcctcctgacgctcgtctatgcctactggaccatgtgagcctggcacttccccacaaccagcacaggcttccacttggccccttgatcaggatcaagcaggcacttcaagcctcaataggaccaaggtgctggggtgttcccctcccaacctagtgttcaagcatggcttcctggcggcccaggccttgcctccctggcctgctggggggttccgggtctccagaaggacatggtgctggtccctcccttagcccaagggagaggcaataaagaacacaaagctgttcccgt

SEQ ID NO: 599 - DNA, 4016 bp, Artificial
  cDNA Sequence
gcgcgacggtgcggctggcggacccgggctggcttgtggggaaacgaaactgagggaggaggcggcggctctggcagcggcggcgacagtgtcggcctgaccccccctccgctccccggcagctcgctctctcccctcagcttaacgatgaagaggagaactgacccagaatgcactgcccccatcaagaaacagaaaaaaagagttgcagagcttgccctgagcctcagctccacgtccgatgatgaacctccctcctctgtcagtcatggagcaaaagcatctactacaagccttagtgggtctgatagtgagaccgaggggaaacaacacagctctgactcttttgacgatgcattcaaagcagactctcttgtggaaggaacttcttctcgctattccatgtataatagcgtctcccagaagcttatggccaagatgggcttcagggaaggtgaaggattgggtaaatacagccagggtcggaaggacatcgttgaggcttccagtcagaaaggtcgaagaggcttgggtctgacactccggggctttgaccaggagctgaacgtggactggcgagatgagccagagcccagtgcttgtgagcaggtgtcatggtttccagaatgtaccactgaaattcctgacactcaggaaatgagcgattggatggtggtgggaaagagaaagatgattattgaagatgaaacagagttttgtggggaagagctgcttcacagtgtgttgcagtgtaagagcgtgtttgatgtcttggatggggaagagatgcggcgagctcggactcgggccaatccctatgagatgatccgaggagtcttctttctaaacagggcagcaatgaagatggctaacatggattttgtatttgatcgcatgttcacaaatccgcgggactcttatgggaagccactggtgaaggaccgggaagctgagcttctgtactttgctgatgtctgcgcaggcccaggtggcttctcagagtatgtgctgtggaggaagaagtggcatgcaaagggctttggaatgactttgaagggccctaatgacttcaagctggaggacttctactctgcttccagtgaactcttcgaaccctactatggtgagggtgggattgatggagatggagatatcacccgcccagagaacatctctgcttttcggaattttgtcctggataacacagatcgcaagggtgtccattttctgatggctgatgggggtttctcggtggaggggcaggagaacctgcaggagatcctcagcaagcagctgcttctgtgtcagttcctcatggcgctgtccattgtccggacaggaggccacttcatctgtaaaacctttgacctgttcacaccgtttagtgtggggcttgtctacctgctgtactgctgctttgaacgagtttgtctcttcaagcctattaccagccgtcctgccaactcagagaggtatgtggtgtgcaagggcctgaaggtgggcatagatgatgttcgggattacctcttcgcagtgaatattaaactcaatcagctgcggaacacggattccgacgtcaacttggtggtccccctggaggtgatcaagggagaccatgaatttactgactacatgatacggtccaatgagagccactgtagtctgcagatcaaagctctggcgaaaatccatgcctttgttcaagacacgacactgagtgagcctcgacaggcagagatacggaaggagtgcctccgactctgggggatcccagaccaggctcgtgtggctccttcttcctccgaccctaaatcgaagttctttgagctaatccagggcactgagattgacatcttcagctacaagcccacactgctcacctctaaaaccctggagaagatccgccctgtgtttgactaccgctgcatggtatctggcagtgagcagaagttcctcatcggcctggggaaatcccagatctacacatgggatggccgccagtcagaccgctggatcaagctagacctgaagacagagctgccccgggacactctgctatctgtggaaattgtgcatgagctgaaaggggaggggaaggcccagaggaagatcagtgccatccacatcctcgatgtccttgtgctgaatggcaccgacgttcgggagcagcactttaaccagcgaattcagcttgccgagaaatttgtgaaagccgtttccaagcctagtcggcccgacatgaatcccatcagggtgaaggaggtgtacagactggaagagatggagaagatttttgtcaggttggagatgaagatcatcaagggctccagtggcaccccaaagctcagctacacagggcgtgatgaccggcactttgtacccatgggcctctacatcgtcaggacagtgaatgagccctggactatgggattcagcaaaagcttcaagaagaagttcttctacaacaagaaaaccaaggactctacttttgacctccctgcagactccattgccccatttcacatttgctactatggccggctcttctgggagtggggggatggcattcgtgtgcatgactcccagaagccccaggaccaggacaagctgtccaaggaggacgtcctctccttcatccagatgcacagggcctaagagcctcagaatgtgccacccctgcagaatgccctgtcattcctgagatggggccacctggggcccacagtgctggcttcttccccctcttgaaaagggactggggagcattgcacctggcatgaggagtgggtggcctcctctccatcccctgaagagctcaggcagggccctgcagagaacactcatgttccttctgggacacctgcctgggaactttcccctgccaggactcagcctgaaggaagctgctcctgaggcaggtatgaggtcagtgcctagggcacgtgggactgatggaggacatatcagagtggcagagctgtgggctctgctgttctctcctgcatcctgtagactcacttttctgagttccatgcactgccctgagggtagccatgcccttgctttgcccaactttttattgggccatccctgagtgggtggagacctgctgtcatgagctggccaggagaacctgctataaaaaaatcaaggttttgtttctttgaacttactctgttttgatgccaaattggagaccattttcttgtctccttcccccactcatcctggccttccctggagttcttcctagcccagagctctgacagtccagcagggtgggaaggagggagtttgggcaaactctcatccctgataccacattgagatcctgggagccctcttttcgtactgagtatggagttgtagagccatcctaggtgccatccccttttggtccaaacattgggcagcgctagatggcaggaagcagccttgaagacccgtctttcccccacagcagcaggggccccagcagtaacaaagggtacctccaggggtttgggtagcgctgccctctggcagtcatgcaccgctgtctgccatagccgctctagggtcttggcagaattctgagcttgaagtgcagctcccttactaccctttcccttcctttttcttccctaataggaggtacaatctgcttttgtttgtcgttaagtggtcactcccatttcctttatcttggccgacaacacagagaggagggggagctgggcagtagcttggggtgggggtgggcacctgtggttgtttttaatgggaaatacctctcagagatgttcatgcaggctccctagggccccatcccagtgccaggctggtttccatggagatagggcactgaggctcccgtgaggttggaatcgacttcaccatgggggtccttcagccagcatccagctccccacccccaggctggcagtagcactgctgagatgctgtatttccacccaattctgggtatatcagtgtgtcttgcagaatcttggatcattaaagataaacatattttt

SEQ ID NO: 600 - DNA, 2497 bp, Artificial
  cDNA Sequence
acagattcatgggtgatttagcctatctgtcccaggccagcgtggctgagtgtgctggctggaggcctctctctctgcttcgagggtagctgagatccaccccggaaaccggcaggatgaagggggcaagtgaggagaagctggcatctgtgtccaacctggtcactgtgtttgagaatagcaggaccccagaagcagcacccagaggccagaggctagaggacgtgcatcaccgccctgagtgcaggcctcccgagtccccaggaccacgggagaagacgaatgtcggggaggccgtggggtctgagcccaggacagtcagcaggaggtacctgaactccctgaagaacaagctgtccagcgaagcctggaggaaatcttgccagcctgtgaccctctcaggatcggggacgcaggagccagagaagaagatcgtccaggagctgctggagacagagcaggcctatgtggcgcgcctccacctgctagaccaggccatgagtgacctgtcgtggcggctacaggtgtttttccaggagctgctgaagacagcccgcagcagcaaggccttcccagaggatgtggtcagggtcatcttctccaacatctcctccatctatcagttccattctcagttcttcctcccagagctgcagcggcgcctggacgactggacagctaacccccgcatcggtgacgtgatccagaagctggcccccttcctgaagatgtacagtgagtatgtcaagaactttgagcgagcggctgagctgctggccacctggaccgacaagtctccactcttccaggaggttctcactcgcatccagagcagcgaggcttcgggcagcctgaccctgcagcaccacatgctggaaccagtgcagagaattccacgttacgagctgctgctcaaggagtacatccagaagctgccagcccaggccccagaccaggccgatgcccagaaagccctggacatgatcttctcagctgcccagcactccaatgcagccatcactgagatggagcggctgcaggacctgtgggaggtgtaccagcgcctgggcctcgaggacgacatagtagacccctctaacaccctgctccgtgagggcccggtcctcaagatctccttccgccgcaacgaccccatggagcgctaccttttcttgttcaacaacatgctgctctactgtgtgcccagggtgatccaggtgggcgcccagttccaggtgaggacccgcatcgatgtggccgggatgaaggtgcgggagctgatggatgctgagtttccccactccttcctggtgtccgggaagcagcgcaccctggagctgcaagcccggtcccaggaggaaatgatttcctggatgcaggccttccaagcagccattgaccaaatcgagaagcggaatgaaaccttcaaggctgcggcccaggggcctgagggagacatccaggagcaggagctgcagtctgaggagctgggcctccgggcaccgcagtgggtccgggacaagatggtgaccatgtgcatgcgctgccaggagcccttcaacgctctgacgcgccgtcgccaccactgccgggcctgcggctatgtggtgtgtgccaggtgctccgactaccgggccgaactgaaatacgacgacaacaggcccaaccgagtctgcctccactgctacgcattcctcactggaaatgtgctgcctgaggccaaggaggacaagaggcggggcatcctggagaaagggtcctcagccacgcctgaccagagcctgatgtgcagcttcctgcagctcatcggggacaagtggggcaagagcggcccccggggctggtgtgtgatccctcgggatgaccccctcgtgctctatgtctatgctgcccctcaggacatgagggctcacacctccatccccctgctgggctaccaggtgactgttgggccccagggggaccctcgggtcttccagctacagcagtcaggccagctctacaccttcaaggccgagacggaggagctgaagggccgctgggtgaaggccatggagcgggcggccagtggctggagccccagctggcccaacgatggggacctgtccgactgagccactgccagccgctctcctgcccacctctccccaccctgaacccagctcctgccacagactgaccctgtggcctcagtgacccactgccccaagtggtgctttcagagaattgattcagccatctgcgcccaggccacgtgtcccgatctgggattagaaaatatgggtccattcctttctagaaaggggacaaccaagtgtctcagtttgccttgcggggagggggctcctgggccatgggacttccagtgctaaaactgggaaagccccaggtaaccccggactggtggtcaccatagtatggtttttcatttgtatctcctggggagcttttaaagagtactggtgaaaaacacatagtaaattaattttaaaaatgt

SEQ ID NO: 601 - DNA, 524 bp, Artificial
  cDNA Sequence
aaatggcggcagttggtgtgttctcggtttctcggctgctgggtcggtcccgcccacagctggggcggcctatgtcgagtggcgcccatggagaagagggctcagctcgcatgtggaagaccctcaccttcttcgtcgcgctccccggggtggcagtcagcatgctgaatgtgtacctgaagtcgcaccacggagagcacgagagacccgagttcatcgcctacccccatctccgcatcaggaccaagccgtttccctggggagatggtaaccatactctattccataaccctcatgtgaatccacttccaactggctacgaagatgaataaagagaatctggaccactacccgggcaccagggaccacagcactggtttggaccattactctgcacatggaccagaaaaagtatatgggaccttaagctcaccttctttacttgtatcaaatgatgactggtatactggtctcccatccctttgcttgtggcgggagatggcttaaataaataacttaaactt

SEQ ID NO: 602 - DNA, 162 bp, Artificial
  cDNA Sequence
cacgagcttggtgatgaagtccttcagctgcgccacgccctggcgcacggtgggctgcagcggctccatccaagcctccttggccctggaagccggcgtgtccatgttgcccacgttctggactgcctggaggtgacagcaggaaggaccaggttctgctag

SEQ ID NO: 603 - DNA, 963 bp, Artificial
  cDNA Sequence
gcccaagaaaagcaggatttcgttcagcactactcccagatcgttagggtgctgactgaggatgagatggggcacccagagacaggagatgctactgcccggctcaaggaggtcctggagtacaatgccattggaggcaagtatcaccgaggtttgatggtgctagtagcgttccgggagctggtggagccgaggaaactggatgctgatagtctccagtgggcaccgactgtgggctggtatgcgcaactgctgcaagctttcttcctggtggcagatgacattatggattcatcccttacctgccagggacagatctcctggtatcagaagctgggcatgggtttggatgccatcaatgatgctatccttctggaagcatgtatctactgcctgctgaagctgtattgccgggagcagccctattacctgaacctgatggagctcttccagcagaattcttatcagactgagattgggcagaccctcgacctcatcacaaccccccagggcaatgtggatcttcgcagatgcaccgaaaaaaggcacaaatctgttgtcaagtacaagacagctttctactccttctaccttcctgtagctgcagccatgtacatgtcaagaatggatgacaagaaggagcacaccagtgccaagaagatcctgctggagattcaagagttctttcagattcaggatgattaccttgacttctttggggaccccagtgtgactggcagagttggcaatgacttccaggacaacaaatgcagctggctggtggttcagtgtctgctacaggccactccagaacagtaccagatcctgaaggaaaattacaggcagaaggaggccgagaaggtggcccgggtgaaggcactatacgaggagctggatctgccagccgtgttcttgcagtatgagaaagacagttacagccacgttatgggtctcatcgaatag

SEQ ID NO: 604 - DNA, 1002 bp, Artificial
  cDNA Sequence
atggccatggccccaagcccttccctggtgcaggtgtacaccagccccgcagcttggctatggcaggatgggctgggcacctggcacccctacagtgccaccatctgcagcttcatcgagcagcagtttgtccagcagaagggccaacgttttgggcttgggagcctggcccacagcatccccttgggccaggcagacccctcgctggcccgttacattattgacctccccagctggacccagttccgccaggacaccggcaccatgcggactgtgcggagacacctgttcccccagcactcagcccctggccgaggtgtcgtctgggagtggctgagcgacgatggctcctggaccgcctatgaagccggcgtctgtgacgatctggagcagcaggtggccaggggcaaccagctcgtggacttggcccccctggggtacaactacactgtcaactacaccacccacacgcagaccaacaagacttccagcttctgctgcagcgtgcggcgccaagcagggccgccttacccagtgaccaccatcatcgctccgccgggccacacaggcgtcgcctgctcttgccaccagtgcctcagtggcagcagaactggccctgtatcaggccgctaccgccactccatgaccaacctccctgcataccccgccccccagcaccccccccacaggaccgcttctgtgtttgggacccaccaggcctttgcaccatacaacaaaccctcactctccggggcccggtctgcgcccaggctgaacaccacgaacgcctgggacgcagctcctccttccctggggagccagcccctctaccgctccagcctctcccacctgggaccgcagcacctgcccccaggatcctccacctccggtgcagtcagtgcctccctccccagcggtccctcaagcagcccagggagcgtccctgccactgtgcccatgcagatgccaaagcccagcagagtccagcaggcgctcgcaggt

SEQ ID NO: 605 - DNA, 801 bp, Artificial
  cDNA Sequence
atggagaagctgtccgcagcgtctggatacagcgatgtgactgacagcaaggcaatcgggcccctggctgtgggctgcctcaccaagtgcagccacgccttccacctgctgtgcctcctggccatgtactgcaacggcaataagggccctgagcaccccaatcccggaaagccgttcactgccagagggtttcccagtgctaccttccagacaacgcccagggccgcaaggggcttccagaacccggagacactggctgacattccggcctccccacagctgctgaccgatggccactacatgacgctgcccgtgtctccggaccagctgccctgtgacgaccccatggcgggcagcggaggcgcccccgtgctgcgggtgggccatgaccacggctgccaccagcagcccttctgcaacgcgcccctccctggccctggaccctatcgtacagaacctgctaaggccatcaaacctattgatcggaagtcagtccatcagatttgctctgggccagtggtactgagtctaagcactgcagtgaaggagttagtagaaaacagtctggatgctggtgccactaatattgatctaaagcttaaggactatggaatggatctcattgaagtttcaggcaatggatgtggggtagaagaagaaaacttcgaaggcttaatgatgtcaccatttctacctgccacgtatcggcgaaggttgggactcgactggtgtttgatcacgatgggaaaatcatccagaaaaccccctacccccaccccagagggaccacagtcagcgtga

SEQ ID NO: 606 - DNA, 690 bp, Artificial
  cDNA Sequence
cagctctacatcctgtagattctcacacccagggcctccttcggcctcttctcaggggagtctcagagcaggagcctctctcccttgcccagtgaaagtcattctcccctctctcatccacctcacccgcggccacaatcctgagactttcccccgggaggcacacttctcctcgctgccctgctgctctcacggaaaccctgtcctgcttctcacactgacatctgctctctaatcacagaggatcctgtcattaaaagactcctggcctgggacaaagatctgagggtgtcggacaagtatctcctggctatggtcatagcgtatttcagccgggccggcctcccctcctggcaataccaacgcattcatttcttcctggctctctatctggccaatgacatggaggaggacgacgaggcccccaaacaaaacatcttctacttcctgtacgaggagacccgctctcatatacccttgctcagtgagctttggttccagttatgccgttacatgaacccgagggccaggaagaactgctctcagatagccttgttccggaagtatcggttccacttcttttgttccatgcgctgcagggcttgggtttccctggaggagttggaagagatccaggcttatgacccagagcactgggtgtgggcgcgagatcgcgcccacctttcctag

SEQ ID NO: 607 - DNA, 666 bp, Artificial
  cDNA Sequence
gaagagtaccctgattgcattgtgaacatcttcagtgtagtgccttcacccaaagacaccaaggtcgagccctacagtgccaccctctctgtccatcagttggtagagaacactgatgagacgtattccattgacaatgaagccctgtataacatctgctcccacactctgaagcggaccacaccaacctacagggatatgaaccccctcgtctcagcaaccatgaacagtgtcatcacctgcctctgtttccctggccagctcaatgccgacctccacaagttggcagtcaacatggtccccttcccacatctccatttctttatgcctggctcttcccctctcaccagccatggaagccagcagtatcaactcacagtgtctgaattcacccagcatgtcttcaatgccaagaacatgatggctgcctgtgaaccccgccatggcttatacttcaccttggctgctgtcttcactggtcagatatccatgaaggacgtcaatgacaaaatgttaaatatgcaaaacaaaaacagcagctactttgtggaatggatctccaacaacgtcaagaacagtgacatcccatctcatggcctgaaaatgtcattcactggtattgtcaacatggtcatccagaagctcttcaagtacatcgcagatcag

SEQ ID NO: 608 - DNA, 729 bp, Artificial
  cDNA Sequence
cctgctttgtttcttgtaactgatttctttagtacagaacctgctaaggccatcaaacctattgatcggaagtcagtccatcagatttgctctgggccggtggtactgagtctaagcactgcggtgaagaagatagtaggaaacagtctggatgctggtgccactaatattgatctaaagcttaaggactatggaatggatctcattgaagtttcaggcaatggatgtggggtagaagaagaaaacttcgaaggcttaatccttactttacagtctctttcagctctgaaacatcacacatctaagattcgagagtttgccgacctaactcgggttgaaacttttggctttcaggggaaagctctgagctcactttgtgcactgagtgatgtcaccatttctacctgccacgtatcggcgaaggttgggactcgactggtgtttgatcacgatgggaaaatcatccagaaaaccccctacccccaccccagagggaccacagtcagcgtgaagcagttattttctacgctacctgtgcgccataaggaatttcaaaggaatattaagaagaaacgtgcctgcttccccttcgccttctgccgtgattgtcagtttcttgagggctccccagccatgcttcctgtacagcctgcaaaactggtaactggagagctacgggcatgcagaagttggaagacgagggaaggcatcacagaggctgtggggtga

SEQ ID NO: 609 - DNA, 1144 bp, Artificial
  cDNA Sequence
tgcatccttggagagagctgagagctcgaggtacagaacctgctaaggccatcaaacctattgatcggaagtcagtccatcagatttgctctgggccggtggtactgagtctaagcactgcggtgaagaagatagtaggaaacagtctggatgctggtgccactaatattggatctaaagcttaaggactatggaatggatctcattgaagtttcaggcaatggatgtggggtagaagaagaaaacttcgaaggcttaagtaaggtcaccatttctacctgccacgtatcggcgaaggttgggactcgactggtgtttgatcacgatgggaaaatcatccagaaaaccccctacccccaccccagagggaccacagtcagcgtgaagcagttattttctacgctacctgtgcgccataaggaatttcaaaggaatattaagaagtacagaacctgctaaggccatcaaacctattgatcggaagtcagtccatcagatttgctctgggccggtggtactgagtctaagcactgcggtgaagaagatagtaggaaacagtctggatgctggtgccactaatattgatctaaagcttaaggactatggaatggatctcattgaagtttcaggcaatggatgtggggtagaagaagaaaacttcgaaggcttaactctgaaacatcacacatctaagattcgagagtttgccgacctaactcgggttgaaacttttggctttcaggggaaagctctgagctcactttgtgcactgagtgatgtcaccatttctacctgccacgtatcggcgaaggttgggactcgactggtgtttgatcacgatgggaaaatcatccagaaaaccccctacccccaccccagagggaccacagtcagcgtgaagcagttattttctacgctacctgtgcgccataaggaatttcaaaggaatattaagaagaaacgtgcctgcttccccttcgccttctgccgtgattgtcagtttcttgagggctccccagccatgcttcctgtacagcctgcaaaactgactcctagaagtaccccaccccacccctgctccttggaggacaacgtgatcactgtattcagctctgtcaagaatggtccaggttcttctagatga

SEQ ID NO: 610 - DNA, 417 bp, Artificial
  cDNA Sequence
atgttgaagcgaggacgtggtgggtcctctggtgtgaaattccagatttccttgggtcttctggtaggagtgatcagttgtgctgacaacacaggagccaaaaacctgtatgtcatctccaaggggatcaagggatggctgaacagacttcccactgctggtgtgggtgacacggtgatggccacagtcaagaaaggcaaaccagagctcagaaaaaaggtacatccagcagtggttattcgacaacgaaagtcataccgcagaaaagatggcgtgtttctttattttgaagataatgcaggggtcacagtgaacaataaaggcgagatgaaaggttctgccattacaggaccagtagcaaaggagtgtgcagacttgtggccctggattgcgtccagtgctggcagcattgcatga

SEQ ID NO: 611 - DNA, 378 bp, Artificial
  cDNA Sequence
atggtcatagcgtatttcagccgggccggcctcccctcctggcaataccaacgcattcatttcttcctggctctctatctggccaatgacatggaggaggacgacgaggcccccaaacaaaacatcttctacttcctgtacgaggagacccgctctcatatacccttgctcagtgagctttggttccagttatgccgttacatgaacccgagggccaggaagaactgctctcagatagccttgttccggaagtatcggttccacttcttttgttccatgcgctgcagggcttgggtttccctggaggagttggaagagatccaggcttatgacccagagcactgggtgtgggcgcgagatcgcgcccacctttcctag

SEQ ID NO: 612 - DNA, 729 bp, Artificial; identical to SEQ ID NO: 608
  cDNA Sequence

SEQ ID NO: 613 - DNA, 1128 bp, Artificial
  cDNA Sequence
aactgatttctttagtacagaacctgctaaggccatcaaacctattgatcggaagtcagtccatcagatttgctctgggccggtggtactgagtctaagcactgcggtgaagaagatagtaggaaacagtctggatgctggtgccactaatattggatctaaagcttaaggactatggaatggatctcattgaagtttcaggcaatggatgtggggtagaagaagaaaacttcgaaggcttaagtaaggtcaccatttctacctgccacgtatcggcgaaggttgggactcgactggtgtttgatcacgatgggaaaatcatccagaaaaccccctacccccaccccagagggaccacagtcagcgtgaagcagttattttctacgctacctgtgcgccataaggaatttcaaaggaatattaagaagtacagaacctgctaaggccatcaaacctattgatcggaagtcagtccatcagatttgctctgggccggtggtactgagtctaagcactgcggtgaagaagatagtaggaaacagtctggatgctggtgccactaatattgatctaaagcttaaggactatggaatggatctcattgaagtttcaggcaatggatgtggggtagaagaagaaaacttcgaaggcttaactctgaaacatcacacatctaagattcgagagtttgccgacctaactcgggttgaaacttttggctttcaggggaaagctctgagctcactttgtgcactgagtgatgtcaccatttctacctgccacgtatcggcgaaggttgggactcgactggtgtttgatcacgatgggaaaatcatccagaaaaccccctacccccaccccagagggaccacagtcagcgtgaagcagttattttctacgctacctgtgcgccataaggaatttcaaaggaatattaagaagaaacgtgcctgcttccccttcgccttctgccgtgattgtcagtttcttgagggctccccagccatgcttcctgtacagcctgcaaaactgactcctagaagtaccccaccccacccctgctccttggaggacaacgtgatcactgtattcagctctgtcaagaatggtccaggttcttctagatga

SEQ ID NO: 614 - DNA, 405 bp, Artificial
  cDNA Sequence
atgtggggtagaagaagaaaacttcgaaggcttaatgatgtcaccatttctacctgccacgtatcggcgaaggttgggactcgactggtgtttgatcacgatgggaaaatcatccagaaaaccccctacccccaccccagagggaccacagtcagcgtgaagcagttattttctacgctacctgtgcgccataaggaatttcaaaggaatattaagaagaaacgtgcctgcttccccttcgccttctgccgtgattgtcagtttcttgagggctccccagccatgcttcctgtacagcctgcaaaactgactcctagaagtaccccaccccacccctgctccttggaggacaacgtgatcactgtattcagctctgtcaagaatggtccaggttcttctagatga

SEQ ID NO: 615 - DNA, 531 bp, Artificial
  cDNA Sequence
gtactgctgggccggaaggtggaggtcgtacgctgtgagggcatcatcatttctggccatttctacagatacaagttgaagtacctggtcttcctccgcaagcagatgaacaccaacccttcccgaggcccctaccacttccgggcctctagccgcaccttccggctgacccgaggcatgttgccccacaagacaaagcaaggccgggccgccctggagcgcctcaaggtgtttgacggcatcccaccgccctatgacatgaaaaagcggatggtggttcctgctgccctcaaggtcatgcatctgaagcctacaagaaactttgcctacgtggggcgcctggctcacgaggtttgctgtaagtacctggcagtggcatctaccctgaaggagaagaggaaggagaaagccaagatccactatcggaagaagaaacagctcatgaggctatggaaaccgggtgaaaagaacgtggagaagaaaactgacaaatacacagaagctctcaagacccatggactcctgatctga

SEQ ID NO: 616 - DNA, 990 bp, Artificial
  cDNA Sequence
atggaactccacatcctggagcaccggctgcaagttgccagcgtcgccaaggagagtatcccgctgttcacctacggcctgatcaaacttgccttcctgtcctccaagaccaggtgcaagttcttcagtctgactgagacgccagaggattacactatcattgtcgatgaggaaggattcctagagctgccctcctcggagcacctgagtgtggcagatgccacctggctggccctgaacgtggtgtccggcggtggcagcttctccagctcccagcccatcggcgtgaccaagatcgccaagtcagtcatcgccccactggctgaccagaacatatccgtgttcatgctgtccacgtatcagacagacttcatcctggtgcgcgagcgggacctgccctttgtcacccacacattgtcatcagagttcaccatcctgcgggtcgtcaatggcgagaccgtggcagccgagaacctcggcatcaccaatggcttcgtgaagcccaagctggtccagaggccagtcatccacccactgtccagcccgagcaacaggttctgtgtcaccagcctggaccctgacacgctgcctgctgttgccacactcctcatggatgtcatgttctactccaatggagtgaaggaccccatggccactggggatgactgcggccacatccgcttcttctccttctccctcatcgagggctacatctccctggtgatggacgtgcagacgcagcagaggtttcctagtaacttgctgttcacaagcgcatccggagagctctggaagatggtccggattggaggacagcccctggggtttgatgagtgtggcatcgtggcccagatctcagagcccttggctgctgcagacatcccagcctactacatcagtactttcaagtttgatcatgcacttgtccccgaagagaacatcaatggtgtcatcagtgccctgaaggtcagccaagcagagaagcactag

SEQ ID NO: 617 - DNA, 2962 bp, Artificial
  cDNA Sequence
cgctcgtatcaggcttcatggcggcgcggccactgtcccggatgctgcggcggcttctgaggtccagcgcccggagctgcagctcaggggctccggtgacccagccctgccccggggagtccgcgcgagctgcctcggaggaggtgtccaggcggaggcagttcctgcgggagcatgcggcccccttctccgccttcctcacagacagcttcggccggcagcacagctacctgcggatctccctcacagagaagtgcaacctcagatgtcagtactgcatgcccgaggagggggtcccgctgacccccaaagccaacctgctgaccacagaggagatcctgaccctcgcccggctctttgtgaaggaaggcatcgacaagatccggctcacaggtggagagccgcttatccggccggacgtggtggacattgtggcccagctccagcggctggaagggctgagaaccataggtgttaccaccaatggcatcaacctggcccggctactgccccagcttcagaaggctggtctcagtgccatcaacatcagcctggacaccctggtgcctgccaagtttgagttcattgtccgcaggaaaggcttccacaaggtcatggagggcatccacaaggccatcgagctgggctacaaccctgtgaaggtgaactgtgtggtgatgcgaggccttaacgaggatgaactcctggactttgcggccttgactgagggcctccccctggatgtgcgcttcatagagtatatgccctttgatggcaacaagtggaacttcaagaagatggtcagctataaggagatgctagacactgtccggcagcagtggccagagctggagaaggtgccagaggaggaatccagcacagccaaggcctttaaaatccctggcttccaaggccagatcagcttcatcacatccatgtctgagcatttctgtgggacctgcaaccgcctgcgaatcacagctgatgggaacctcaaggtctgcctctttggaaactctgaggtatccctgcgggatcacctgcgagctggggcctctgagcaggagctgctgagaatcattggggctgctgtgggcaggaagaagcggcagcatgcaggcatgttcagtatttcccagatgaagaaccggcccatgatcctcatcgagttatttttgatgttccccaattccccaccagccaatccaagcattttctcctgggacccgctccatgttcagggtctaagacccagaatgagtttctccagccaggtggccactttatggaaaggatgcagggtcccccagacccctcctctagcccagcagcggctggggtctggctcctttcagagacactacacttcccgtgcagactcagatgccaactcaaagtgccttagcccaggttcctgggcttctgctgccccctcaggaccccagctaacctcagaacaactaactcatgtggactcggaaggacgggcagctatggtagatgtgggcaggaagccagacacagagcgggtggctgtggcttcagccgtggtcctcctgggaccggtagccttcaagcttgtccagcagaaccagctcaagaaaggagatgccctagtggtggcccagctggctggagtccaggcagccaaggtgaccagccagctgatccctctgtgccaccacgtggccctgagccacatccaggtgcagctggagctggacagcacacgccatgccgtgaagatccaggcatcttgccgggctcggggccccaccggggtggagatggaggccctgacctctgctgcagtggccgccctcaccctgtatgacatgtgcaaggctgtcagcagggacatcgtgttggaggagatcaagctcattagcaagactggtggtcagcggggggacttccatcgggcttagcacctgcccttctcacccatggcccacccaggcctggagctgggatgcaatgtaggctgagggaaagacgtcaggttcctttaatcacagtcactgtttgtttaccttgagcagtaaacccgaagtcagcctgctctactactaacaaacaggcctgctgctagatgatctctaatgaccaatggggcttcctttctatagggaggataccagcaggcccttaagccttccaggacactaaggtcgtgggagcgggactgcaacaagcaatgccagataactgagaaatcatgttctttgtggactatttcagacaaccaggttccgacagtccagcccagaacttttccttctcattttgggttttctcttctcctgctttcctggggagagattaagcgctcattaagcagaggagcccactttgaggagagcaaagcacaagcttgcctgaagaatggatcccaacttctccccggcagctctgcctccctaagtctgtgaagccgcagccctgccctgtcctgtcctgtcctgacttcatctctccttctgcccaagtctgtgtcccatcagacttgcagcctttcagcttaacagttgcccggtcctgctggccccttttcctctggcccccctcttctgaaacaggatgtgcacacatgggccatagccctaaggactcctgccagaccacacagcccacacctggccctgttcacggctgttccacccacccctctttattctggagcatatcagggaaagaaaagttgatgatagattgccttcaccctcacagcgcacaaataaagctacgatgccaactttgcagatgcaagaatgaagacactgtgtgggtagggcactgagctgctgcagtttcacagggaaggctgcacctatcaatcaatcaatcaatcctatcccaagacacagttccctgagggaagaagaggagggacctggaaaggcctaagggtgtactctctgtatagccccgctatgggaaaataaagtggagtagggggcat

SEQ ID NO: 618 - DNA, 2835 bp, Artificial
  cDNA Sequence
gccagaaatcttcccagtagagatcaccatccgcccccgacccccaagctgaatacttaaggggtgggtccttcccatcaagctgatttctcaacgagagggacaatcccagcttccccaacattgcagagcccaaacatgtggaagagttggaagctccgcacagatgtcagagtaagggagggggcaggcggttctccttgtgcctcttcccagcccggtagcaggggcccatgcttcctccctggtctgtcctcgcaggaggtgtccaggcggaggcagttcctgcgggagcatgcggcccccttctccgccttcctcacagacagcttcggccggcagcacagctacctgcggatctccctcacagagaagtgcaacctcagatgtcagtactgcatgcccgaggagggggtcccgctgacccccaaagccaacctgctgaccacagaggagatcctgaccctcgcccggctctttgtgaaggaaggcatcgacaagatccggctcacaggtggagagccgcttatccggccggacgtggtggacattgtggcccagctccagcggctggaagggctgagaaccataggtgttaccaccaatggcatcaacctggcccggctactgccccagcttcagaaggctggtctcagtgccatcaacatcagcctggacaccctggtgcctgccaagtttgagttcattgtccgcaggaaaggcttccacaaggtcatggagggcatccacaaggccatcgagctgggctacaaccctgtgaaggtgaactgtgtggtgatgcgaggccttaacgaggatgaactcctggactttgcggccttgactgagggcctccccctggatgtgcgcttcatagagtatatgccctttgatggcaacaagtggaacttcaagaagatggtcagctataaggagatgctagacactgtccggcagcagtggccagagctggagaaggtgccagaggaggaatccagcacagccaaggcctttaaaatccctggcttccaaggccagatcagcttcatcacatccatgtctgagcatttctgtgggacctgcaaccgcctgcgaatcacagctgatgggaacctcaaggtctgcctctttggaaactctgaggtatccctgcgggatcacctgcgagctggggcctctgagcaggagctgctgagaatcattggggctgctgtgggcaggaagaagcggcagcatgcagagttatttttgatgttccccaattccccaccagccaatccaagcattttctcctgggacccgctccatgttcagggtctaagacccagaatgagtttctccagccaggtggccactttatggaaaggatgcagggtcccccagacccctcctctagcccagcagcggctggggtctggctcctttcagagacactacacttcccgtgcagactcagatgccaactcaaagtgccttagcccaggttcctgggcttctgctgccccctcaggaccccagctaacctcagaacaactaactcatgtggactcggaaggacgggcagctatggtagatgtgggcaggaagccagacacagagcgggtggctgtggcttcagccgtggtcctcctgggaccggtagccttcaagcttgtccagcagaaccagctcaagaaaggagatgccctagtggtggcccagctggctggagtccaggcagccaaggtgaccagccagctgatccctctgtgccaccacgtggccctgagccacatccaggtgcagctggagctggacagcacacgccatgccgtgaagatccaggcatcttgccgggctcggggccccaccggggtggagatggaggccctgacctctgctgcagtggccgccctcaccctgtatgacatgtgcaaggctgtcagcagggacatcgtgttggaggagatcaagctcattagcaagactggtggtcagcggggggacttccatcgggcttagcacctgcccttctcacccatggcccacccaggcctggagctgggatgcaatgtaggctgagggaaagacgtcaggttcctttaatcacagtcactgtttgtttaccttgagcagtaaacccgaagtcagcctgctctactactaacaaacaggcctgctgctagatgatctctaatgaccaatggggcttcctttctatagggaggataccagcaggcccttaagccttccaggacactaaggtcgtgggagcgggactgcaacaagcaatgccagataactgagaaatcatgttctttgtggactatttcagacaaccaggttccgacagtccagcccagaacttttccttctcattttgggttttctcttctcctgctttcctggggagagattaagcgctcattaagcagaggagcccactttgaggagagcaaagcacaagcttgcctgaagaatggatcccaacttctccccggcagctctgcctccctaagtctgtgaagccgcagccctgccctgtcctgtcctgtcctgacttcatctctccttctgcccaagtctgtgtcccatcagacttgcagcctttcagcttaacagttgcccggtcctgctggccccttttcctctggcccccctcttctgaaacaggatgtgcacacatgggccatagccctaaggactcctgccagaccacacagcccacacctggccctgttcacggctgttccacccacccctctttattctggagcatatcagggaaagaaaagttgatgatagattgccttcaccctcacagcgcacaaataaagctacgatgccaactttgca

SEQ ID NO: 619 - DNA, 378 bp, Artificial; identical to SEQ ID NO: 611
  cDNA Sequence

SEQ ID NO: 620 - DNA, 759 bp, Artificial
  cDNA Sequence
tttcccagtccccgaggcggatccggtgttgcatccttggagagagctgagagctcgagtacagaacctgctaaggccatcaaacctattgatcggaagtcagtccatcagatttgctctgggccggtggtactgagtctaagcactgcggtgaagaagatagtaggaaacagtctggatgctggtgccactaatattgatctaaagcttaaggactatggaatggatctcattgaagtttcaggcaatggatgtggggtagaagaagaaaacttcgaaggcttaactctgaaacatcacacatctaagattcaagagtttgccgacctaactcgggttgaaacttttggctttcgggggaaagctctgagctcactttgtgcactgagtgatgtcaccatttctacctgccacgtatcggcgaaggttgggactcgactggtgtttgatcacgatgggaaaatcatccagaaaaccccctacccccaccccagagggaccacagtcagcgtgaagcagttattttctacgctacctgtgcgccataaggaatttcaaaggaatattaagaagaaacgtgcctgcttccccttcgccttctgccgtgattgtcagtttcttgagggctccccagccatgcttcctgtacagcctgcaaaactgactcctagaagtaccccaccccacccctgctccttggaggacaacgtgatcactgtattcagctctgtcaagaatggtccaggttcttctagatga

SEQ ID NO: 621 - DNA, 1947 bp, Artificial
  cDNA Sequence
cagtgtggcagtggaggccgtcagattactgatacttatccttaagaacatggaaggggtgctgatggacgtggactgtgagagcgtctaccccattgtgtaggcctctaattgaggcctggcctctgctgtgggtgaatttctgtactggaaacttttctaccctgagtgcgagataagaacgatgggtggaagagagcaacgccagagcccaggtgcccagaggactttcttccagcttctgctgtccttctttgtggagagcaagctccacgaccacgctgcttacttagtagacaacctgtgggactgtgcagggactcagctgaaggactgggagggtctgacaagcctgctgctggagaaggaccagagcacgtgccacatggagccagggccagggaccttccacctcctagggtgaaaccaggagagattgcttgcttcacttgtacaagaatcggctcccagacacctgccactcgtgaatgcatctgataaactcactcacactgaggccttggggactgaggccctggcggatcacgggtgcccaggggctcggaggccgcctcctctgggaagcctgcccaggttccgatggactcccacaggcaatacccctgggccttcctcgcggcccctgttggccccaattcccccaccccctgcaaggtctgtgcctctcctgcagccccgccaccaactagggcgagaggagctcgcccccacccaaacgtattggttcgatgaaggaagggcccatggttctgccactggccctggacacccagtgctggtttcccgtggaagtccccctggactgagtggcggctgggtgctctagtgatttgcgacctggggcctctgactcccatcatgttgggaaagtcgttgaacctcaccggtgaaacgggcacagtgaagtcatttccccgaagtctcaggactctgtgtaaggctggggacaggggcttgttggggcctaagggcaccttgggaactgcaggagcccgttctgcctccataagacactcactcctggcagggtcccctctccgggcacagcccagatccacccccatcatccctctccatctgtggctccctgcccctcacagaggattcatcactctgttcagaatccccaggactccctagggaaggaggtcccagcctggcctcccaagaccgtgcttgcccaattccaggacttcctcacatggctcctacctccagcacagaagcggcactaaaccaggtggtcaatcagggagcaccaccgaggttctgaatggtccagggatgagcagtgatgcctcaagctaagccaatcaaagccttccctgggattgtctcaaggagtccgcagtgagattctgggtctcagtactgggaaagggtgaggctgaggctgcctgctgtcctgggggcctcaccctgccaccaacaggaagccacacagagggaagcagaaatgagacgcagccagtgagggcagggtacaaaggtgagatcccggagagacagatgctgggacatcatccttgggtactggttccaacagtgcctgcagatggagccaccctcggagagtccacaacagcagccaatccattctatgcgtgtctgagctactttaagtcgggtttttgactgtttgaatgagagtctcatcttggctaggcaccatggcgcaacaactggggaggtggaggtaggaagattgcttgaggccaagagtcccagagcagcctgggcaacctatcaagacgctgtctttacgaaaagaaaaaaaactagctaggtgtggtggtgcgtgcctgtggtcccagctactggggaggctgaggtgggaggattgcttgagcccaggaagtggaggctgcagtgacctatgatggcaccactgtactccagcctgggtgacagagcaagaccctgtct

SEQ ID NO: 622 - DNA, 942 bp, Artificial
  cDNA Sequence
agaatgtaatgccgccgtcggtaggggtctgccgggcataaaggggccttcggaaccccaccagagtcacagccaggaagggcagcggggcgcaccaggccgaaggctcacgccacagggagggcagctaggacatggggggaagcgcgttaaaccagggagtcctggaaggggacgacgcccccggccagtccctgtacgagcggttaagtcagaggatgctggacatctcgggggaccggggcgtgctgaaggacgtcatccgagaaggagctggagacctagtggcgcctgatgcttcggtgctagtgaaatactatggatacctggaacacttggacagacccttcgattctaattactttaggaaaactcctcggctaatgaaacttggagaggatattacattgtggggcatggagctgggccttctgagcatgcagagaggagagctggccagatgcttcgtcttgggtaaactcctcgactcccaaggccccagcctccatctttacctcagagcctcctgaacctcctcctccagcctcaccttcctccagcctcaccactcctccctggacctgcagctccgcacccccgggggcctcagaactaccccttccagggcctcagaactacccctacagtttctcctgcgtaaccttctgcctaccttcctgagagtggttggtgacagcagccggggctagaaacctcgaggcgactgtgcttgagtcctctcttgctctttacatcccaaatcccatcaattgtcacgccttgtgccttccgcctctcaaatattcagaaagcagatgtatgctgggcacggtggtgactcaagcctataatcccagcacttcggaaggcggaggcaggaggatcgcttgaggccaggaattttagaccagccggggcaacatagtgaaaccccatctctac

SEQ ID NO: 623 - DNA, 1350 bp, Artificial
  cDNA Sequence
gagcatgatggggcatgtgcgggagcgccaggcggggcatgtaaccagagcgtgcggggcatgatggggcacggacatggggggttaggtggggcacgtaattggagctcgcggggcaggatggggcatctaactggagcgacagagagcacgatggggcacttacaggggccggaggctggcccgggcagtgagtgtggatggcttggcaggtgagcctgctggagctggaggaccggcttcagtgtcccatctgcctggaggtcttcaaggagtccctaatgctacagtgcggccactcctactgcaagggctgcctggtttccctgtcctaccacctggacaccaaggtgcgctgccccatgtgctggcaggtggtggacggcagcagctccttgcccaacgtctccctggcctgggtgatcgaagccctgaggctccctggggacccagagcccaaggtctgcgtgcaccaccggaacccgctcagccttttctgcgagaaggaccaggagctcatctgtggcctctgcggtctgctgggctcccaccaacaccacccggtcacgcccgtctccaccgtctgcagccgcatgaaggaggagctcgcagccctcttctctgagctgaagcaggagcagaagaaggtggatgagctcatcgccaaactggtgaaaaaccggacccgaatcgtcaatgagtcggatgtcttcagctgggtgatccgccgcgagttccaggagctgcgccacccggtggacgaggagaaggcccgctgcctggaggggatagggggtcacacccgtggcctggtggcctccctggacatgcagctggagcaggcccagggaacccgggagcggctggcccaagccgagtgtgtgctggaacagttcggcaatgaggaccaccatgagttcatctggaagttccactccatggcctccaggtaataaccttggagagagctcagccagggtctggtggctgcgggcacgggcatctcagctccactggttcctccattcagcttaaccagcgcctcccaagcagctgcctatagctggctctataactgagcctggggaagatagaggaaagtcacatccctgccttcaagggtctcgcagacaggtggggaggcagatggtgaactgtgggtacctagaacagcagaagttcactcaagctacagaaatactagaggagggtagctcatgcctgcaatcccagtactttgggaggccaaggcaggagtattgctggaggccgggagttcgagaccagcctggccaatgtagtaacacccccgtctctacaaaaaatacaaaaataaaaaaattagttggg

SEQ ID NO: 624 - DNA, 1607 bp, Artificial
  cDNA Sequence
gcgctttgcgacagagccgtaaaggcgcgcgggaacatggggctgtacgctgcggtggcaggcgtgctggccggcgtggagagccgccagggctctatcaaggggctggtgtactccagcaacttccagaacgtgaagcagctgtacgcgctggtgtgcgaaacgcagcgctactccgccgtgctggatgccgtgatctccagcgccggcctcctcagtgcgaagaagctgcagccgcacctggccaaggtgctagtgtatgagttgttgggaaagggctttcgagggggtgggggccaatggaaggctctgttgggacggcaccaggcgaggtgttgagttggctcggctcaaggttcttcggggtgtgagctggcatgaggacctgttggaagtgggatccaggcctggtccagcctcccagctgcctcgatttgtgcgtgtgaacactctcaagacctgctccgtttatgtagttatttcaagagacaaggtttctcctatcagggtcgggcttccagccttgatgacttacaagccctcaaggggaagcattttctcctggactccttgatgccggagctgctggtgtttcccgcccagacagatctgcatgaacacccactgtaccgggccggacacctcattctgcaggacagggccagctgtctcccagccatgctgctggacccccgccaggctcccatgtcatcgatgcctgtgccgccccaggcaataagaccagtcacttggctgctcttctgaagaaccaagggaagatctttgcctttgacctggatgccaagcggctggcatccatggccacgctgctggcctgggttggcgtctcctgctgtgagctggctgaggaggacttcctggcggtctcccccttagatccgcgctatcgtgaggtccactatgtcctgctggatccttcctgcagtggctcgggtatgccgagcagacagctggaggatcccggggcagggacacctagcccggtgcgtctgcatgccctggcagggttccagcagcgagccctgtgccacgcgctcactttcccttccctgcagcggctcgtctactccatgtgctccctctgccaggaggagaatgaagacatggtaccagatgcgctgcagcagaacccgggcgccttcaggctagctcccgccctgcctgcccggccccaccgaggcctgagcacgttcccgggtgccgagcactgcctccgggcttcccccaagaccacgcttagcggtggcttcttcgttgctgtaattgaacgggtcgagatgccgacctcagcctcacaggccaaagcatcagcaccagaacgcacacccagcccagccccaaagagaaagaagagacagcaaagagccgcagccggtgcttgcacaccgccttgcacatagcagaggctccaggctgactccttcctggtgggaaaggaagatgcctgtcctctccgtggaggaccctgggccctcaccgcaggcagcagtttgcattttgaaaggttattgggtcccttcctcgggctgtgttcttgctggtgagcaaaagtgttgcctgcagaaataaaatgcagaacgtactct

SEQ ID NO: 625 - DNA, 5021 bp, Artificial
  cDNA Sequence
atgtctccggcggctgcggcggctggagcaggcgagcggcggcggccgatagcgagtgtcagggacggccggggccggggctgcggcgggccggccggggcggcgcttctcggcctgtcgctggtcggcctcctactgtacctcgtgcctgctgcggctgcgctggcctggctggccgtggggactaccgcggcctggtggggactgagccgcgagccccgaggttcgcgccccttgtcctccttcgttcagaaggcgcgacatcggcgaacactgttcgcttcgcctccggccaagtcgacagccaacggaaacctcctagagccgcggaccctgctcgaaggacctgaccctgccgaactgctcctcatgggcagttacctgggcaagcccgggccgccgcagcccgcccccgctccggagggccaggacctgcggaataggcctggccgccgcccacccgcccgcccggcgccgcgctccacaccgccctccccgccgacccatcgcgttcaccacttttacccctctctccccactcctcttctccgaccctccgggaggccttccccacgggatcgtgggactttaccagatcggtttgtaataacacctcgaagacgctatccgatccatcagacccagtattcctgtccgggggtacttcccacagtgtgctggaatggttatcacaagaaggctgtgctgtcccctcgcaactccaggatggtgtgtagcccagtgactgtgaggatcgcccctcctgacagaagattttcacgttctgcgataccagagcagataatcagctcaacactgtcgtcaccatcaagtaatgccccagacccatgtgcaaaggagactgtactgagtgccctcaaagagaagaagaagaaaaggacagtggaggaagaagaccaaatattccttgatggccaggaaaataaaagaaggcgccatgatagcagtggcagtggacattcagcatttgagcccctggtggccagtggagtccccgcttcttttgtgcctaagcctgggtctctgaagagaggcctcaattctcagagctcagatgaccacttgaataagagatcccgaagctcttccatgagctccttgacaggcgcttacacaagtggcatccctagctccagccgcaatgccattaccagttcctacagctccactcgaggcatctcacagctctggaagagaaatggccccagttcatcacccttctctagcccagcctcatcccgctcccagacaccggagaggccagcaaagaaaataagagaagaagagctgtgtcatcattccagttcttcaactccattggcagcagacaaggagtcccagggagaaaaggctgcagatacaaccccaaggaagaaacaaaactcgaattctcagtctacacctggcagctctgggcagcgtaagcggaaagttcagctgctgccttctcggcgaggggaacagctgaccttgcctccacctccccagcttggctattcgatcactgccgaggacctagacttagagaagaaggcttcattacagtggttcaaccaggccttggaggacaagagtgatgctgcctcgaactctgtcactgagaccccacctaccactcagccttcatttacctttaccctgcctgctgctgcaactgcctccccacccacctccctcctggccccaagcaccaacccactgttagagagcttgaagaagatgcagactcccccgagcctgccaccctgcccagaatctgctggagcagcaaccactgaggccctctcacctccaaagacacccagcctcctacccccgctgggtttatcacagtcagggccgccagggctgctccccagcccctcctttgactccaaacccccgaccactttgctggggctgatccctgctccatccatggtaccagccactgacaccaaggcacctccaacccttcaagcagagacggctaccaaaccccaagccacatctgccccgtcccccgcccccaagcaaagcttcctgtttggaacacagaacacctcaccttccagccctgccgcccctgctgcatcttcagcatctcccatgttcaagcccattttcacggctccacccaagagtgagaaggaaggccccacaccgcctggcccttcagtcacagccacagcgccctccagctcctccctccccacgaccaccagcaccacagccccgaccttccagcctgtctttagcagcatggggccacctgcatctgtgcccttgcctgctcccttcttcaagcagacaactactcccgccactgctcccaccacaactgccccgctcttcactggcctggccagcgccacctctgctgtggctcccatcacctctgccagtccatccacagactctgcttcgaagcctgcgtttggctttggcataaacagtgtgagcagcagcagtgtgagtaccacgaccagcaccgccactgccgcctcacagcctttcctcttcggggcgccccaggcctctgctgccagcttcaccccggccatgggctccatattccagtttggcaaacctcctgccttgcccacaaccaccacagtcaccaccttcagccagtccctgcccactgccgtgccaacggccaccagcagcagcgctgccgactttagtggttttggcagcaccctcgccacctccgccccggccaccagcagccagcccactctgacgttcagtaacacgagcacccccacgttcaacattccctttggctcaagcgccaagtccccgctcccatcatatccgggagccaacccccagcccgcatttggggccgctgaggggcagccaccgggggccgccaagccagcccttacccccagctttggcagctctttcacttttggaaactctgcagccccggccccggctactgcacccacacctgcacctgcgtccacgatcaagatcgtgcctgcgcacgtgcctacgcccatccagcctacctttggcggtgccacgcactcggcgtttggattgaaagccacggcttccgccttcggcgctcccgccagctcacagcccgcctttggcggctccactgctgtcttctccttcggtgcagccaccagctccggctttggagccaccacccagaccgccagcagcgggagcagcagctcggtgtttggcagcacaacaccatcacccttcacgtttgggggttcggcagcccccgctggcagtgggagctttgggatcaacgtggccaccccaggctccagcgccaccaccggagctttcagctttggagcaggacagagtgggagcacagccacctccacccccttcacagggggcttaggtcagaacgccctgggcaccaccggccagagcacaccgtttgccttcaacgtgggcagcacaactgagagcaaacctgtgtttggaggcaccgccacccccacctttggtcagaacacccctgcgcctggagtgggcacatcgggcagcagcctctcctttggggcatcttcagcacccgcccaaggctttgttggtgttggaccgttcggatcggcggccccttcattttccattggtgcgggatccaagaccccaggggctcgacagcgactgcaggcccgaaggcagcacacccgcaaaaagtagcctttgtcccctgtccctgttccccccaccccttccctaaatctggaccttggcacgtgctagaaagagccttggacccttccagctgcgtaaagcaaacctaccccggatctctggcttcagccgccagggggcagtggcagccctggggccctttcccttctggaggaagcacaagcctcagggaaggggaagcaggatgcggagggccaaagcccgggacctctacttgaacagttccactggggaggctggagaactaaggacctgtacatagtgtccgctgccctgactcccgcttagcgcacccttaggcaggcgccccttccacctttccccgagagccgtcgtcgctggagggggcagggtccagcccgcctggatcggtggtgtgcacctgatgggatttgggaaatgggttatccctaaagctttatcttgcttggcttagctgtgagaagtggttctcttcctctggtcccttctggggactctgtttccccatttcttgctgctgtgtccctcaccggttccttgcaggattccctcctttttaaatgcccttgaatctagctttgccttggagaccccagtgggtgctgctcctgccgttttcttcctgccaagcctgaatcaatgtttcatctccaaccctctgccagtttggcccctcagagcttggtggctcaagactgttagcctggcagagccaggggtgaagggagaagctcttggagcaggcaggatgcccaccgctgcttcagctgcctcctcgcccagctaccctttggccccattgggccctcgtctgcctctccaggattgtatgtttcaagccttgtcctgtgttcctttgtctgacgctctgtgtattgctctttgaatcgagtttggaggaagagttgagttgtatgagtggcggcatgttggtagtgccggacttcctgtttcaagttttctggggcctcgctaattgaatgtggaaagtagcaccacttgacggctacaagtgccgactcctgaattttcccatggtgttctgacttcaagggctggcagccagggagaatgggcccaggggaagcaaagacctcttccctctgcggtttctgtcccacttaactgacctcactggaggctacgtcacccaaagtagatgttagaaaacctaaattaatgaaccatatttttaaaatcctatttttcccaaacagggccctctgcagcccatcctttccttccgtccttctgaaaccacataccccaggcccaagcgccttgctgtcacgcccaacctctttgggagaagtatgaatgcgtgtgtctaaatt

SEQ ID NO: 626 - DNA, 426 bp, Artificial
  cDNA Sequence
atgatctcagctcactgcagcaacctccacttcctgggttcaagcgagtctcctacattggcctcccaagtaggtgagattacaggcactcaccaccacacgcggctaatttttgtatttttggtagagacggggtttcaccatgttggccacgctggtcttgaactcctgacctcaagtgatccacccaccttggcctcccgaagtgctgggattacaggcatgagccaccgtgcccggcctcatggaatttctaggggtgagcaggtgaccctggggctgccacttgagctcctggagtgtgtgtcttggcccctgtgtggttctccattaagaaaagctcagatagtctcaaccccaccctctccccttgctgcactcagagtaccagtgggagctgaaggatggggaggaacagagcagtga

SEQ ID NO: 627 - DNA, 1459 bp, Artificial
  cDNA Sequence
ggactggtgttaagggtcacgcaagatggcggcgcccagaggctgctgaggcgcggaacggaggatggcgctggtggcgttggtggctggggctcggctggggcggcggctgagcgggccggggctggggcgagggcactggacggcggccaggcgctcccggagccggcgcgaagcggcagaagccgaggcggaggtgcccgtggtccagtacgtgggcgagcgcgctgcccgcgccgatcgcgtcttcgtgtggggcttcagcttctcgggggcgctgggcgtgccttcctttgtggtgcccagctccgggcccgggccccgcgccggcgcccgaccgcgccgcaggatccagcccgtgccctatcgcctggagctggaccaaaagatttcatctgctgcttgcggctatggattcacactgctgtcctctaagactgcggatgttacgaaagtctgggggatgggactcaacaaagattctcagcttggatttcacaggagccggaaagataaaacgaggggctacgagtatgtgttggagccctcacccgtctccctgcctctggacagacctcaggagacacgggtgctgcaggtctcctgcggccgagctcactctcttgtgttgactgacagggaaggagtcttcagcatgggaaacaattcttatgggcaatgtggaagaaaggtggtcgaaaatgaaatttacagtgaaagtcacagagtccacaggatgcaggacttcgatggccaggtggtccaggtcgcctgtggtcaggatcatagtctgttcctgacggataaaggagaagtctattcttgtggatggggtgctgatgggcaaacaggtctgggtcactacaatatcaccagctcgcccaccaagctgggtggagacctggcgggagtgaacgttatccaagttgccacctacggtgattgctgcctggccgtgtccgccgacggaggactttttggttggggaaactcggagtacctgcagctggcctctgtcactgactccacacaggtgaatgtgccccgctgcttacacttctcaggagtggggaaggtgcgacaggctgcatgcggtggcacgggctgtgcagtgttaaacggagaaggacatgtttttgtctggggctatggaattcttgggaaaggtccaaacctagtggaaagtgccgtccctgaaatgattccacccactctctttggcttgacggagttcaacccagaaatccaggtttcccgcatccgatgtggactcagccactttgctgcactgaccaacaaaggagagctgtttgtatggggcaagaacatccgagggtgcctgggaatcggtcgcctggaggaccagtatttcccatggagggtgacgatgcctggggagcctgtggacgtggcatgtggcgtggaccacatggtgaccctggccaagtcattcatctaa

SEQ ID NO: 628 - DNA, 955 bp, Artificial
  cDNA Sequence
gaaagaaagagaaaaaggagggcgagtggcgagcaggggcctcggccgccacccacacgccccgaagcgtgctcgtcccccgcgcggggctcccggccgccgccctcggccatcggctgctccccggtggcccaggcctcggactccgcggccggcccggcgcggcccagcgccctcagggatcatggcccaggtagcagtgtccaccctgcctgttgaagaagagtcctcctcagagaccaggatggtggtgacattcctcgtgtctgccctcgaatccatgtgtaaagaactggccaagtccaaggcagaagtggcctgcatcgcagtgtacgaaacagacgtgtttgtcgtcggaaccgagagaggatgcgcttttgttaatgccaggacggattttcagaaagattttgcaaaatactgcgttgcagagggactgtgtgaggtgaaacctccctgccctgtgaacgggatgcaggtccactcgggcgaaacggaaatactcaggaaggcagtggaggactatttctgcttttgttatggtaaagccttagggacaacagtgatggtgcctgttccctatgagaagatgctgcgagaccagtcggctgtggtagtgcaggggcttccggaaggcgttgcctttcaacaccctgagaattacgaccttgcaaccctgaaatggattttggagaacaaagcagggatttcattcatcataaatagacccttcctaggaccagagagtcagctgggtggccctgggatggtaacagatgcggagagatccatagtatcaccaagtgaaagctgcggccccatcaatgtgaaaactgaacccatggaagattctggtgggtaccaagatgcttttagaatcaagtatcggccaagcgtggtagctcacgcctgtaatcccagcaatttgggaggccgaggcaggcggatcacttga

SEQ ID NO: 629 - DNA, 2109 bp, Artificial
  cDNA Sequence
ctttcaggaagccacccttcttccacaagcaatgaagtaatagaaatggaattaccaatggaagattccactccgctggtcccttcagaagaaccaaatgaggaccctgaagccgaggtgaaaatcgaaggaaacacaaattcatccagtgttacaaattctgcagcaggtgttgaagatcttaacatcgttcaagtgactgttccagataatgagaaggaaagattatcaagcattgaaaagattaaacagctaagagaacaagttaatgacctctttagccgaaaatttggtgaagcaattggcgtggatttccctgtgaaagttccctacaggaagatcacattcaaccctggctgtgtggtgattgatggcatgcccccgggggtggtattcaaggcccccggctatctggaaatcagttccatgaggaggatcttggaggcagctgagtttatcaaattcacagtcatcaggccgcttccagggcttgagctcagtaatgtgggaaaacgcaagatagaccaggagggccgtgtgtttcaagaaaagtgggagagagcgtatttcttcgtggaagtacagaatattccaacatgtctcatatgcaaacaaagcatgtctgtgtccaaagaatataacctaagacgccactatcaaaccaatcacagcaagcattatgaccagtatacggaaagaatgcgtgacgagaagcttcacgagctgaaaaaagggctcaggaagtatctcttaggctcgtcagacaccgagtgtcccgagcaaaaacaagtgtttgcaaacccaagtccaacccagaaatcccccgtgcagcctgtagaggacctagctgggaacttatgggagaagttacgtgaaaaaatcaggtcttttgtggcatattctatcgcaatcgatgagatcacggatataaataataccacccagttggccatattcatccgtggtgtcgatgagaatttcgatgtgtccgaagaacttctggacacggtgcccatgacgggtacaaaatctggcaacgagatctttttgcgtgttgagaagagcctgaaaaagttctgtatcaactggtcgagattagtaagcgtggcctccactggcaccccagcgatggtggatgccaataacgggcttgtcacaaaactgaagtccagggtggcgacgttctgcaagggtgcggaactgaagtccatctgttgtataattcatccggaatcactctgtgctcagaagttgaagatggaccacgtcatggacgtggtagtgaagtccgtgaactggatatgctcccggggactgaaccacagcgagttcacaaccttgctctatgagctggacagccagtatggtagcctcctgtactacacggagattaagtggctcagtcgcgggctcgtgctaaagagatttttcgaatccttggaagaaatcgactccttcatgtcatccagagggaaacccctgcctcaactgagctccatagattggatccgagacctggccttcttggttgacatgacgatgcatctgaacgctttgaacatctctctccaaggacactcccaaatcgtcacgcagatgtatgacctgatccgggcgttcctagcaaaactgtgcctctgggagactcatttgacgaggaataatctggcccactttcccaccctgaaattggtttccagaaatgaaagcgatggcctgaactacattcccaaaatcgcggaactcaagaccgaattccagaaaaggctgtctgatttcaaactctacgaaagcgaactgactctgttcagctccccgttctccacgaagatcgacagtgtgcacgaggagctccagatggaggttatcgacctgcaatgcaacacggtcctgaagacgaaatacgacaaggtgggaataccagaattctacaagtacctctggggtagctacccgaaatacaagcaccattgcgcaaagattctttccatgttcgggagcacctacatctgcgaacagctgttctccattatgaaactgagcaaaacaaaatactgctcccagttaaaggattcccagtgggattctgtactccacatcgcaacgtga

SEQ ID NO: 630 - DNA, 1336 bp, Artificial
  cDNA Sequence
atgggggacaccttcatccgtcacatcgccctgctgggctttgagaagcgcttcgtacccagccagcactatgtgagtagctggtacatgttcctggtgaaatggcaggacctgtcggagaaggtggtctaccggcgcttcaccgagatctacgagttccataaaaccttaaaagaaatgttccctattgaggcaggggcgatcaatccagagaacaggatcatcccccacctcccagctcccaagtggtttgacgggcagcgggccgccgagaaccaccagggcacacttaccgagtactgcagcacgctcatgagcctgcccaccaagatctcccgctgtccccacctccttgacttcttcaaggtgcgccctgatgacctcaagctccccacagacaaccagacaaaaaagccagagacatacttgatgcccaaagatggcaagagtaccgcgacagacatcaccggccccatcatcctgcagacgtaccgcgccattgccgactacgagaagacctcgggctccgagatggctctgtccacgggggacgtggtggaggtcgtggagaagagcgagagcggttggtggttctgtcagatgaaagcaaagcgaggctggatcccagcatccttcctcgagcccctggacagtcctgacgagacggaagaccctgagcccaactatgcaggtgagccatacgtcgccatcaaggcctacactgctgtggagggggacgaggtgtccctgctcgagggtgaagctgttgaggtcattcacaagctcctggacggctggtgggtcatcaggaaagacgacgtcacaggctactttccgtccatgtacctgcaaaagtcggggcaagacgtgtcccaggcccaacgccagatcaagcggggggcgccgccccgcaggtcgtccatccgcaacgcgcacagcatccatcagcggtcgcggaagcgcctcagccaggacgcctatcgccgcaacagcgtccgttttctgcagcagcgacgccgccaggcgcggccgggaccgcagagccccgggagcccgctcgaggaggagcggcagacgcagcgctctaaaccgcagccggcggtgcccccgcggccgagcgccgacctcatcctgaaccgctgcagcgagagcaccaagcggaagctggcgtctgccgtctgaggctggagcgcagtccccagctagcgtctcggcccttgccgccccgtgcctgtacatacgtgttctatagagcctggcgtctggacgccgagggcagccccgacccctgtccagcgcggctcccgccaccctcaataaatgttgcttggagtgg

SEQ ID NO: 631 - DNA, 378 bp, Artificial; identical to SEQ ID NO: 611
  cDNA Sequence

SEQ ID NO: 632 - DNA, 705 bp, Artificial
  cDNA Sequence
tttagtacagaacctgctaaggccatcaaacctattgatcggaagtcagtccatcagatttgctctgggccggtggtactgagtctaagcactgcggtgaagaagatagtaggaaacagtctggatgctggtgccactaatattgatctaaagcttaaggactatggaatggatctcattgaagtttcaggcaatggatgtggggtagaagaagaaaacttcgaaggcttaactctgaaacatcacacatctaagattcgagagtttgccgacctaactcgggttgaaacttttggctttcgggggaaagctctgagctcactttgtgcactgagtgatgtcaccatttctacctgccacgtatcggcgaaggttgggactcgactggtgtttgatcacgatgggaaaatcatccagaaaaccccctacccccaccccagagggaccacagtcagcgtgaagcagttattttctacgctacctgtgcgccataaggaatttcaaaggaatattaagaagaaacgtgcctgcttccccttcgccttctgccgtgattgtcagtttcttgagggctccccagccatgcttcctgtacagcctgcaaaactgactcctagaagtaccccaccccacccctgctccttggaggacaacgtgatcactgtattcagctctgtcaagaatggtccaggttcttctagatga

SEQ ID NO: 633 - DNA, 405 bp, Artificial; identical to SEQ ID NO: 614
  cDNA Sequence

SEQ ID NO: 634 - DNA, 4218 bp, Artificial
  cDNA Sequence
gcccggcggcagctgtccccgaggcgggaggagcccgaggggcgcgagccccgcatggattttatattggaagacatggatcttgctgccaacgagatcagcatttatgacaaactttcagagactgttgatttggtgagacagaccggccatcagtgtggcatgtcagagaaggcaattgaaaaatttatcagacagctgctggaaaagaatgaacctcagagaccccccccgcagtatcctctccttatagttgtgtataaggttctcgcaaccttgggattaatcttgctcactgcctactttgtgattcaacctttcagcccattagcacctgagccagtgctttctggagctcacacctggcgctcactcatccatcacattaggctgatgtccttgcccattgccaagaagtacatgtcagaaaataagggagttcctctgcatgggggtgatgaagacagaccctttccagactttgacccctggtggacaaacgactgtgagcagaatgagtcagagcccattcctgccaactgcactggctgtgcccagaaacacctgaaggtgatgctcctggaagacgccccaaggaaatttgagaggctccatccactggtgatcaagacgggaaagcccctgttggaggaagagattcagcattttttgtgccagtaccctgaggcgacagaaggcttctctgaagggtttttcgccaagtggtggcgctgctttcctgagcggtggttcccatttccttatccatggaggagacctctgaacagatcacaaatgttacgtgagctttttcctgttttcactcacctgccatttccaaaagatgcctctttaaacaagtgctcctttcttcacccagaacctgttgtggggagtaagatgcataagatgcctgacctatttatcattggcagcggtgaggccatgttgcagctcatccctcccttccagtgccgaagacattgtcagtctgtggccatgccaatagagccaggggatatcggctatgtcgacaccacccactggaaggtctacgttatagccagaggggtccagcctttggtcatctgcgatggaaccgctttctcagaactgtaggaaatagaactgtgcacaggaacagcttccagagccgaaaaccaggttgaaaggggaaaaataaaaacaaaaacgatgaaactgctttctgggggttggttacttagttacctgccctttgcatgcatgtgtgaaccagctgtgagctgcaaggcagtggccagagcctcgccctcctgactcttcctgcaggtggctcaggaaggattcagcctggccacttggctaggactctgccagcacccatctgagactgacctcttccgggcctttggacactatgaccttgatgctgcccttcaggcaggaaacagggctggtgcctttcttcacctgcatggccagcttccttccctggcagtggagagggcagccaacaggttctaatgtcagagccatcctttaccaggtgggcctgcttgtccctgtcttgcctgccacatcactctactttttggaaggccatggctgattaaagaagttcttgtagtttcccaagcaaagtggaatctagaaacagtgaaaaaagttcagataactttgaattgcattcaagaagtacacttctttcccattgtccgtggctcttggagtctccgtgatgccaggctagagtctgattatataataattcaaaatggtaactcccaaggtaatgctttcttccatttcatcaggttcttttatccccactgcaccccctccccttctcccttgcctatctggatggcttctcagaagctcggccctagtcctccctgccttggcggggccagagcccactactgctgaggcagcactgctctcgtcagctgtgttgcctttaccaagtgtcttcagagggttatgagttagagtagctggcctggggagagggtgcctccctgggtttgatctttagggtctgactttctgcagagaagatgttttacagatgtgtcaaagctgatgtaatgtggttgggggaggaaatccagacccaaagtgtttgtcagctgggtgtacaactgcctatgtgatcctctgtcttaaaatgatttctgtctgtgctgcgaaacaaagacaaggtgaggtgtttttcttttttgtaataatataaagctgtgtgtttctgattggatgattcactatgtgcattgttttctcctaagtgcttttagtaggtagcaatcaaatggtgtaaataaggatgttcttttcctgttccttttatttttttctctctttattattcttttattgacaccactagatagctggccactggtcatgccattgccaagatgaagaaaaagcaaactacactttggcctctggttctgaattgcagaaatcaaaggatgcagtaggtgtctatgtcagaattatggatcagaggcagacaatgacgagtgaagatggttgtgaagccctcttcattcctggaggagcctgcatctcatctctcaggccctctttctctgtgggtctcatgaacagcagtggggaccattgagcacttgaatggcctgtttgtctatgggcttgcaaaggacaagcagagttcacagagctcaggatagaaacatcagagcctcctccacgggcttcagtgaaactccgatgaactgtacctgagggaattttttcttaatcaaccccttgtgtggatgaatacaggaacaacaaaacttgtgtacgtatgaaagtcatgttgttaagcagttatgatttaagaggttttaagtcagagggatcatctggaggccggctttgtgcaagcttttacagccttctgcagtgtccttaccctggctgtacatggggaagggctatgtgtaaacaagtgctttagaggcctctgagagtttttaaaaatcagacccattaacaaaagagagggtttcttaggaacaaagcaactattttgattactgagatctctgttttgtttctgtgagttactctgtattcctttccccatttcactcttgcccttcacatcttaaatgtccataagaaacccttgcatgtgttggtattctgaggcatcccgtgggaaagtcccctaagtcccattttgtacttcaacaaaaaatgactgtagcagaagataagtggagacttttatggatatactactcattttacttaaaatctacccagttcagacttgaatgtaaacttgtattaggggaaaattctccaaagagggttttctacatacacagaagcagttcaacttctcaagttaattttgataagcagaatctactactggccagagcgacaggagtggctaggggttgccagccagtccctttctgatgatcaaggccctgcacagcaggatgccacaggatgcccctgccatctagctggaagcatcaaaagtccctctgtatgacccggtgtgggaaagagggttgtcaggatgagaaagtggggctgcagggtgacgataagaccacctaaccaactccccacctccaccaccacaataagaacaaaactgtagggctctaaagagagggggtggtttacaagtttattgagcatttactaggaagtgacatggcgatgacctctgtacatgagttaggttcactttcatgtggcctcccactacagagatgcgtatgcccagaagtcagctctctgaggagacaggctactttggccccagtttgaagcattctgtccaaatgtcctgagctctccagcagtcaagtagtgaatggataccatacttattatggttgatgaaaaaaggcagagcttatcctcaattttttttagggaagagaaggaataaaataaaagtggttcaagctgggcatggtggctcacacctgtaattgcagcactttgggaggctgaggcaggcagatcacttgaggtcaggagttcaagaccagcctggccaacagggtgaaaccccatctctactaaaaatacaaaaattacccaggcgtgatggtgggcgcctgtaatcccagctacacaggaagctgaggcaggaaaattgcttgaaccggggaggcggagattgcagtgagccaagattgtgccacttcattccagcctgggcgacagagcgaaactctgtcaaaggaaagg

SEQ ID NO: 635 - DNA, 2184 bp, Artificial
  cDNA Sequence
cctgggtgcaaccagtcacagctctgcagaggttactgtgattttgcccctgaaggatctgtccacaacttaggaactcacacagcttttggcctgagcccccgttaccaagagaaaggaggtttttgccaaggactccaaggggagtgcacttgatgctggtcgggacccaaagcgcccagccctccctgagacattgtgtgagtcgggctgggcctcaaacacggcccccactgccccaccccagccagggtggtgcttgtgtgggaaggactttaaatccagctgccagacccctggacgggagaaggagagacggctggccaccatgcacggctcctgcagtttcctgatgcttctgctgccgctactgctactgctggtggccaccacaggccccgttggagccctcacagatgaggagaaacgtttgatggtggagctgcacaacctctaccgggcccaggtatccccgacggcctcagacatgctgcacatgagatgggacgaggagctggccgccttcgccaaggcctacgcacggcagtgcgtgtggggccacaacaaggagcgcgggcgccgcggcgagaatctgttcgccatcacagacgagggcatggacgtgccgctggccatggaggagtggcaccacgagcgtgagcactacaacctcagcgccgccacctgcagcccaggccagatgtgcggccactacacgcaggtggtatgggccaagacagagaggatcggctgtggttcccacttctgtgagaagctccagggtgttgaggagaccaacatcgaattactggtgtgcaactatgagcctccggggaacgtgaaggggaaacggccctaccaggaggggactccgtgctcccaatgtccctctggctaccactgcaagaactccctctgtgaacccatcggaagcccggaagatgctcaggatttgccttacctggtaactgaggccccatccttccgggcgactgaagcatcagactctaggaaaatgggtactccttcttccctagcaacggggattccggctttcttggtaacagaggtctcaggctccctggcaaccaaggctctgcctgctgtggaaacccaggccccaacttccttagcaacgaaagacccgccctccatggcaacagaggctccaccttgcgtaacaactgaggtcccttccattttggcagctcacagcctgccctccttggatgaggagccagttaccttccccaaatcgacccatgttcctatcccaaaatcagcagacaaagtgacagacaaaacaaaagtgccctctaggagcccagagaactctctggaccccaagatgtccctgacaggggcaagggaactcctaccccatgcccaggaggaggctgaggctgaggctgagttgcctccttccagtgaggtcttggcctcagtttttccagcccaggacaagccaggtgagctgcaggccacactggaccacacggggcacacctcctccaagtccctgcccaatttccccaatacctctgccaccgctaatgccacgggtgggcgtgccctggctctgcagtcgtccttgccaggtgcagagggccctgacaagcctagcgtcgtgtcagggctgaactcgggccctggtcatgtgtggggccctctcctgggactactgctcctgcctcctctggtgttggctggaatcttctgaaggggataccactcaaagggtgaagaggtcagctgtcctcctgtcatcttccccaccctgtccccagcccctaaacaagatacttcttggttaaggccctccggaagggaaaggctacggggcatgtgcctcatcacaccatccatcctggaggcacaaggcctggctggctgcgagctcaggaggccgcctgaggactgcacaccgggcccacacctctcctgcccctccctcctgagtcctgggggtgggaggatttgagggagctcactgcctacctggcctggggctgtctgcccacacagcatgtgcgctctccctgagtgcctgtgtagctggggatggggattcctaggggcagatgaaggacaagccccactggagtggggttctttgagtgggggaggcagggacgagggaaggaaagtaactcctgactctccaataaaaacctgtccaacctg

SEQ ID NO: 636 - DNA, 2939 bp, Artificial
  cDNA Sequence
gcgggagccggagctggagccggagctcgcggcggagcggcggcgggggtcgaggctcgagctcgcgatccaccgcccgcgcaccgcgcacatcctcgccaccctcggcctgcggctcagccctcggcccgcaggatggatggcgggtcagggggcctggggtctggggacaacgccccgaccactgaggctcttttcgtggcactgggcgcgggcgtgacggcgctcagccatcccctgctctacgtgaagctgctcatccaggtgggtcatgagccgatgccccccacccttgggaccaatgtgctggggaggaaggtcctctatctgccgagcttcttcacctacgccaagtacatcgtgcaagtggatggtaagatagggctgttccgaggcctgagtccccggctgatgtccaacgccctctctactgtgactcggggtagcatgaagaaggttttccctccagatgagattgagcaggtttccaacaaggatgatatgaagacttccctgaagaaagttgtgaaggagacctcctacgagatgatgatgcagtgtgtgtcccgcatgttggcccaccccctgcatgtcatctcaatgcgctgcatggtccagtttgtgggacgggaggccaagtacagtggtgtgctgagctccattgggaagattttcaaagaggaagggctgctgggattcttcgttggattaatccctcacctcctgggcgatgtggttttcttgtggggctgtaacctgctggcccacttcatcaatgcctacctggtggatgacagcgtgagtgacaccccaggggggctgggaaacgaccagaatccaggttcccagttcagccaggccctggccatccggagctataccaagttcgtgatggggattgcagtgagcatgctgacctaccccttcctgctagttggcgacctcatggctgtgaacaactgcgggctgcaagctgggctccccccttactccccagtgttcaaatcctggattcactgctggaagtacctgagtgtgcaggtgagcaagcactggacggcggaggcctttcctgttctttgctacatccttcagctgaaatggttttgtggatgcttcattgcatgcaaagataagtggtttcatggaattcaatattgtgaggagatacttggtatctataaggcatttaagttttcatcttacataatttcagaaaggatttgaggtggctaagtgtgggtttattttaagattatacatcagacaagaccttttcttctttgagtcttaaagactcttaggataaggataagagaactctggcccaggtggcaggtggtaaagcccaagaactgcttctccttcaagtaacatgggctgaaaattcgaggtctgtaaccagttgagctgagttcctgggttgttagggcggctggcattggaaaccgactcctccctcctgcaggacattcctgggcccaggagagcctgtgggtggggctgggccacgtggggaactggcagcagtaccaaccttgggttctcgtgttctgtaccgaagctacctctccgtagctggagctcttgggcccagcagtcaggggtccaggctttggccgagggcagaaccttgccttttcctggccttgatttgcctcgcagtgaaatggggcagtggcccggagggagccagaactctgagtggcctcgaggctgagaagaggacagatgggagggaagcagggaggagagccgcagttcttcccagtggccctggtcagcgtgagtgtgtctcgtcctccctatgagcactgaaagagtcctagaccacttgggctctgaagcaagaggggcaatgagcctcctctctagggctctcctacagagtagccccaaagacacccctgggcaggaaatgaaccgctcccttctgcttcaacacaggcagattctgccctccagggatgtaggccgaggccgtccaccccggagctgggtctttgagctcctggacccttctttgcctgacactggccttcctctcggagggacaaggaagcgtggcctccctttcactcaccttacttttccttctggtccagggccagctcttccgaggctccagcctgcttttccgccgggtgtcatcaggatcatgctttgccctggagtaacctgaatcatctaaaaaacacggtctcaacctggccaccgtgggtgaggcctgaccaccttgggacacctgcaagacgactccaacccaacaacaaccagatgtgctccagcccagccgggcttcagttccatatttgccatgtgtctgtccagatgtggggttgagcgggggtggggctgcacccagtggattgggtcacccggcagacctagggaaggtgaggcgaggtggggagttggcagaatccccatacctcgcagatttgctgagtctgtcttgtgcagagggccagagaatggcttatgggggcccaggttggatggggaaaggctaatggggtcagaccccaccccgtctacccctccagtcagcccagcgcccatcctgcagctcagctgggagcatcattctcctgctttgtacatagggtgtggtcccctggcacgtggccaccatcatgtctaggcctatgctaggaggcaaatggccaggctctgcctgtgtttttctcaacactacttttctgatatgagggcagcacctgcctctgaatgggaaatcatgcaactactcagaatgtgtcctcctcatctaatgctcatctgtttaatggtgatgcctcgcgtacaggatctggttacctgtgcagttgtgaatacccagaggttgggcagatcagtgtctctagtcctacccagttttaaagttcatggtaagatttgacctcatctcccgcaaataaatgtattggtgatttgga

SEQ ID NO: 637 - DNA, 1523 bp, Artificial
  cDNA Sequence
ggctggagctgccttgtgacaggagcaggagggcttctgggtcagaggatcgtccgcctgttggtggaagagaaggaactgaaggagatcagggccttggacaaggccttcagaccagaattgagagaggaattttctaagctccagaacaagaccaagatgacagtgctagaaggagacattctggatcagtcatgcctgaagagagcctgccaggacatctcggtagtcatccacaccgcctctatcattgacatcttcggtgtcactcacagagagtctatcatgaacttcaacgtgaaaggtacccagctcctgttagaggcctgtgtccaagctagtgtgccagtcttcatctacaccagtagcatagaggtagccgggcccaactcctacaaggaaatcatccagaatggccatgaagaagagcctctggaaaacacatggcccgctccatacccacacagcaaaaagcttgctgagaaggctgtactggcggctaacgggtggaatctgaaaaacggcggcaccctgtacacttgtgccttacgacccatgtatatctatggggaaggaagccgattcctttctgctagtataaacgaggccctgaacaacaatgggatcctgtcaagtgttggaaagttctccactgttaacccagtctatgttggcaatgtggcctgggcccacattctggccttgagggccctgcaggaccccaagaaggccccaagcatccgaggacagttctactatatctcagatgacacgcctcaccaaagctatgataaccttaattacaccctgagcaaagagttcggcctccgccttgattccagatggagctttcctttatccctgatgtattggattggcttcctgctggaaatagtgagcttcctactcaggccaatttacacctatcgaccgcccttcaaccgccacatagtcacattgtcaaatagcgtattcaccttctcttataagaaggctcagcgagatctggcgtataagccactctacagctgggaggaagccaagcagaaaacggtggagtgggttggttcccttgtggaccggcacaaggagaccctgaagtccaagactcagtgatttaaggatgacagagatgtgcatgtgggtattgttaggagatgtcatcaagctccaccctcctggcctcatacagaaagtgacaagggcacaagctcaggtcctgctgcctccctttcatacaatggccaacttattgtattcctcatgtcatcaaaacctgcgcagtcattggcccaacaagaaggtttctgtcctaatcatataccagaggaaagaccatgtggtttgctgttaccaaatctcagtagctgattctgaacaatttagggactcttttaacttgagggtcgttttgactactagagctccatttctactcttaaatgagaaaggatttcctttctttttaatcttccattccttcacatagtttgataaaaagatcaataaatgtttgaatgttt

SEQ ID NO: 638 - DNA, 1266 bp, Artificial
  cDNA Sequence
gggatgaggcagtaaggacttggactcctctgtccagcttttaacaatctaagttacgccctcttctgggtcacgctagaatcagatctgctctccagcatcttctgtttcctggcaagtgtttcctgctactttggattggccacgatgggctggagctgccttgtgacaggagcaggagggcttctgggtcagaggatcgtccgcctgttggtggaagagaaggaactgaaggagatcagggccttggacaaggccttcagaccagaattgagagaggaattttctaaactccagaacaagatcaagctgacagtgctggaaggagacattctggatgagccattcctgaagagagcctgccaggacgtgtcggtcgtcatccacaccgcctgtatcattgatgtcttcggagtcactcacagacagtctatcatgaatgtcaatgtgaaaggtacccagctcctgttagaggcctgtgtccaagctagtgtgccagtcttcatctacaccagtagcatagaggtagccgggcccaactcctacaaggaaatcatccagaatggccatgaagaagagcctctggaaaacacatggcccgctccatacccacacagcaaaaagcttgctgagaaggctgtactggcggctaacgggtggaatctgaaaaacggcggcaccctgtacacttgtgccttacgacccatgtatatctatggggaaggaagccgattcctttctgctagtataaacgaggccctgaacaacaatgggatcctgtcaagtgttggaaagttctccactgttaacccagtctatgttggcaatgtggcctgggcccacattctggccttgagggccctgcaggaccccaagaaggccccaagcatccgaggacagttctactatatctcagatgacacgcctcaccaaagctatgataaccttaattacaccctgagcaaagagttcggcctccgccttgattccagatggagctttcctttatccctgatgtattggattggcttcctgctggaaatagtgagcttcctactcaggccaatttacacctatcgaccgcccttcaaccgccacatagtcacattgtcaaatagcgtattcaccttctcttataagaaggctcagcgagatctggcgtataagccactctacagctgggaggaagccaagcagaaaacggtggagtgggttggttcccttgtggaccggcacaaggagaccctgaagtccaagactcagtga

SEQ ID NO: 639 - DNA, 1122 bp, Artificial
  cDNA Sequence
atgacgggctggagctgccttgtgacaggagcaggagggtttctgggacagaggatcatccgcctcttggtgaaggagaaggagctgaaggagatcagggtcttggacaaggccttcggaccagaattgagagaggaattttctaaactccagaacaagaccaagctgacagtgctggaaggagacattctggatgagccattcctgaagagagcctgccaggacgtctcggtcatcatccacaccgcctgtatcattgatgtcttcggtgtcactcacagagagtctatcatgaatgtcaatgtgaaaggtacccagctcctgttagaggcctgtgtccaagctagtgtgccagtcttcatctacaccagtagcatagaggtagccgggcccaactcctacaaggaaatcatccagaatggccatgaagaagagcctctggaaaacacatggcccgctccatacccacacagcaaaaagcttgctgagaaggctgtactggcggctaacgggtggaatctgaaaaacggcggcaccctgtacacttgtgccttacgacccatgtatatctatggggaaggaagccgattcctttctgctagtataaacgaggccctgaacaacaatgggatcctgtcaagtgttggaaagttctccactgttaacccagtctatgttggcaatgtggcctgggcccacattctggccttgagggccctgcaggaccccaagaaggccccaagcatccgaggacagttctactatatctcagatgacacgcctcaccaaagctatgataaccttaattacaccctgagcaaagagttcggcctccgccttgattccagatggagctttcctttatccctgatgtattggattggcttcctgctggaaatagtgagcttcctactcaggccaatttacacctatcgaccgcccttcaaccgccacatagtcacattgtcaaatagcgtattcaccttctcttataagaaggctcagcgagatctggcgtataagccactctacagctgggaggaagccaagcagaaaacggtggagtgggttggttcccttgtggaccggcacaaggagaccctgaagtccaagactcagtga

SEQ ID NO: 640 - DNA, 1119 bp, Artificial
  cDNA Sequence
atgggctggagctgccttgtgacaggagcaggagggcttctgggtcagaggatcgtccgcctgttggtggaagagaaggaactgaaggagatcagggccttggacaaggccttcagaccagaattgagagaggaattttctaagctccagaacaggaccaagctgactgtacttgaaggagacattctggatgagccattcctgaaaagagcctgccaggacgtctcggtcgtcatccacaccgcctgtatcattgatgtctttggtgtcactcacagagagtccatcatgaatgtcaatgtgaaaggtacccagctactgttggaggcctgtgtccaagccagtgtgccagtcttcatctacaccagtagcatagaggtagccgggcccaactcctacaaggaaatcatccagaacggccacgaagaagagcctctggaaaacacatggcccactccatacccgtacagcaaaaagcttgctgagaaggctgtgctggcggctaatgggtggaatctaaaaaatggtgataccttgtacacttgtgcgttaagacccacatatatctatggggaaggaggcccattcctttctgccagtataaatgaggccctgaacaacaatgggatcctgtcaagtgttggaaagttctctacagtcaacccagtctatgttggcaacgtggcctgggcccacattctggccttgagggctctgcgggaccccaagaaggccccaagtgtccgaggtcaattctattacatctcagatgacacgcctcaccaaagctatgataaccttaattacatcctgagcaaagagtttggcctccgccttgattccagatggagccttcctttaaccctgatgtactggattggcttcctgctggaagtagtgagcttcctactcagcccaatttactcctatcaaccccccttcaaccgccacacagtcacattatcaaatagtgtgttcaccttctcttacaagaaggctcagcgagatctggcgtataagccactctacagctgggaggaagccaagcagaaaaccgtggagtgggttggttcccttgtggaccggcacaaggagaccctgaagtccaagactcagtga

SEQ ID NO: 641 - DNA, 873 bp, Artificial
  cDNA Sequence
atgacaggctggagctgccttgtgacaggagcaggagggtttctgggtcagaggatcatctgcctgttagtggaggagacagagctgaaggagatcagggccttggacaggccaaatcattccaatgacctaacctctgctcacacagaactccagaacaagatcaagctgacagtgctggaaggagacattctggatgagccattcctgaagagagcctgccaggacgtgtcggtcgtcatccacaccgcctgtatcattgatgtcttcggagtcactcacagacagtctatcatgaatgtcaatgtgaaagcatgctctttctgggcgggtacccagctcctgttggaggcctgtgtccaagctactgtgccagtcttcatctacaccagtaccctccagttagccgggcccaactcctacaaggaaatcattgagaatgcccatgaagaagactttctggaaaacacatggtctgctccatatccatacagcaaaaagcttgctgagaaggctgtgctggcagctaatgggtggactctgaaaaatggtgataccttgtacacttgtgccttaagacccatgtatatctatggggaaggaagcccatttcttactgccaatataaatgaggccctgaacaacaatgggatcctgtcgagtgtcagcaagttctccacagccaacccagtctatgttggcaacgtggcctgggcccacattctggccttgagggccttgcgggaccccaagaaggccccaagtgtcctaggacagttctactatatctcagatgacacgcctcaccaaagttatgataaccttaattacatcctgagcaaagagttcggcccctgccttgattccagatga

SEQ ID NO: 642 - DNA, 522 bp, Artificial
  cDNA Sequence
atgatgggctggagctgccttgtgacaggagcaggagggtttccgggtcagaggattgtcaacctcttggtgaaggagaaggagctaaaggagatcagggccttggacaaggccttcagatcaggattgagggagaaattttctaagctccagaacaagaccaagatgacagtgctagaaggagacattctggatcagtcatgcctgaagagagcctgccaggacatctcggtagtcatccacaccgcctctatcattgacatcttcggtgtcactcacagagagtctatcatgaacttcaacgtgaaaggtacccaacagctgttggaggcctgtgtccaagctagtgtgctagtcttcatccataccagcagcatacaggtagcctggcccaactcctacaaagagattttccagaatcgacacaaacaagagcatctggaaaacacatggtctgctccatatccatacagcaaaaacttgctgagaaggctgtgctggtggctaatgtgtggactctga

SEQ ID NO: 643 - DNA, 2851 bp, Artificial
  cDNA Sequence
actccagtctcctgggactttgactcgccgtactcggcgcgctcctgctgagggtcgccggagatgtcgctcggccgccttctaccaggagcctgatccgtgccgcccgccgcccggatgggaccaccagagtgctctaaagtctccagtgaatattgaattgctgaggattttgggaaaagacaaatcaaagttcccattccatggatcccttaggtgcaccttcccagtttgtggatgtggatacactaccaagctggggtgactcatgccaagatgaattaaattcctctgatactacagctgaaatatttcaggaagacactgttcgatcaccttttctttataataaggacgtcaatggaaaagtggttctttggaaaggagatgtggcattactgaactgtacagccattgtgaataccagcaatgaaagtctcacagataagaatcctgtgtcagaaagtatcttcatgcttgcagggcctgatttgaaggaagatctccagaaacttaaagggtgccgaacaggtgaagcaaaattgacaaaaggattcaatctagctgcccggttcatcattcacacagtgggacctaaatataaaagccgctatcgcacagcagctgagagttccctttatagctgctacagaaacgtacttcaactagcaaaagagcagtcaatgtcttctgttggcttctgtgtcatcaattctgcaaaacgtggttatcctttagaggatgcaacacacatagcacttcgcactgtaagaagattcctagagattcatggggaaaccattgaaaaagtagtatttgctgtctctgatcttgaagagggtacttaccaaaagctgctacctctctacttcccaaggtcattaaaagaggagaatcgatcattgccctacctacctgcagatattggaaatgcagaaggggagcctgtggtacctgaacgacagattagaataagtgagaaacctggtgctccagaagataaccaagaagaggaggatgaaggcttgggagttgatctctctttcattggctctcatgcttttgctcgaatggaaggagatattgacaagcaaagaaaactgatccttcagggacaattatcagaggcagctctgcagaagcagcatcaaagaaattataatcgctggttatgtcaagcaagatctgaggatctgtctgatattgcttctctaaaagccttataccaaacaggtgttgataactgtggtcgaacagtgatggtggtagttggaagaaacattcctgtaacattaatagatatggacaaggctctcttatatttcattcatgtaatggatcacattgctgtgaaggagtatgtattagtgtattttcacaccctgaccagcgaatacaatcacctggactccgacttcctgaagaaactctacgatgttgttgatgtcaagtacaagaggaatttgaaggctgtttattttgtacatcccacatttcgttcaaaggtgtcaacatggttttttaccaccttttctgtctcaggactgaaggacaaaatccaccatgtggacagcctccaccagctgttttctgccatatcaccagaacagattgactttcctccttttgtccttgaatatgatgccagggaaaacgggccttactatacatcatatcccccatcaccagatttgtgacctgccatctttcagtgcttcttggttcccaggatgccacttcctccacgaatagctacctgttgaagtgatattcattgttgctgtacagatccagagagccttttgtccccacctctctggtatttttttattgactgtatattttctggcacataagcaatctaaaaatggtaggccattctgaactgcacacattttaaatttgtatatttatatgaaatggaaatgttcatttttagattgttaatagaaattggggagcaacttttgagtatctttagtttcctgaaggacaccgaattctccattagataaaccaccaagactgttcacatcatctctctaacattgcacgcttcctttgtgtacttaagtgattctcgaaatatacagaaccaatgtatgctaaccagatgcattgtttgcttcagatccatggtgttaataccatgtatattttataaagataatttggctgtgttaaaagagaattacctgagtccaagaatgtggaaatgtatctgacaaaaaacatcaaaatcattagcaaaacataggacttagaatgttaatgtacaagttaagactaaagtttaaggactaaggttccttggattatatgacttgttaagattgccacagttccgatctcaacagtgtggggtgaaacaagaagactgtatcttcagcctttttcctataatcatggatgatttggtcttattcaaaaggaccgcacatattagtactcttaagagcatcttccaagactccagcagtgagcatttagagagtgtgttgtcttccagagtcatgaatgattttgtttagctatcaggtctactacctctaaggacatttcatagcagcatctcttgagttgcctgcatcagtgtggaggaagtgtgtcacagtgaacaaatccagggagctgataattggcaaaagaccacttttaccactcaggctctatttgtgccttagcttggttatgagtaaaaattagaattatgctgcctacctcacagaggtatcatgaagatagcatttagaaagggctttgttgtggtggggtatcttcagttagtttttaaatgggaataaatatatatgagggaatgctacacagcactcctcttgtccttgatacc

SEQ ID NO: 644 - DNA, 3851 bp, Artificial
  cDNA Sequence
atgcacagattgcttcacctgtggtatcagacatcacaacatggggctcaccaagcagtacctacgctatgttgctagtgcggtctttggcgttatcggcagccaaaaaggtaatattgtctttgtgacacttcgtggtgagaaaggacgttatgtggcagtaccagcttgtgaacacgttttcatctgggacttaaggaaaggagagaagattcttatccttcaggggcttaaacaagaagttacttgcttatgcccctccccagatgggctacacttagctgttgggtatgaggatgggtcgatccgaatcttcagtctcctgagtggggaaggaaatgtgaccttcaatggtcacaaagcagctatcactaccttgaagtatgatcagctaggaggcagactggcatctgggtccaaggacacagatattattgtatgggatgtgatcaatgaaagtggtctgtaccgtctaaaggggcacaaggatgccatcacacaagcattgtttctacgagaaaagaacctgctagttactagtgggaaagataccatggtgaaatggtgggaccttgatactcagcactgctttaaaacaatggttggccaccggactgaggtatgggggttggttctgttgtcagaagaaaagcgactcatcactggggcctcagacagtgaactgagggtatgggacatagcttatctgcaagagattgaagacccggaagaaccagaccccaagaaaatcaaaggatcttctcctggaatacaagatactcttgaggcagaggatggtgcctttgagacggatgaagcccctgaggatcgaatcctttcatgcagaaaagctggttccataatgcgggaaggaagagacagagttgtaaaccttgcagtcgacaagacaggcaggattcttgcttgccatggaactgactctgtgctagaattgttttgtatcctttccaaaaaggaaattcagaagaaaatggataagaagatgaagaaagctagaaagaaagcaaaattacattctagcaaaggagaggaggaagatcctgaggttaatgttgaaatgagtctgcaagatgaaatccagcgggtgactaatataaaaacttctgccaaaatcaagtcctttgacttgattcattcacctcacggagagttaaaggctgtcttcctgctgcagaacaacctggtggaattgtattcactgaatccatccttgcctactcctcagcctgtcaggacaagcagaatcactattgggggtcatcgcagtgatgtgcggactttgtcattcagctcagacaatattgctgttctttcagctgcagctgattccattaaaatatggaacaggtctacactgcagtgtattcgcacaatgacctgtgaatatgcactttgctcattctttgtacctggtgatagacaggtagtcataggaacaaagacagggaagctgcagctttatgacttggcttcagggaatctgctggagacaatagatgcacatgatggagctttgtggtccatgtccctctctccagatcagcgtggctttgtgacaggtggtgcagataaatctgtcaaattctgggattttgagttagtgaaagatgaaaatagtacccaaaagagactttctgtgaagcaaacccgaactttgcaactagatgaagatgttctgtgtgtcagttactctcccaatcaaaagctattggctgtgtctttgctggactgtactgtgaaaattttctacgttgatactttaaagttttttctgtcactgtatggacacaaactgcctgttatatgcatggacatctctcatgatggagcactcatagcaactggctccgctgataggaatgtgaaaatctggggtttggactttggggactgccacaagtctctctttgcacatgatgacagtgtgatgtacctacagtttgtacccaagtctcacctcttcttcactgccggaaaagatcataagattaaacagtgggatgcagacaaatttgaacacatacagactctggagggtcatcaccaggaaatatggtgtttggctgtaagccccagtggagactatgttgtatcatcgtcccatgacaaatctctgagactttgggagagaacaagggagcctcttattcttgaggaagaaagggagatggaaagagaagcagaatatgaggagagtgtggccaaagaagaccaaccagcagttccaggagagactcaaggtgacagttactttactggaaagaaaactattgaaacagtgaaagcagctgagaggattatggaggctattgagttgtaccgagaagaaactgcaaaaatgaaggaacacaaagccatttgtaaagctgcagggaaagaggttccacttcccagcaaccccatcctaatggcttatggcagtatctcaccttcagcttatgtattagagatttttaaagggatcaagtcgagtgagctggaagaatctctacttgtgctgcctttctcttatgtcccagacattcttaaactctttaacgaattcattcagctgggctctgatgttgaacttatatgccggtgcctcttcttcctccttaggattcactttggacagatcactagcaatcaaatgcttgtgccagtgatagaaaaattaagggaaacaactatttcaaaagtcagccaagtccgggatgttatcggcttcaatatggctggtcttgattatctcaagagggaatgcgaggcaaaaagtgaagttatgttttttgctgatgctactagccacttggaagagaagaagaggaagaggaaaaagagggagaagttgattctaacgttgacttagaactgaaatgtggtatctttttttttttcaactttttcctttaaaggactcctaaactaagcacagaagagttggcgtcatcttaaaaataccaaataacagaagatcgcattgcagatgatatcaggatgtggtttccagctttgcctgagggaattccaacatgagattatgggctggctccatttcttggacttaaaatgcattattagtttaaaaatctttctgtgctctcaaagcttgagccttgcagctcaagcttgttgttccctttatattctagcagggaataaataattgttttaattaggtatttgtttcattggagttgaaattaacatttcaaaagtttttcgtatttttttatggcagatgatttgtcatttatttatattaggttttactgcctattgagacaaccaggtgcataattgattgccctttggccataaaaatgcagtgtcatggatcttagagctaaaaaggactgtaaaaattacccagaacagcgtcctcagacttaaccttctgcaagttatgtctgtatataagaagattctaattgctaactgtttatacttttctgaataaaatagttgtttctaattaaaaagtagccaagctaagatgcctggctgggcttctgaggaattaatacactcgtgtgtgtgtgtgtgtgtgtgtgtgtgtgtgtgtgtgtatgtgtatgtgtatgtacacatacatatatatagttgacacttgaaaaatgcaggtggtaggggcactgacccacccctacgccccgcacagtcaaaaatctgcatataacttttgattccccaaagtcttaagtactagtagcctgttattgactgggagcctgactgatgtattatatatattgtatactgtattcttaaagtaagctagagaaaagaaaatgttacttagaaaatcataaggaagagaaaatatatttactgtgtttatcaatact

SEQ ID NO: 645 - DNA, 3416 bp, Artificial
  cDNA Sequence
atggggctcaccaagcagtacctacgctatgttgctagtgcggtctttggcgttatcggcagccaaaaaggtaatattgtctttgtgacacttcgtggtgagaaaggacgttatgtggcagtaccagcttgtgaacacgttttcatctgggacttaaggaaaggagagaaggggcttaaacaagaagttacttgcttatgcccctccccagatgggctacacttagctgttgggtatgaggatgggtcgatccgaatcttcagtctcctgagtggggaaggaaatgtgaccttcaatggtcacaaagcagctatcactaccttgaagtatgatcagctaggaggcagactggcatctgggtccaaggacacagatattattgtatgggatgtgatcaatgaaagtggtctgtaccgtctaaaggggcacaaggatgccatcacacaagcattgtttctacgagaaaagaacctgctagttactagtgggaaagataccatggtgaaatggtgggaccttgatactcagcactgctttaaaacaatggttggccaccggactgaggtatgggggttggttctgttgtcagaagaaaagcgactcatcactggggcctcagacagtgaactgagggtatgggacatagcttatctgcaagagattgaagacccggaagaaccagaccccaagaaaatcaaaggatcttctcctggaatacaagatactcttgaggcagaggatggtgcctttgagacggatgaagcccctgaggatgtaattcattttcatttcttaagtttaattgtgttgaataatgggaaacgaatcctttcatgcagaaaagctggttccataatgcgggaaggaagagacagagttgtaaaccttgcagtcgacaagacaggcaggattcttgcttgccatggaactgactctgtgctagaattgttttgtatcctttccaaaaaggaaattcagaagaaaatggataagaagatgaagaaagctagaaagaaagcaaaattacattctagcaaaggagaggaggaagatcctgaggttaatgttgaaatgagtctgcaagatgaaatccagcgggtgactaatataaaaacttctgccaaaatcaagtcctttgacttgattcattcacctcacggagagttaaaggctgtcttcctgctgcagaacaacctggtggaattgtattcactgaatccatccttgcctactcctcagcctgtcaggacaagcagaatcactattgggggtcatcgcagtgatgtgcggactttgtcattcagctcagacaatattgctgttctttcagctgcagctgattccattaaaatatggaacaggtctacactgcagtgtattcgcacaatgacctgtgaatatgcactttgctcattctttgtacctggtgatagacaggtagtcataggaacaaagacagggaagctgcagctttatgacttggcttcagggaatctgctggagacaatagatgcacatgatggagctttgtggtccatgtccctctctccagatcagcgtggctttgtgacaggtggtgcagataaatctgtcaaattctgggattttgagttagtgaaagatgaaaatagtacccaaaagagactttctgtgaagcaaacccgaactttgcaactagatgaagatgttctgtgtgtcagttactctcccaatcaaaagctattggctgtgtctttgctggactgtactgtgaaaattttctacgttgatactttaaaggatggagcactcatagcaactggctccgctgataggaatgtgaaaatctggggtttggactttggggactgccacaagtctctctttgcacatgatgacagtgtgatgtacctacagtttgtacccaagtctcacctcttcttcactgccggaaaagatcataagattaaacagtgggatgcagacaaatttgaacacatacagactctggagggtcatcaccaggaaatatggtgtttggctgtaagccccagtggagactatgttgtatcatcgtcccatgacaaatctctgagactttgggagagaacaagggagcctcttattcttgaggaagaaagggagatggaaagagaagcagaatatgaggagagtgtggccaaagaagaccaaccagcagttccaggagagactcaaggtgacagttactttactggaaagaaaactattgaaacagtgaaagcagctgagaggattatggaggctattgagttgtaccgagaagaaactgcaaaaatgaaggaacacaaagccatttgtaaagctgcagggaaagaggttccacttcccagcaaccccatcctaatggcttatggcagtatctcaccttcagcttatgtattagagatttttaaagggatcaagtcgagtgagctggaagaatctctacttgtgctgcctttctcttatgtcccagacattcttaaactctttaacgaattcattcagctgggctctgatgttgaacttatatgccggtgcctcttcttcctccttaggattcactttggacagatcactagcaatcaaatgcttgtgccagtgatagaaaaattaagggaaacaactatttcaaaagtcagccaagtccgggatgttatcggcttcaatatggctggtcttgattatctcaagagggaatgcgaggcaaaaagtgaagttatgttttttgctgatgctactagccacttggaagagaagaagaggaagaggaaaaagagggagaagttgattctaacgttgacttagaactgaaatgtggtatctttttttttttcaactttttcctttaaaggactcctaaactaagcacagaagagttggcgtcatcttaaaaataccaaataacagaagatcgcattgcagatgatatcaggatgtggtttccagctttgcctgagggaattccaacatgagattatgggctggctccatttcttggacttaaaatgcattattagtttaaaaatctttctgtgctctcaaagcttgagccttgcagctcaagcttgttgttccctttatattctagcagggaataaataattgttttaattaggtatttgtttcattggagttgaaattaacatttcaaaagtttttcgtatttttttatggcagatgatttgtcatttatttatattaggttttactgcctattgagacaaccaggtgcataattgattgccctttggccataaaaatgcagtgtcatggatcttagagctaaaaaggactgtaaaaattacccagaacagcgtcctcagacttaaccttctgcaagttatgtctgtatataagaagattctaattgctaactgtttatacttttctgaataaaatagttgtttctaatt

SEQ ID NO: 646 - DNA, 4519 bp, Artificial
  cDNA Sequence
agagcaggagagcatcatgaaggctcagccccaacatgagtctctggagcagaccacaaacaatgagatcaaagatgatgcagtcacaaaggctgattctcatgaaaagaaacccaagaagatgatggtggaagcagatttagaggacataaagaaaacacagcagcgcagtctaatggactggagttttactgaacattttaaaccgaaagtactgcttcaggtccttcaagaagcccataagcaatataggtgtgttgattcttactaccacacccaagacaactctttacttttagtctttcacaatccaatgaatagacaacgtttgcattgtgaatattggaacattgctctccactccaatgttggattcaggaattatttggaacttgttgcaaaatctattcaagattggattacaaaagaagaagctatatatcaggaatctaaaatgaatgagaaaatcatcaggaccagagctgagctggaattgaaatcttctgctaatgccaaacttacttctgctagcaaaattttttccattaaagaatctaaaagtaacaaaggaatcagcaaaacagagatatcagatcaagaaaaagaaaaagagaaggaaaagattcctttcattttagaaggctctctcaaggcatggaaagaagagcaacatcgattagcagaagaggagcgcttaagggaagaaaagaaagcagagaagaagggtaaagaagctggtaaaaagaaaggcaaggataacgcagagaaagaggatagtaggtctttgaagaaaaaatcaccttacaaggagaaatctaaagaagaacaagtcaagatccaagaagtaacagaagagtccccccaccaaccagaacctaagataacttacccgtttcacggatacaatatgggaaatatacccactcaaatctcagggtcaaattactacctgtatccttctgatggggggcagattgaagtggaaaagacaatgtttgaaaaaggcccaacttttatcaaagtgagagtggtaaaggacaaccacaattttatgattcatttaaatgaccctaaggaaattgtgaaaaaggaagagaaaggggattattatttagaagaggaagaagaaggagatgaggaacaaagtcttgaaacggaagtatcagatgcaaagaataaagctttcagcaagtttggatctttttctgccaccttagaaaatggaatctgcctctcgataagttactatggatcaaatggaatggcaccagaagataaggatcctgatttagaaacaatattgaatatcccttcagcactcactccaacagtggttcctgttatagtgaccgttcctcaaagcaaagctaaagggaaaataaaaggcaaagaaaaacccaaagaatcccttaaagaagaagaacacccaaaagaagaagagaaaaaggaagaagaagtagaaccagaacctgttttacaagagactttggatgttcccaccttccagagcctaaatgtgtcttgccccagtgggctcctgttgactttcattggacaagaatctacaggtcaatatgttatagatgaggaacccacctgggacatcatggtccgtcagagctacccccagagggtgaagcactatgagttctataaaacggtgatgccacccgcagagcaggaggcttcaagggttatcaccagtcaaggcactgttgtcaaatatatgttggatggatccacacagattctctttgcagatggtgctgtgagcaggagtcccaattcaggtcttatttgtcctccttctgaaatgccagcaacgcctcacagtggagatttgatggactctatttctcagcagaaatcagaaacgataccatctgagattaccaacacaaagaaaggaaaaagtcacaaaagtcagtcatcaatggcccataagggtgaaatccatgaccctcctccagaggcagttcaaactgtaactcctgtggaggttcacataggcacctggtttacaaccacacctgaaggaaatcggatcggcaccaaaggattagaaagaatagcagacttgaccccattgttatcctttcaggccacagatcctgtcaatggaacggttatgacaactcgagaagacaaagttgtcatagttgaaaggaaagatggtactcggatagtggatcatgctgatggtaccagaatcacaaccttttatcaagtttatgaagatcaaattattctgccagatgatcaagaaacaaccgagggtcctcggactgtcaccaggcaggtgaagtgtatgcgggtagaaagctcacgctatgccactgttatcgccaactgtgaggacagtagctgctgtgccacctttggagatggaacaactattattgcaaagccacagggaacataccaggtgttacctccaaacacaggctctctttatattgacaaggattgttcagctgtgtactgccatgagtcaagcagtaatatatactatccttttcaaaagcgtgagcagctgcgagctggcaggtacatcatgaggcatacttcagaggttatctgtgaggttctggatcctgagggaaacacttttcaggtcatggctgatggtagcatatcaactatattacctgaaaaaaaattggaagatgatttaaatgagaaaactgagggctatgatagtctgtcctctatgcaccttgaaaagaatcatcagcaaatctatggtgaacatgtccccaggttttttgttatgtatgctgatggatcaggaatggaacttcttcgagacagtgacatagaagaatatctatctttggcatataaagaatcaaatactgttgttctccaagagccagtgcaggaacagccaggcaccctaaccatcacagtccttcgccctttccatgaagcatcaccatggcaagtaaaaaaggaagatacaattgtccctcctaatctccggtcaaggtcatgggaaacatttccctcagttgagaaaaaaactccaggacctccgtttggtactcagatttggaaaggcctttgcattgagtccaaacagctagtgagtgccccgggtgccatactcaagagccccagtgtgctacagatgcgccaattcattcagcatgaggtcataaagaatgaggtgaaactgaggctgcaggtttcccttaaggattacataaactatattctaaagaaagaagatgagctgcaggaaatgatggttaaagattccagaactgaggaggagagaggcaatgctgctgatctcctcaagctggttatgtctttccctaaaatggaggaaactacaaaaagtcatgttactgaagttgcagctcacctaactgatttattcaagcagtctttggctacgcctccaaaatgcccaccagacacatttggtaaagatttctttgaaaagacatggagacacacagcatcctcaaaacgctggaaagaaaagatagacaaaacgaggaaggaaattgagacaacacagaattacctaatggatattaagaaccgcataataccacccttttttaaatctgaattgaaccagttatatcagtctcagtataatcacctggacagtctttccaaaaaactgccttcttttacaaagaaaaatgaagatgcaaacgaaacagctgttcaagatacatctgatcttaatctagatttcaagccacataaggtttcagaacagaaatcctcaagtgtgcctagtcttccaaaaccagagatttctgcagataagaaggatttcactgctcagaaccaaactgaaaatttaacaaaatctcctgaagaagcagaatcttatgagcccgtgaaaattccaacccagtccttgctgcaggatgttgcgggacaaacaagaaaagaaaaagtgaagttgcctcattatttgctgagttccaagcctaagtctcaacctcttgcaaaggtgcaagattctgttggaggaaaagtgaacacatcctctgttgcatctgctgccattaataatgcaaagtcatccctttttgggttccatcttctcccatcatcagtcaagtttggagtgcttaaggaaggacatacctatgccacagttgtaaagctcaagaatgttggagtggacttctgcaggtttaaagtaaagcagcccccacccagcacaggactgaaagtgacttacaaacctggacctgtggcagctggtatgcagacagaactgaatatagagttatttgccacagctgttggagaggatggggccaagggatcagcacacatctctcacaatatcgagattatgacagagcatgaggttctgttcctacctcccttaacaagtattttacctgttttaacaagcagcaattatgataaacgaccaaaagactttccccagggaaaagaaaatccaatggtccagagaacttctacaatttattcctccacacttggagtcttcatgtctcgtaaagtttctccacattag

SEQ ID NO: 647 - DNA, 225 bp, Artificial
  cDNA Sequence
aaggtgaagcctggagtcaatggatttggccatattctcctggtcacaagggctgctctgaactctggtaaagtggatattgtggccatcaatgaccccttcattgaccttaacttcatgccctacatgttccagtataattccacccatggcaaattccatggcactcccaaggctgagaacgggaagcttgtcatcaatggaaattccatcaccatcttctag

SEQ ID NO: 648 - DNA, 6243 bp, Artificial
  cDNA Sequence
agacccgtgcggtagcaacagcggcggcggccgcggcggctggccggactcaggtgtttcggacgctattgcccttcgcgccagccgtcgagtgggcagcagcgggactcagccgggcgccaggttcctgccaggcagcgccgggaagcgcgggcggccgagaactccttcctgctacttcgcccagcgccgctgcttcggcttcccagcgaagtgggagaccttcctccctgtttgcagacgtccgtgggagacccttattttttccaccgctaaggttaagagattctggaatagaagcgtcgaaggagatcaagtgaaccttctacaactcctcggatgtcgccagtctccctttcggggcggaagactacgtttgagcatctcactgaggtgcaggaatggaagaacccaccttgcagcttttctgcagtgtggcttgcctgatctacccctaggaatgaagaggaggcttgtaataatccgatgaagtacagatgttgaagaggatatcgcaggacctaaacttgtgatcgtttgggggaggtcacacacgtttctgagtgggaatggatgggcgtgaatgacgtgccctcttaaaaagcacaacagtcctttaagaggagcaaaattgagttttcccattttggccaagattttgaagacagttcaatgtattctacatttgacataagatgagaactttctaaagtattctctccaagagcgtaaacgatgactaccccagccctgctgcccctctctggacgtaggataccacctctgaacctggggccgccttccttcccacatcacagggctaccttgagactttctgagaagtttattcttctccttattcttagtgccttcatcactctgtgttttggggcattctttttccttccagactcttcaaaacacaaacgctttgatttgggtttagaagatgtgttaattccacatgtagatgccggtaaaggggctaaaaaccccggagtcttcctgatccatggacccgatgaacatagacacagggaagaggaagaacgtctgagaaataaaattcgagctgatcatgagaaggccttggaagaagcaaaagaaaaattaagaaagtcaagagaggaaattcgagcagaaattcagacagagaaaaataaggtagtccaagaaatgaagataaaagagaacaagccactgccaccagtccctattcccaaccttgtaggaatacgtggtggagacccagaagataatgacataagagagaaaagggaaaaaattaaagagatgatgaaacatgcttgggataactataggacatatgggtggggacataatgaactcagacctattgcaaggaaaggacactcccctaacatatttggaagttcacaaatgggtgctaccatagtagatgctttggataccctttatatcatgggacttcatgatgaattcctagatgggcaaagatggattgaagacaaccttgatttcagtgtgaattcagaggtgtctgtgtttgaagtcaacattcgatttattggaggcctacttgcagcatattacctatcaggagaggagatattcaagattaaagcagtgcaattggctgagaaactccttcctgcctttaacacacctactgggattccttgggcaatggtgaatttgaaaagtggagtagggcgaaactggggctgggcatctgcaggtagcagcattctggctgaatttggtacactacatatggagttcatccacctcagctacttgacaggggacctgacttactacaaaaaggttatgcacattcggaaactacttcagaaaatggatcgtccaaatggtctttatccaaattatttgaaccccagaacagggcgctggggtcagtatcatacatctgtcggtggcctgggagacagtttttatgaatacttactgaaagcatggttgatgtcagataaaacagaccatgaggcaagaaagatgtatgatgatgctattgaggctatagaaaaacatcttattaagaagtctcgtggaggtcttacctttattggagaatggaagaatgggcacttggaaaaaaagatggggcatttggcctgctttgctgggggaatgtttgcactaggagcagatggttccagagcagataaagctggtcattatttagagctaggggcagaaattgcacgtacttgtcatgagtcatatgacagaactgcattaaagctaggtcctgaatcattcaagtttgatggtgcagtggaggctgtggctgtccggcaggctgaaaagtattatatcctccgtccagaagtaattgaaacctattggtacctatggcgattcactcacgatccaagatacaggcagtggggctgggaagcagcactggccattgaaaagtattgccgagttaatggtgggttttctggagtcaaagatgtatattcctctactcctacacatgatgatgtacagcagagcttttttcttgctgaaacattaaaatatttgtatctgctgttctccggtgatgaccttttacctttagaccactgggtgtttaatacagaggctcaccctctgcctgtgttacatttagccaacaccacactttcaggtaatcctgctgttcgatgaaagcagttccagaaggaccattctcacctgtgttttgtttacatggaccactacagaaattagtttgaaggggcggcttttgaaaacctggacctctatgtcaacatgacagggtgaaactattccccctaagactgttcaacttgtagatacatcaactttgaaattattccattttatacctgaccaaaacatgttctgatatgtgtaggacagagacctggatgtgctttgatcgttaatgaggtggtcacatgagaaatgatacctgttactactgtattgtttttagagtcctgaagtctggaggctagacttcctgaaagcaagtcaagaatatagagcaccttgcaggagttcaagatggcctttggaaccaattatgtatttgtttcctcctacagtggagcagcattcaaatcaaatatttacatattgcttatcactttttctccattttaataatggaatgaactaaaataaacaagaacaaaagaatagtataattatatcagtaacaagaagactcaaaaaagaaacaggagtacctatccctatctgaattttcaagttccccattggatgaccagactggcaaccatttcaaatcccagtctatttcattgaaatttcttggttaagtttaattttctctgggggcatgatctcacaaagaatactcaagtctttttcttcttatggaatcatcgaaactgctatttatcataatcaccacttatgagcctgggtttgggattttgtgcatgtagttcagtctagtgttggtagcatgacagaaagtggggaaaatgccgcagtttgttgccttgaaacctaagagcaatccttggttttgttgctacattatttttccagaccaacacatctaccaagtaaattttattcactttaatttcataataaagttagtagagtcactcaacttacaactttatttatgtggcttggcaaaaatcactataaggcagctctaaatttgccttgataagctaaataaattacttttataacttactaaagcagaacaaacagtgaaactttctaaaatattctatctggaatagggacaggggatcttttatttataatctcatcagatgagtgagttgttcacagatattttatgtttttttaattttctccaagaatatttatagaattccaaagaatcagaatagtttcaaaataattttcagtgataaaagagtgttgtaattaatcatattacactaaaattgggatacatctaaggaactttatcttactatcagtaggttttgcattgatatttctttttaaataaactactagttctttatattttgacaaaaagaacttaaattttatcaggaactgtaagataaatatctagtgcttataaattttctgtccttaaatttatgtgacagtgcaagatacttttgctcttttcatttaatataggcatcttccattgacattaataaaacttagaaacagtataattagtataacatttactctgaatttgaagatttcctgaaacaaagtttgtacaagaagcccaccttggaattctgaaggcttattttcttgtttgataagcttttcttttaaacttaggttttaagttggggaaagacttaattaactaatatagtattttctaaggttgatcatcttataccacgaatcgttaattttgacagttctactgatccgtaaatgataaccactgcaaattttttcagtataaaatttttcactgcaaaaaaatttcagtagaaaataaggatgcagggccagttacaatagtccttaagagagttaaattatagcacatgttttgacattgtaatatcttttactacttgaacatttaaatttctaaatgagaaaggtatatatattactgtaactgtagaagggaaaagggaaagtatttggttctaaaaaatgttagccttcctcgtaaaagtagcacaagcccacttatgaatcactgagaaaaagtgaaaaacttgagttggcaaagatgcagagcagcagtgcagatggcaatgaactctctgaattctcttttaccttatttagaagaatgcagagtaaagggaccttcttggttctgcaggaacttctcaagggatgaggagacagaacccctacttccaagtgctctatttgtattacccagatgactgaagcttaagagaaggcagggaagtatacaagcagagccagttctggtacaaacaaagaatttgacagggacaatggaagggtcttcttcaccactccttaccttctatgtgatggaaagactagagcttataaaagtacttccatttttttattctcctgaataccaaaggcaattaaagtcagctacaaatgacttgccagtgtcatgttttatttttgttatagatttttaaattatttccttcaagatcaattcttatcccatataatgcttagcttccaagaatattctttactttcttctgtcttttacagctctttgcattttgtagaccttaatactcaggttaaatattcattgcatttataagatcttctgcaaaaagcccagaaatggtccttttcaggtgcctcttcaaagagctgacaccttaccttgtgcctttggcacaaatgtgcagaatagatacatcagttggtgcataatcgaaaaaaataggaattttgaacactgttcttccttctacatttatttctcttcattttagaatcacactttttatgttaaaccagattattattattattattattcaaccagtattaagttgttaaaaccaagggaatggggccctaaccaaaaagaagtctcaactcagaaaaataagtccccagtcaggtggttcttactttcttgtgggttgcacattttgtatctctctaacatcagcgtattcctgactttaagcaggtgtttatatgtaaaataaaacctgggtatcgaagggaaatgcattctttttatggagtattgaccctgatcctctatgatgtcatatagagcaactcagggctatacttgctagattttaaccaagcagtttgaaatattaatcatcatcctctcatcttctccactctccattgccaaagtctttgtcaaaactccaaatttgttgataaaagattgtgtttgccattctcatttataatgcagtttctccttaagcctggagttttttgaatgagtgcatgagtaaatgagagaatgtgtgaacgaacatttatgaagtatctaacatgtgccaagcattgtgcctggcactttcaatcattagaatgttttatgtgattccacagcattttctgtatgagagtagctcacaacattttaaatgtttccaatatgaatcgtgttacaaaattcttaattttatatttcatataaattaaagaggaaaaagaaaaggtttataatatattttaaaacaatgtgttactgtataatacaactataattgtagttaataactaaaacctcttgaaaatgtcaaagaaatacttgatttctgatgcaactttgactaaaatatttacttt

SEQ ID NO: 649 - DNA, 1017 bp, Artificial
  cDNA Sequence
atggggaaaaaacagaacagaaaaactggaaactctaaaacgcagagcgcctctcctcctccaaaggaacgcagttcctcaccagcaacagaacaaagctggatggagaatgattttgacgagctgagtgaagaaggcttcagacgatcaaattactctgagctacgggaggacattcaaaccaaaggcaaagaagttgaaaactttgaaaaaaatttagaagaatgtataactagaataaccaatacagagaagtgcttaaaggagctgatggagctgaaaaccaaggctcgagaactacgtgaagaatgcagaagcctcaggagccgatgcgatcaactggaagaaagggtatcagcaatggaagatgaaatgaatgaaatgaagcgagaagggaagtttagagaaaaaagaataaaaagaaatgagcaaagcctccaagaaatatgggactatgtgaaaagaccaaatctacgtctgattggtgtacctgaaagtgatgtggagaatggaaccaagttggaaaacactctgcaggatattatccaggagaacttccccaatctagcaaggcaggccaacgttcagattcaggaaatacagagaacgccacaaagatactcctcgagaagagcaactccaagacacataattgtcagattcaccaaagttgaaatgaaggaaaaaatgttaagggcagccagagagaaaggtcgggttaccctcaaaggaaagcccatcagactaacagcggatctctcggcagaaaccctacaagccagaagagagtgggggccaatattcaacattcttaaagaaaagaattttcaacccagaatttcatatccagccaaactaagcttcataagtgaaggagaaataaaatactttatagacaagcaaatgctgagagattttgtcaccaccaggcctgccctaaaagagctcctgaaggaagcgctaaacatggaaaggaacaaccggtaccagccgctgcaaaatcatgccaaaatgtaa

SEQ ID NO: 650 - DNA, 3287 bp, Artificial
  cDNA Sequence
tctgagcagagcactggttcagattctgaggtcctcactgagcggacttcctgctccttcagtactcacactgacctggcctctggtgctgcaggccctgtgcctgctgccatgtcttccatggaggagattcaggtggagctgcaatgtgctgacctctggaagcggttccatgatattggaactgaaatgatcatcaccaaagcaggcaggaggatgtttcctgccatgagagtgaaaatcactggcctagatccacatcagcagtactacatagcaatggacattgtgcctgtggacaataaaagatacagatatgtgtatcatagctccaagtggatggtggctggcaatgctgattcccctgtgcccccaagagtttatatacaccctgattctctagcttctggagacacctggatgagacaggtggtcagttttgacaaactcaagcttaccaacaatgagttggatgatcaaggacatatcattctgcactctatgcacaaataccagcctcgagttcatgtgattcgcaaagacttcagcagtgacctttcacccactaagcctgttcctgttggggatggggtgaaaacgttcaactttcctgagactgtgttcaccacagttacggcctatcagaatcagcagattaccagattaaaaattgaccgaaacccttttgctaaaggattcagagattctgggagaaacagaactggacttgaagccatcatggagacatatgcattctggagacctcctgtgcgcacactcaccttcgaagacttcaccaccatgcagaagcagcaaggaggcagcacaggcacttccccaaccacctccagcactgggacaccatccccttcggcttcttctcatcttttatctccatcctgttctcctccaacttttcatctggcccccaacactttcaatgtgggctgccgagaaagccagctgtgtaatctaaacctctctgattatccaccatgtgcccgaagcaacatggctgccttgcagagctacccagggctgagtgacagtggctacaacaggcttcagagtggcaccacttcagccactcagccctctgaaaccttcatgcctcagaggactccatccctgatctcaggaataccaactcctccctcgttgcctggcaacagcaagatggaagcctacggtggccagctggggtcctttcccacttcccagtttcagtatgtcatgcaggcaggcaatgctgcctccagctcctcatcaccacacatgttcgggggcagccacatgcagcagagctcctacaatgccttctcccttcacaacccttacaacctgtatggatacaatttccccacttcccctaggctagctgcaagcccggaaaaactgagcgcctctcaaagcactttactctgttcttctccttccaacggggcctttggagagaggcagtacctgccgtcagggatggagcacagcatgcacatgattagcccttcacccaataaccaacaggcaaccaacacttgtgatggccggcagtatggggcagttccaggctcctcctcccagatgtccgtgcacatggtttaaaggccagtccaaacaccacggagcatttggcaatcaaggccccagagtctccgtggtcagatcctcctctttgggagtccagtgtctttgaaaaacaggaaccgtgttttttttttttttttttttctggccgaagacatatacccaagaacaagagatacctttaagccagtgaaggatacttgcgatagaatcatccgcaactcagtggccattcttctgccttcccagaccttagttttataaagcattgtctgttccagagtggcctttgaagagactgaataatcacttcgtcataatgttaagggagatgctagtgtgtggcagccatgaaaagttacacatacacacccacatacagacagacctacctatacatacgtgcacacacacatacatattcatacacaattcatacacatgcaatcatacatgcacactgactctgaactgggtgaactctgtggagggaggcccagaatgggtgctttcaccaagaatttgtctgtgtacaactctagatggagtgggccagcagtagctgccagtctttctcccctgcagcttcctctgcttctggaatgaaccatgtatcctggagaccctcccaatggatgagagtggaaagacatcagtacaactggacttggcttccggaaaaagattgcttttgaactttggctctcttcacttgtatgctatcattgatattcccagtggtgcccgtggaaagagggagaaagagaagctgaacaggagaaagacaaacagaaagaatagagaacaggaacgaggtggagagcaagactgacagagaaagtgtgagcaatgatgagaattttaattcaccaaggagacgtgtttttggtttgtccccccaaaccccgcccgccccactacaggttatggaaagaatcatggcattactgaggagtaaacctctctggcacactgagcatggtcagggcattggtcagagggacagagcaaggaatgcatcctgagcccacagctttgaccactgtgatccagaagagaggtgcactacgtgggaagtgctgattccacagcatgcagcctggtaggggaaggaaaataaaagggtgtgaagaaggaatagttttataatctcggaagatgataccaagagcagaggcaacaaatagaggcctggcctccaggtgccggatccagacacctgacctagaatgcctgcccgctatccctgtggcaggaaatatcccctcatgtcccagggaattgcagatgggtcttctatacccttctacctgcccttagatctccatttttatcaaatagtacattgcattttgaagttttgggttttgtccttcatctttccctttcccttcaaatcttttaatggtaagaaagcaagtgaagcttggtgcaagctaaaatttttaaatggtgtggaaatgcaaataataccaagtaaaataatacagatattattaaagtttctggttttgaggtgttgtagataaatgtatttatgtgcctagtggggaatccaatattatgaatatgaaaaagggggcaataaaagggtatgtaaaatatgtatgaagaaaaggtgtacaaaaatttgcccttatgcacggaactctgtttctaagtgccaagcacagaaagccgctaaataaaatctttgcaattgt

SEQ ID NO: 651 - DNA, 1378 bp, Artificial
  cDNA Sequence
ggtgtgtttcctaacacctccggcagtgagccaggctttgagtggctgcgtctaaacacttctttccctgaggactggaagacattagaataagctccagacaattcaaacattgagattcctgggaactaccagatagtagcatcagttcaccaagaaatgaagctggtgaggcagtgaaaatccagggcctagaaagctgggaatgccatgacgtgggcacattgaaagacaagaggcaggcatgatcagccttgaactttaggaagatcccaggaagctgatggaagacaagatgtggagtgaatgtgaaggtccagaaatgtccttggtgtgtttgacagactttcaggcccatgcgcgagagcagctgtctaagtcaactcgggattttattgaaggtggagcagatgacagcatcacgcgggatgacaacattgcagcatttaaaagaattcgcctccgtccgcggtacctgagagatgtgtctgaggtggacaccagaaccacaatccaaggggaggagatcagtgcccctatttgtatcgcacccacagggttccactgccttgtctggcctgatggggaaatgagcacagcaagagctgcccaagcggctggtatctgctacatcaccagcacatttgccagctgtagccttgaagacattgtcattgcagctcccgaaggcctccgatggttccaactctatgtgcatccagacctgcagctgaacaaacagttgatccagagggtagaatccctaggtttcaaagctttggtaataactttggatacacctgtatgtggcaacaggcgacatgacattcgaaaccagttgaggaggaacttaacactaacagatcttcaatcacctaaaaagggaaatgcaataccttatttccagatgactcctatcagcacttctctctgctggaatgatctctcctggtttcagagcataactcgattgcccatcatcctgaaagggattttgacaaaagaggatgcagagttagctgtgaagcacaatgtccagggtatcattgtttccaaccatggtgggaggcagcttgatgaggttcttgcttcaattgatgctttgacagaagtggtggctgctgtaaaggggaaaattgaagtctacctggatggcggggtccgaactggcaatgatgtgctgaaggctctggcccttggagctaagtgcatttttcttgggagaccaatcctatggggccttgcctgcaagggtgaacatggtgttaaggaagttttgaacattttaacaaatgagttccacacttccatggcccttacaggctgccggtcggtcgctgagatcaatcgaaacttggtccagttttccaggctgtaa

SEQ ID NO: 652 - DNA, 474 bp, Artificial
  cDNA Sequence
atggaggttggcaagaacaagcgccttatgaaaggcggcaaaaagggagccaagaagaaagtggtcgatccattttcgaagaaggattggtatgatgtgaaagcacttgctatgttcaatataagaaatactggaaagatgctagtcaccaggacccaaggaatcaaaattgcatctgatggctttgagggttgtgtgcttgaagtgagtcttactgatttgcagaatgatgaagttgcatttagaaaattcaagctgattactgaagatgttcaaaaactgcctaacttccatggcatggatcttacccatgacaaaatgtgttccatgatcaaaaaatggcagacaatgattcttcatctgttctgtgttggttttactaaaaaatgcaacaatcaggtacggaagacctcttatgctcagcaccaacaggtcctccaaatctggaagaagatgatggaaatcatgacctga

SEQ ID NO: 653 - DNA, 1185 bp, Artificial
  cDNA Sequence
aagatataaaagctccagaaacgttgactgggaccactggagacactgaagaaggcaggggcccttagagtcttggttgccaaacagatttgcagatcaaggagaacccaggagtttcaaagaagcgctagtaaggtctctgagatccttgcactagctacatcctcagggtaggaggaagatggcttccagaagcatgcggctgctcctattgctgagctgcctggccaaaacaggagtcctgggtgatatcatcatgagacccagctgtgctcctggatggttttaccacaagtccaattgctatggttacttcaggaagctgaggaactggtctgatgccgagctcgagtgtcagtcttacggaaacggagcccacctggcatctatcctgagtttaaaggaagccagcaccatagcagagtacataagtggctatcagagaagccagccgatatggattggcctgcacgacccacagaagaggcagcagtggcagtggattgatggggccatgtatctgtacagatcctggtctggcaagtccatgggtgggaacaagcactgtgctgagatgagctccaataacaactttttaacttggagcagcaacgaatgcaacaagcgccaacacttcctgtgcaagtaccgaccatagagcaagaatcaagattctgctaactcctgcacagccccgtcctcttcctttctgctagcctggctaaatctgctcattatttcagaggggaaacctagcaaactaagagtgataagggccctactacactggcttttttaggcttagagacagaaactttagcattggcccagtagtggcttctagctctaaatgtttgccccgccatccctttccacagtatccttcttccctcctcccctgtctctggctgtctcgagcagtctagaagagtgcatctccagcctatgaaacagctgggtctttggccataagaagtaaagatttgaagacagaaggaagaaactcaggagtaagcttctagaccccttcagcttctacacccttctgccctctctccattgcctgcaccccaccccagccactcaactcctgcttgtttttcctttggccatgggaaggtttaccagtagaatccttgctaggttgatgtgggccatacattcctttaataaaccattgtgtac

SEQ ID NO: 654 - DNA, 776 bp, Artificial
  cDNA Sequence
ataagacttttatggatggattgtttttctcaaataatattatcgctttgtgactaaagtaaagattattaattcctgaggcaagaagatataaaagctccagaaacgttgactgggaccactggagacactgaagaaggcaggggcccttagagtcttggttgccaaacagaatgcccatatccgtcttacctgtgaggaagcttgccttgggcgccctctgctggccctcctgaagctaacaggggcgagtgctcggtggtttacaaattgcctccatgcagactatgaaactgttcagcctgctatagttagatctctggcactggcccaggaggtcttgcagatttgcagatcaaggagaacccaggagtttcaaagaagcgctagtaaggtctctgagatccttgcactagctacatcctcagggtaggaggaagatggcttccagaagcatgcggctgctcctattgctgagctgcctggccaaaacaggagtcctgggtgatatcatcatgagacccagctgtgctcctggatggttttaccacaagtccaattgctatggttacttcaggaagctgaggaactggtctgatgccgagctcgagtgtcagtcttacggaaacggagcccacctggcatctatcctgagtttaaaggaagccagcaccatagcagagtacataagtggctatcagagaagccagccgatatggattggcctgcacgacccacagaagccactcaactcctgcttgtttttcctttggcca

SEQ ID NO: 655 - DNA, 1911 bp, Artificial
  cDNA Sequence
gaggaggaggaggagatgactggggagcgggagctggagaatactgcccagttactctagcgcgccaggccgaaccgcagcttcttggcttaggtacttctactcacagcggccgattccgaggccaactccagcaatggcttttgcaaatctgcggaaagtgctcatcagtgacagcctggacccttgctgccggaagatcttgcaagatggagggctgcaggtggtggaaaagcagaaccttagcaaagaggagctgatagcggagctgcaggactgtgaaggccttattgttcgctctgccaccaaggtgaccgctgatgtcatcaacgcagctgagaaactccaggtggtgggcagggctggcacaggtgtggacaatgtggatctggaggccgcaacaaggaagggcatcttggttatgaacacccccaatgggaacagcctcagtgccgcagaactcacttgtggaatgatcatgtgcctggccaggcagattccccaggcgacggcttcgatgaaggacggcaaatgggagcggaagaagttcatgggaacagagctgaatggaaagaccctgggaattcttggcctgggcaggattgggagagaggtagctacccggatgcagtcctttgggatgaagactatagggtatgaccccatcatttccccagaggtctcggcctcctttggtgttcagcagctgcccctggaggagatctggcctctctgtgatttcatcactgtgcacactcctctcctgccctccacgacaggcttgctgaatgacaacacctttgcccagtgcaagaagggggtgcgtgtggtgaactgtgcccgtggagggatcgtggacgaaggcgccctgctccgggccctgcagtctggccagtgtgccggggctgcactggacgtgtttacggaagagccgccacgggaccgggccttggtggaccatgagaatgtcatcagctgtccccacctgggtgccagcaccaaggaggctcagagccgctgtggggaggaaattgctgttcagttcgtggacatggtgaaggggaaatctctcacgggggttgtgaatgcccaggcccttaccagtgccttctctccacacaccaagccttggattggtctggcagaagctctggggacactgatgcgagcctgggctgggtcccccaaagggaccatccaggtgataacacagggaacatccctgaagaatgctgggaactgcctaagccccgcagtcattgtcggcctcctgaaagaggcttccaagcaggcggatgtgaacttggtgaacgctaagctgctggtgaaagaggctggcctcaatgtcaccacctcccacagccctgctgcaccaggggagcaaggcttcggggaatgcctcctggccgtggccctggcaggcgccccttaccaggctgtgggcttggtccaaggcactacgcctgtactgcaggggctcaatggagctgtcttcaggccagaagtgcctctccgcagggacctgcccctgctcctattccggactcagacctctgaccctgcaatgctgcctaccatgattggcctcctggcagaggcaggcgtgcggctgctgtcctaccagacttcactggtgtcagatggggagacctggcacgtcatgggcatctcctccttgctgcccagcctggaagcgtggaagcagcatgtgactgaagccttccagttccacttctaaccttggagctcactggtccctgcctctggggcttttctgaagaaacccacccactgtgatcaatagggagagaaaatccacattcttgggctgaacgcgggcctctgacactgcttacactgcactctgaccctgtagtacagcaataaccgtctaataaagagcctaccccc

SEQ ID NO: 656 - DNA, 2041 bp, Artificial
  cDNA Sequence
ggtttctgctgggtttctgaactgctgggtttctgcttgctcctctggagatgcagcgtctgttgactccagtgaagcgcattctgcaactgacaagagcggtgcaggaaacctccctcacacctgctcgcctgctcccagtagcccaccaaaggttttctacagcctctgctgtccccctggccaaaacagatacttggccaaaggacgtgggcatcctggccctggaggtctacttcccagcccaatatgtggaccaaactgacctggagaagtataacaatgtggaagcaggaaagtatacagtgggcttgggccagacccgtatgggcttctgctcagtccaagaggacatcaactccctgtgcctgacggtggtgcaacggctgatggagcgcatacagctcccatgggactctgtgggcaggctggaagtaggcactgagaccatcattgacaagtccaaagctgtcaaaacagtgctcatggaactcttccaggattcaggcaatactgatattgagggcatagataccaccaatgcctgctacggtggtactgcctccctcttcaatgctgccaactggatggagtccagttcctgggatggtcgttatgccatggtggtctgtggagacattgccgtctatcccagtggtaatgctcgtcccacaggtggggccggagctgtggctatgctgattgggcccaaggcccctctggccctggagcgagggctgaggggaacccatatggagaatgtgtatgacttctacaaaccaaatttggcctcggagtacccaatagtggatgggaagctttccatccagtgctacttgcgggccttggatcgatgttacacatcataccgtaaaaaaatccagaatcagtggaagcaagctggcagcgatcgacccttcacccttgacgatttacagtacatgatctttcatacacccttttgcaagatggtccagaagtctctggctcgcctgatgttcaatgacttcctgtcagccagcagtgacacacaaaccagcttatataaggggctggaggctttcggggggctaaagctggaagacacctacaccaacaaggacctggataaagcacttctaaaggcctctcaggacatgttcgacaagaaaaccaaggcttccctttacctctccactcacaatgggaacatgtacacctcatccctgtacgggtgcctggcctcgcttctgtcccaccactctgcccaagaactggctggctccaggattggtgccttctcttatggctctggtttagcagcaagtttcttttcatttcgagtatcccaggatgctgctccaggctctcccctggacaagttggtgtccagcacatcagacctgccaaaacgcctagcctcccgaaagtgtgtgtctcctgaggagttcacagaaataatgaaccaaagagagcaattctaccataaggtgaatttctccccacctggtgacacaaacagccttttcccaggtacttggtacctggagcgagtggacgagcagcatcgccgaaagtatgcccggcgtcccgtctaaaggtgttctgcagatccatggaaagcttcctgggaaacgtatgctagcagagcttctccccgtgaatcatatttttaagatcccactcttagctggtaaatgaatttgaatcgacatagtagccccataagcatcagccctgtagagtgaggagccatctctagcgggcccttcattcctctccatgctgcaatcactgtcctgggcttatggtgctatggactaggggtcctttgtgaaagagcaagatggagcaatggagagaagacctcttcctgaatcactggactccagaaatgtgcatgcagatcagctgttgccttcaagatccagataaactttcctgtcatgtgttagaactttattattattaatattgttaaacttctgtgctgttcctgtgaatctccaaattttgtaccttgttctaagctaatatatagcaattaaaaagagagaaagag

SEQ ID NO: 657 - DNA, 2782 bp, Artificial
  cDNA Sequence
cccttctcaagatggcgctgcactcaatgcggaaagcgcgtgagcgctggagcttcatccgggcacttcataagggatccgcagctgctcccgctctccagaaagacagcaagaagcgagtattttccggcattcaacctacaggaatcctccacctgggcaattacctgggagccattgagagctgggtgaggttacaggatgaatatgactctgtattatacagcattgttgacctccactccattactgtcccccaagacccagctgtccttcggcagagcatcctggacatgactgctgttcttcttgcctgtggcataaacccggaaaaaagcatccttttccaacaatctcaggtgtctgaacacacacaattaagttggatcctttcctgcatggtcagactacctcgattacaacatttacatcagtggaaggcaaagactaccaagcagaagcacgatggcacggtgggcctgctcacatacccagtactccaggcagccgacattctgttgtacaagtccacacacgttcctgttggggaggatcaagtccagcacatggaactagttcaggatctagcacaaggtttcaacaagaagtatggggagttctttccagtgcccgagtccattctcacatccatgaagaaggtaaaatccctacgtgatccttctgccaaaatgtcgaaatcagaccctgacaaactggccaccgtccgaataacagacagcccagaggagatagtgcagaaattccgcaaggctgtgacagacttcacctcggaggtcacctatgacccggctggccgcgctggcgtgtccaacatagtggcggtgcatgccgcggtgacggggctctccgtggaggaagtggtgcgccgcagcgcgggcatgaacactgctcgctacaagctggccgtggcagatgctgtgattgagaagtttgccccaattaagcgtgaaattgaaaaactgaagctggacaaggaccatttagagaaggttttacaaattggatcagcaaaagccaaagaattagcatacactgtgtgccaggaggtgaagaaattggtgggttttctataggaagtttcaacgaatcacagcaaggcttttgtgccttgcactccatgcattctgataacggcagctttcctaaaaagaaaaagttatagttttgggacatttaatttggtatagctgattattggctttatttgatgaatattgctttgtagctttgaaatacgacagtgttccaaatcccatcaacaaaatgctgtgaacaacaacaacaaaaaataaatcaagaaggcatagctgtctgaatccccaattattgaggcacactccttggcctgcagaaatgtgattgaagtaaggagtaatttgggaaatggagtatcatttgtgcttctctctggagtacttactgtaacagatgcacacgttatctacttcaacccttttataaagcaatatatagaggtcttagatgtataatccttgagatgccatttgatcagatgccaatttgtattcagagctcataaaaacaagtccattcttatagtttgtttgtcactgagacggtgcctgatttaatatatttaagctgcttaacttgttttccaagagataacaccaactgttccagcaataatttgttttttaattcagagatatgggatatgatcttctaaggaggttgcattattttgacctgatttatttattgtacaagagcccaagtccctgaattatattcttaataagtgctttcttgcattcatttcagtttagtctcaccaaccccctatgaattaggagaattattgtcattttacacatgaggaaagtgaggctgagagaatccaattagcttgtacgatatcactccataagagaagcaaatctgagagtaaaacccttaccccttattcttaagaatagtgcttgtttattcagtacaaaaaaaatgctgaaaggcagcgttttttagactctaaacattctgattttgaaggtgggtgttggaacgactgatgatgttttttatatcatcaattcagccaatggatgcgaacttaaaatctggattcacagaaccgtggtcacatttccccatcaaaatccccaaggcgggtcccaagttctctcctctacgctcattgcagaaatactttgaaataggttctgccagtctacaatagcagtgaagactgacaaatcagatattcccaatgactgacagcttctcatcttgcctctacctcagttaagtaatgtcaccctgaaacctagcttttctgcacttccatttctgacacctgaaaatgaaaatgataatcctaacttatacaccaagacctgttagcaagatcgattttgtaacagaaattgcttataagttttttatcagtaaggaccatgatcaccatttgtacatacataactaggttgttgagcaaagcatttttgctcatgtttcttaaggaagtagagtagtccttgtgtcagaacacatgttaatccacaaaacgccccatcccagattccaaattaaaacatcgtttttaggattcttggagctagcctggatcatgggtaaaggaaacattttgccttttgtatcttatactggaatgggatgtctgtaagtcctagaacctctttgagcatatttcttacaagcctctgttttttcccctttaaaggaaactttgaaaggattgtgaatactggaaaatgacaaaactaaaggtagatctatc

SEQ ID NO: 658 - DNA, 567 bp, Artificial
  cDNA Sequence
gggccagttaaatggatcatcatctctaacccctctgctgacagccccatgtttgtgatgggtatgaaccatgagaaatataacaacagcctcaagatcatcaacagtgtttcttgtaccaccaactgcttagcatctctggccaagatcatccatgacaactccgatttagtggaaggactcatgaccacagtaaatgctatgattgccacccagaagactgtggacggcccctctgtgaaactgtggcatgacagctgcagggctcaaaggaacatcatccttgcatctactggcactctcaaggctgtgggcaagtatatcaatgagctgcatgggaagatcactagcatggcattccaggtccccaccacgaacatgttggtcatgaacctgacctgccctcaggaaaagcatgccaaatatgataacatcaagcaggtggtgaaggcatcagaaggcccccataagggcatcctgtgcaacactgagaaccaggttgcctcctccagcttaaccattgacacccactcttccaccttcaatcctgggactggcattgccctc

SEQ ID NO: 659 - DNA, 516 bp, Artificial
  cDNA Sequence
ctccagaacaagaccaagctgacagtgctggaaggagacattctggatgagccattcctgaagagagcctgccaggacatgtcggtcatcatccacactgcctctatcatatatgtcatcggtgtcactcacagagtccatcatgaatgtcaatgtgaaaggtacaatgacacgcctcaccaaagctatgataaccttagttacaccttgagcaaagagttcggcctctgccttgattccagttggagcctgcctttatccctgacgtactggattggcttcctgctggaaatagtgagcttcctgccgaggccagtttacacctgtcgaccgcccttcaaccaccacagagtgacattgtcaaatagcgtgttcaccttctcttacaagaaggctcagcaagatctggcatataagtcactttacagctgggaggaagccaagcagaaaaccatggagtgggttggttcccttgtggactggcacaaggagaccctgaagtccaagactcagtga

SEQ ID NO: 660 - DNA, 693 bp, Artificial
  cDNA Sequence
ccctacccgtgccccgagtgcggcgaggccttcagcctcagctcgcatctgttgagccaccggcgcgcgcacgcggcggccagcggcgcgggggcggcggcgctgcggcccttcgcctgcggggagtgcggcaagggcttcgtgcgccgttcgcacctggccaaccaccagcgcatccacacgggcgagaagccgcacggctgtggcgagtgcggcaagcgcttcagctggcgctcggacttggtgaagcaccagcgcgtgcacacgggcgagaagccctacatgtgctccgagtgcggcgagaccttcagcgtcagctcgcacctcttcacgcacaagcgcacgcactcgggtgagcggccctacgtgtgccgcgagtgcgggaagggcttcgggcgtaactcgcacctggtgaaccacctgcgcgtgcacaccggcgagaagcccttccgctgtggccagtgcgagaagcgcttcagcgacttctccacgctcacgcagcaccagcgcacgcacacgggcgagaagccctacacgtgcatcgagtgcggcaagagctttatccagagctcccacctgatccgccaccgccgcatccacacgggcaacaagccgcacaagtgtgcgggctgcggcaaaggcttccgctataaaacgcacctcgcgcagcaccagaagctgcacctgtgttag

SEQ ID NO: 661 - DNA, 144 bp, Artificial
  cDNA Sequence
ctgacggtgctggaaggagacattctggatgagtcatgcctgaagagagcctgccaggacatgtcggtcatcatccacaccacctccatcatagacatcatcggtgtcactcacagagagtccatcatgaacatcaatgtgaaa

SEQ ID NO: 662 - DNA, 600 bp, Artificial
  cDNA Sequence
tctgctatgtattctagaaaggccacgtacaagaggaagtactcagccactaaatccaaggttgaaaagaaaaagaagcttcttgcaactgttacaaaaccagttagtggtgacaagaatggtggtatctgggtgattaaacttcacaaaatgcctagatattatcctactgaagacgtgcctcaaaagctgttgagccatggcaaaatacccttcagttggcacgtgagaaaactgcgagccagcatcacccccaggaccattctgatcatcctcattggacaccacaggagcaagagggtggttttcctgaagcagctggctagcggcttggttcttgtgactggacctctggtcctcaatcgagttcctctacaaagaacacaccagaaatttgtcattacctcaaccagaattgatatcagcaatgtaaaaaccccaaaacatcttactgatgcttacttcacaaagaagaagctgcagaagcccagacatcaggaaggtgagatccttgacacagaaaaagagaaatacgagattacagagcagtgcaagattgatcagaaagctgcggactcacaaattttgcaaaaatcaaag

SEQ ID NO: 663 - DNA, 420 bp, Artificial
  cDNA Sequence
atgggtggtagagagaggtataacattccagcccctcaatctagaaatgttagtaagaaccaacaacagcttaacagacagaagaccaaggaacagaattcccagatgaagattgttcataagaaaaaagaaagaggacatggttataactcatcagcaggtgcctggcaggccatgaaaaatggggggaagaacaaaaattttccaaataatcaaagttggaattctagcttatcaggtcccagcttactttttaaatctcaagctaaacagaactatgctggtgccaaatttagtgagccgccatcaccaagtgttcttcccaaaccaccaagccactgggtccctgtttcctttaatccttcagataaggaaataatgacatttcaacttaaaaccttacttaaagtacaggtataa

SEQ ID NO: 664 - DNA, 3535 bp, Artificial
  cDNA Sequence
gctcactcggtgccgctgcctaggggctgtagaggtcgcgccgctcctgctggggcctgcccacgccaaggacctgcctctgtcgcctcctcttctattgcccagtttccccagccagaacatcccctgaagatggcagaggagagcagctgtaccagggattgcatgtccttcagcgtgctcaactgggatcaggttagccggctgcatgaggtcctcactgaagttgtacctatccacggacgaggcaactttccaaccttggagataactctgaaggacatcgtccagaccgtccgcagtcggctggaggaggcaggcatcaaagtgcacgacgtccggctgaatggctccgcagctggccacgttttggtcaaagacaatggcttgggctgcaaagacctggacctaatcttccatgtggctcttccaacagaggcagaatttcagctggttagagatgtggttctgtgttcccttctgaacttcctgccagagggtgtgaacaagctcaaaatcagtccagtcactctgaaggaggcatatgtgcagaagctagtgaaggtttgcacggacactgaccgctggagcctgatctccctctccaacaagaacgggaagaacgtggagctgaagtttgtcgactccattcggcgtcagtttgagttcagtgtggactctttccaaatcatcctggattctttgcttttcttctatgactgttccaataatcccatctctgagcacttccaccccaccgtgattggggagagcatgtacggggactttgaggaagcttttgaccatctgcagaacagactgatcgccaccaagaacccagaagaaatcagaggcgggggacttctcaagtacagcaaccttcttgtgcgggacttcaggcccacagaccaggaagaaatcaaaactctagagcgctacatgtgctccaggttcttcatcgacttcccggacatccttgaacagcagaggaagttggagacttaccttcaaaaccacttcgctgaagaagagagaagcaagtacgactacctcatgatccttcgcagggtggtgaacgagagcaccgtgtgtctcatggggcatgaacgcaggcagactctgaacctcatctccctcctggccttgcgtgtgctggcggaacaaaacatcatccccagtgccaccaacgtcacctgttactaccagccggccccttacgtcagtgatggcaacttcagcaactactacgttgcccatcctccagtcacctacagccagccttaccctacctggctgccctgtaactaaccttgagacctgagggtttccacagtgggaaccccaatagggctagggctctcaggtaggggagcctccttctagatgtaggcatttggcttttaaaggggaactcagctctgattctgcttttttttttttttttcctttgtgtacccattggaatgggtctacagtgtatcatgagccaaccctcaaaggacccgtattacagtgccacgttggaaaacgctacaggaagcatgacctatccacatctttccaagatagacactaacatgtcatgtcccaaacattagcacgtgggggttgagctctgtgcagtaatcgagattgggagaatttgggcagcgcgtgagaagtgctaagctacttgttttctcacttgagcccgggtaggctgtgttggccctcacttgggattctcagcagttacatgaaagttgtgctgataatctcttctcttgtaccaattttagtcaggcagaaaatggtaaacatgagggtgctcttgtgacttaatttttgttcaagggactaaattgcttatgtttattccctgtcagcggagtggagaatgtcattcatcaataaaccaaagccaatagctggagaattgagatctggttgaaagtggtttatggtttacatgctgtactatcctgaggaattgcgagatattgctgaggggaaaaaaaaatgaccttttcttgaaatgtaacttgaaaacaaaataaaatgtggaacataatgtttaattagaattgtggtggtggtagtggaaggggataattgtaaataggaaacatgaatgttcatttttttctttaaagaattcttattaaatggctccctgccttttttttcttttttcctcatcagctctttcatggctgaattttgttttattcttcctaagactgaggattgtgctgagtccagagtcattgtggtaactgacatgagggtcttcccatgttttaactggaaacccactttggtcacattccaagtatgacacagctgttcttctggagtactttagctattttttgtttttgttcttttcgttttttttttttccaaaaatagtgacttccttctccaggtgtgtttgacagcaactcaattcaggaatttcggtagaactgagtgacctgtggaactgctttagaatctaacctgctgtcttcgtgctctgtgtgaaggggaagctggggggttagcatgaagtctggccttgtgtgcattggagcttccaaggcactttgaaatcattccagtatatttgggaagaattgagtgaatgagaatgctcttccttattctggtagatttgacttgtttataattctgcactttagaagaaaaacagtgttaatctgtagttgaaagaaagcttagtagatgagagagttctaggctactgtggctttttccagtagatttagatgagattatgtgttttgaaatgttttgtgggatcccttagaaagcatcacttcagggcagagacactcaatattgccagccagcttgggttctaaagtgatttaatcaaattcatgctcctgatcttttttttcccccttcctttggctatgaaaacccaaagcccggagtgattgttttctccttgctttaagcagtgaagttatcctaatgcaaaagagcttagtagaaaatgagtggtttacctttttttctaaaagtatattttcaagtttattctggaatgtgatgtcttggtcctcttaaaagcagatcagccatgactgaaactcaaggcttagctggtatctatgttgtgctacattaggtgactagaagccacttcttagtgtaatcagctcctgtttccctgtgagccttagttatattttaattcagtggctttgagtcaaggccggttctaattgaggggacccagtgtgcttcagtgttaagagtggggcaatgaagagtgaaccccaatgaagagtgatcccaactttggaaactatctggtcattcatgaccttaaaaagctgccatggtggtcaaatggcatgtgtttgcacaaaaatgaccgatgtgtttaaccaaagctttgaaatgtgatgaagccaccaacataagcacttgcctaacagaaatcagtatttcttctacttagaaggcttggggcccagggtaatgaggcaccagatgaagataagatctgcatcaaggaattaaatttccagtttgtccttgg

SEQ ID NO: 665 - DNA, 900 bp, Artificial
  cDNA Sequence
cttcctccatcatacgctcaccttgtcaaagctcccagagagggtttcaacaaaggatttggttttaagttggtgaaagaggtaaaagcaaagtcatgtggtggcgtggaattcttaaagtctggttcatctaatacagacactggtaaagttactgggatcttggagtccaaatataaatggtgcaagtatgatttgactttcacagaaaaatggaacactgatgacactctggggacagaaatcacaattgaagaccaaatttgtcaaggtttgaaaatgatattagatactagcttctcaccaaacataggaaagaaaagtggcaaaatcaagtcctcttacaagaagcagcgtgtaaagcttggccgtgatgttaactttgattttgctggacttgcaattcatggctcacttgctgggtaccagatgagctttaacagcaccaagtcaaagcagacaaagaataactttgcagtgggctacaggactggggacttccagctgcacactaatgtcaatgatggggcagaatttggaggatcagtttatcagaaagtttgtgaagatcttgatgctttagtaaaccttgcttggacatcaggtaccagctgcactcgttttggccttgcagctaaatttcagttgaaacccattgcttccatttctacaaaagtcaacaactggttgactggggtcagctacactccacccctgaggcctggtgtgaagctcaccctgtctgctctggtagatgggaagagcatggatgctggaggccacacacttggcccctggagttgcaggcttaatccagatgaaagaaacctctgggaatggatagcagaagatttggccttgatgtatttccattgtgacgagcaggctttttccccctga

SEQ ID NO: 666 - DNA, 120 bp, Artificial
  cDNA Sequence
atatcaaaaatgcaaacttggggagggcataaaaatcacacacaaggctgccacttcacacttcgagggttgcacaacggccgggcaaaggcgctcctcactttccagatggggcggcaa

SEQ ID NO: 667 - DNA, 588 bp, Artificial
  cDNA Sequence
ttgagtatgctcaggcttcagaagaggcttgcctctagtgtcctctgctgtggcaagaagaatatctggttagaccccaatgagaccaatgaaatcaccaatgccaactcccgtcagcagatccggaagctgatcaaagatgggctgatcatccgcaagcctgtgatggtccattcccccgcttgatgccggaaaaacaccttggcctgccggaagggcaggcatatgggcataggtaagcggaagggtacagccaatgcccgaatgccagagaaggtcacgtggatgaggagaatgaggattctgcaccggctgctcagaagataccgtgaatctaagaagattgatcgccgcatgtatcacagcctgtacctgaaggtgaagaggaatgtgttaaaaaacaagcagattctcatggaacacatccacaagctgaaggcagacaaggcccgcaagaagctcctggctgatcaggctgaggcccgcagatctaagaccaaggaagcacacaagagctatgaagagcacctccaggccaagaaggaggagatcatcaagactttgtccaaggaggaagagaccaagaaa

SEQ ID NO: 668 - DNA, 281 bp, Artificial
  cDNA Sequence
aagaagagcgtccccaggagaaacaagcttgaccactatgctgtcacagagtttcctctgaccactgagtctgccatgaagaagatagaagacaacaacacacttgtgttcactgtggatgttaaagccaccaagcaccagatcaaacaggctgtgaagaagctctatgacactgatgtggccaaagtccatgccctgattaggcctgatgcaggaagaaggcataagctccactggctcctgattacaatgctttggatattgccaacaaaattgggatc

SEQ ID NO: 669 - DNA, 2215 bp, Artificial
  cDNA Sequence
atgaagaaacaaggagtaagcccaaagccgctgcaatcttcccgccccagcccgtctaagcggccctgcggggcctcccccgcccgggagcgggaggtggaaaagtcggccctaggcggcgggaaactgccggggggcgccaggaggtcctccccggggaggatcccaaatctgaaaaagcgaaaaggcttggagctaaaggtggtggccaaggcccttctcggccccttccagttcgtctgtaattccctggcgcagctccgggaagaggtgcacgaactgcaggcgcggtggttccccagcagaaccactctgcatcgagccgtctttgtggcaattctacattggttacatttagtaacactttttgaaaatgatcatcatttctctcacctctcatctttggaacgggagatgactttttgcattgaaacgggactttattattcttacttcaagaccattattgaagcaccttcatttttgggaggactgtggatgattatgaatgacaggcttactgaatatcctcttgtaattaatgcagtaaaacgcttccatatttatccagaggtaatcatagcctcctggtatcgcacattcatgggaatagtgaatttatttggactagaaactaagacctgctggaatgtcaccagaatagaacctcttaatgaagttcaaagctgattgcgagatcctgcttgcttttatgttggtgtaatctttattttaaatggactaatgatgggattgttcttcatatatggaacatacctaagtggtactgaactgggaggtcttattacagtactgtgcttctttttcaaccatggagaggccacctgtgtgatgtggacaccacctctccgtgaaagtttttcctatcctttccttgtacttcagatgtatgttttaactttgattctcaggacctcaagcaatgatagaaggcccttcattgcactctgtctttccaatgttgcttttatgcttccctggcaatttgctcagtttatactttttacacagatagcatcattatttcccatgtatgttgtgggatacattgaaccaagcaaatttcagaagatcatttatatgaacatgatttcagttacccttagtttcattttgatgtttggaaattcaatgtacttatcttcttattattcttcatctttgttaatgacatgggcaataattctaaagagaaatgaaattcaaaaactgggagtatctaaactcaactgctggctaattcaaggtagtgcctggtggtgtggaacaatcattttgaaatttctgacatctaaaatcttaggcgtttcagaccatatttgcctgagtgatcttatagcagccggaatcttaaggtatacagattttgatactttaaaatacacctgttctcccgaatttgacttcatggaaaaagcgactctgctgatatacacaaagacattattgcttccagttgttatggtgattacatgttttatctttaaaaagactgttggtgatatttcgcgtgttttagctacaaacgtttatctaagaaaacagctccttgaacacagtgagctggcttttcacacattgcagttgttagcatttactgcccttgccattttaattttgaggctaaagctgtttttgacacagcacatgtgtgttatggcttccttgatatgctcttgacggaaataaattgtttcttttgtttcagctctttggctggctttttcgcagagttcgcagagagaatgttatctttggcattctaacagtgatgtcaatacaaggttatgcaaacctctgtaatcaatggagcataacaggagaatttaatgatttgcctcaggaagaacttttacagtggatcaaatacaataccgtaccagatgctgtctttgcaggtgccatgcctacaatggcaagtgtcaagctgtctacacttcatcccattgtgaatcatccacattacgaagatgcagacttgagggcttggacaaaaatagtttattctacatatagtggaaaatctgccaaagaagtaagagataaattgttggagttacatgtgaattattatgttttagaagaggcatggtgtgttgtgagaactaagcctggttgcagcatgcttgaaatctgggatgtggaagacccttccaatgcagctaaccctcccttatgtagcgtcctccttgag

SEQ ID NO: 670 - DNA, 2002 bp, Artificial
  cDNA Sequence
tataacgtgagggctgaatgcagcccattctctggagaacttcctcacacaccgcagcaaagagaagactgaaagacaaacctgggtgcagccagagaggtccagatagatgagcttgtggcatccattccccaagttcagcctagggactccacgtaccccagctgggtctcattgttccagaactgcattagttaagattacccagacttggatttcaaaggaatactttcattgttccgtctgtaacacgaagtaattggggccagctggatgtcaggatgcgtgtggttaccattgtaatcttgctctgcttttgcaaagcggctgagctgcgcaaagcaagcccaggcagtgtgagaagccgagtgaatcatggccgggcgggtggaggccggagaggctccaacccggtcaaacgctacgcaccaggcctcccgtgtgacgtgtacacatatctccatgagaaatacttagattgtcaagaaagaaaattagtttatgtgctgcctggttggcctcaggatttgctgcacatgctgctagcaagaaacaagatccgcacattgaagaacaacatgttttccaagtttaaaaagctgaaaagcctggatctgcagcagaatgagatctctaaaattgagagtgaggcgttctttggtttaaacaaactcaccaccctcttactgcagcacaaccagatcaaagtcttgacggaggaagtgttcatttacacacctctcttgagctacctgcgtctttatgacaacccctggcactgtacttgtgagatagaaacgcttatttcaatgttgcagattcccaggaaccggaatttggggaactacgccaagtgtgaaagtccacaagaacaaaaaaataaaaaactgcggcagataaaatctgaacagttgtgtaatgaagaagaaaaggaacaattggacccgaaaccccaagtgtcagggagacccccagtcatcaagcctgaggtggactcaactttttgccacaattatgtgtttcccatacaaacactggactgcaaaaggaaagagttgaaaaaagtgccaaacaacatccctccagatattgttaaacttgacttgtcatacaataaaatcaaccaacttcgacccaaggaatttgaagatgttcatgagctgaagaaattaaacctcagcagcaatggcattgaattcatcgatcctgggtctttgagatgaaaccctgcaagtagacttacgtgaatgatttttgctgtgccgcttttttagggctcacacatttagaagaattagatttatcaaacaacagtctgcaaaactttgactatggcgtattagaagacttgtattttttgaaactcttgtggctcagagataacccttggagatgtgactacaacattcactacctctactactggttaaagcaccactacaatgtccattttaatggcctggaatgcaaaacgcctgaagaatacaaaggatggtctgtgggaaaatatattagaagttactatgaagaatgccccaaagacaagttaccagcatatcctgagtcatttgaccaagacacagaagatgatgaatgggaaaaaaaacatagagatcacaccgcaaagaagcaaagcgtaataattactatagtaggataaggtagaaattgttctgattgtaattagttttgtattttctatactggtgttagaaaacatatgtttacatttgattaactgtgttgcctatttatgcagggtaatccagctaaaggaagctttctttaattataagtattattgtgactattatagtaatcaagagaatgctatcatcctgcttgcctgtccatttgtggaacagcatctggtgatatgcaattccacactggtaacctgcagcagttgggtcctaatgatggcattagactttcataatgtcctgtataaatgtttttactgcttttagaaaataaagaaaaaaaacttggttcatgttta

SEQ ID NO: 671 - DNA, 1700 bp, Artificial
  cDNA Sequence
tccttctagcagaaatggcggctgcggcggctcgagtggtgttgtcatccgcggcgcggcggcggctctggggtttcagcgagagtcttctaatccgaggcgctgcgggacggtcattatattttggagagaacagattaagaagtacacaggctgctacccaagttgttctgaatgttcctgaaacaagagtaacatgtttagaaagtggactcagagtagcttcggaagactctgggctctcaacatgcacagttggactctggattgatgctggaagtagatacgaaaatgagaagaacaatggaacagcacactttctggagcatatggctttcaagggcaccaagaagagatcccagttagatctggaacttgagattgaaaatatgggtgctcatctcaatgcctatacctccagagagcagactgtatactatgccaaagcattctctaaagacttgccaagagctgtagaaattcttgctgatataatacaaaacagcacattgggagaagcagagattgaacgtgagcgtggagtaatccttagagagatgcaggaagttgaaaccaatttacaagaagttgtttttgattatcttcatgccacagcttatcaaaatactgcacttggacggacaattttgggaccaactgaaaatatcaaatctataagtcgtaaggacttagtggattatataaccacacattataaggggccaagaatagtgcttgctgctgctggaggtgtttcccatgatgaattgcttgacttagcaaagtttcatttcggtgactctttatgcacacacaaaggagaaataccagctctgcctccctgcaaattcacaggaagtgagattcgtgtgagggatgacaagatgcctttggcgcaccttgcaatagctgttgaagctgttggttgggcacatccagatacaatctgtctcatggttgcaaacacgctgattggcaactgggatcgctcttttgggggaggaatgaatttatctagcaagctggcccagctcacttgtcatggcaatctttgccatagctttcagtctttcaacacttcctacacagatacaggattatggggactgtatatggtttgtgaatcatccactgttgcagacatgctacatgttgttcaaaaagaatggatgcgactctgtacaagtgtcacagaaagtgaggttgcacgagccagaaatcttctgaaaacaaacatgttgttgcagcttgatggttcaactccaatttgtgaagatattggtaggcaaatgttatgctataatagaaggattcccatccctgagcttgaagcaagaattgatgctgtgaatgctgagacaattcgagaagtatgtaccaaatacatttataataggagtccagctattgctgctgttggtaagcctggcttcttttcttctatgcaaaaagttggccaagtacttttaattaactcttctttttaatccttaggtcccattaagcaactaccagattttaaacagatacgcagtaacatgtgttggcttcgtgattaaaatgctcctaatcaagattgtttgaacacatgtatttataaaacagagctagagaaaaataaaaatgaacatgtatatacatttggaaatttgaattaaatactgtatcatactttcaaaggataaaaagactacccctct

SEQ ID NO: 672 - DNA, 950 bp, Artificial
  cDNA Sequence
actggagctgctgcctctgtctgctaagatgtgaagtccaagactgaaagtaacatagcagaaggagaaccaaaagatatgttgagtcttgatgctatttgttgaaccagtcctgaatccagctgtgtcggagtcagcgcagcttttgaagctggagagcatcatattttagaaagatcaagcaatgtggatgaggacacattaaaaagagaagaccgagaggaggggacaccactcaggcttataacctccagctcacatttcagcaccaaaggaccaaagcctagacctgagatctggcacttgcaaaaagaaagatcacctggaagaacaaaatagaagactcctgctcccaataggcttgggtcaggaagaaggctgttggcataattgtggagtaggaagatggaaaacaactcctagagatcccaacagctgaacgcgtgcttgggcagtggctgcgggtgaagtcatgggaaggcaagtcatgaagggcattaatcaaggatatgttctgggagtaactcccctgctttccctggatgtgtgcgagaaagcataggcatccactttctgaccaacaggagacccagtctcaggatggagcagacaccatgcatggtagagcagagagacagatacaacctaggtccttgatgaaatgattggccactggatcagccacagttaaagactgcctacctttggacttctggttatcttaggccaaaaatgtcctttttgtttaaggcactttgagccgggttttctaagacctagcagtctcaaccatccaaactaataagctgaattaactagatttcctgtcatgtccttcctgcctgattggtagcccttgactccaatttggcctcattttccgtaccttactggctgccttttcctctactcataggtcacttggaaataaaatatagatttacttcaaa

SEQ ID NO: 673 - DNA, 2102 bp, Artificial
  cDNA Sequence
aagggggcgcggcgcacgcagtatggcgcccaacatctacttggttcgccagcggatcagtcgactcggccagaggatgtccggcttccagatcaacctcaacccgctcaaggagccactcggcttcatcaaggtcctcgagtggattgcttctatctttgcttttgccacctgtggaggttttaagggccaaacagaaattcaagtgaattgtcctcctgcagttactgagaataaaactgttacagctacttttggttatccattcaggttgaatgaggcatcatttcagccacctccaggtgtaaacatatgtgatgtaaattggaaagattacgtcctcataggcgattactcttcttctgcacaattctatgttacctttgcagtctttgtgttcctgtactgcattgctgcccttctgctttatgttggctacacgagtctgtatctggatagtcgtaaacttcctatgatagactttgttgttacacttgttgccacttttttgtggttggtgagcacttcagcctgggctaaagctctgacagatattaaaatagctactggtcacaatattattgatgaacttccgccttgtaagaagaaagcagtactgtgttactttggctctgtgaccagtatgggatccctaaatgtatctgtgatatttggctttctaaatatgatactctggggaggaaatgcttggtttgtgtacaaggagaccagcctacacagtccatcaaatacatctgcccctcatagccaaggaggtattccacctcctaccggaatataattaaagggagaaatacactgtatgaagtatatgttgatactatgacatgttgccaacaccttgagaagcattatttgtttctaataaaagtaatggctttgtcaatatattggtgggtttaaaactttgctgcttttttacataaagcctgtgcctttcctagaaagttaagatgtaaatgtattctcacatgtaaatttgaaagttcaggggtctattatgaaatgatacacatttttaaatgaaccataatttttttcactaagctgtttgccttccaaagtgtttacaccttaagccttaacatgtatcttcattcagaaaacagttatattgtcataccatagtaggaagaaaaacctttatttggaatatacactactgtaagtttgtacagatcatatacctaccacctgtctttgcttaaagagccttgattacataaatatgtaggaaaaaacatattgagttcaaaatttatatctaacattgtttatgttatgatttttttttaattgcaaagactaggtgtatatttttttctgtttttctaaatgacccgtggtacttaataggtgtactaaaattgtgttgggagcagggatttggaaatttctgagagatgtgtagttaatttagtaattctgtttcatgagatatgatctgttatgctagtggtttaataggcttgctatgtaagtagaacgtggctcaactagatatctttatatgtatgggcattactcttagtgatatttgtttcctgtcctttgttgctcatgctgtttaagtgcaggctgagacccagcctctttgtaagtacagtaaaataatccaccgttttttacagaccctagtcaaagggttaaaaaaattaagattgctttccatgtttgaaatttaccattgagagtcaatgaagttgctattttgagtttagcattgatattgtgaaaataagtgcaatttggatttcatgtttcttaatattcattcttgtttcacaaatgaatgattaaggaattatgcatcataaaggaacctaagtgaggtatatgatgagtgtattgtctttgcacacacatataggtatattctgaatacaagcttattcacattttgcttcctaatctttttgttgtacagggattcaggtttcttattcttacaacatgattgtttatatgtgaagcacatcttgctgttgccttatttttgatgcttttattcatgacaagaattgtcaatataagaatgtatatcttttttgcaaccaatttaataaaggagttgaaagaaa

SEQ ID NO: 674 - DNA, 2855 bp, Artificial
  cDNA Sequence
cgtctcaatatgtctcaagatggcggccaatgtgggatcgatgtttcaatattggaagcgctttgatttacagcagctgcagagagaactcgatgccaccgcaacggtattggcgaaccggcaggatgaaagtgagcagtccagaaagcggcttatcgaacagagccgggagttcaagaagaacactccagaggatttgcgcaagcaggtagcgccgctgctgaagagtttccaaggagagattgatgcactgagtaaaagaagcaaggaagctgaagcagctttcttgaatgtctacaaaagattgattgacgtcccagatcccgtaccagctttggatctcggacagcaactccagctcaaagtgcagcgcctgcacgatattgaaacagagaaccagaaacttagggaaactctggaagaatacaacaaggaatttgctgaagtgaaaaatcaagaggttacgataaaagcacttaaagagaaaatccgagaatatgaacagacactgaagaaccaagccgaaaccatagctcttgagaaggaacagaagttacagaatgactttgcagaaaaggagagaaagctgcaggagacacagatgtccaccacctcaaagctggaggaagctgagcataaggttcagagcctacaaacagccctggaaaaaactcgaacagaattatttgacctgaaaaccaaatacgatgaagaaactactgcaaaggccgacgagattgaaatgatcatgacggaccttgaaagggcaaaccagagggcagaggtggctcagagagaggcggagaccttaagggaacagctctcatcggccaatcactccctccagctggcctcacagatccagaaggcaccagacgtggagcaggccatagaggtgctgacccgctccagcctagaagttgagttggccgccaaggagcgggagatcgcacagctggtggaggacgtgcagagactccaggccagcctcaccaagctgcgggagaattcggccagccagatctcacagcttgagcagcagctgagcgccaaaaacagcacactcaaacaactggaagaaaaactcaaaggccaggctgactatgaagaggtgaagaaagagctgaacattctgaagtccatggagtttgcaccgtccgagggcgctgggacacaggatgcggccaagcccctggaggtgctgttgctggagaagaaccgctcgctgcagtccgagaacgccgcgctgcgcatctccaacagcgacctgagcggacgctgtgcagagctgcaagtccgtatcactgaggctgtggccacagccactgagcagagagagctgatcgcccgcctggagcaggacctgagcatcattcagtccatccagcggcccgatgccgagggtgccgctgagcaccgcctggagaagatcccagagcccatcaaagaggccactgccctattctacggacctgcagcaccagccagcggtgccctcccagagggccaggtggattcactgctttccatcatctccagccagagggagcgcttccgtgcccggaaccaggagcttgaggccgagaaccgcctggcccagcacaccctccaggccctgcagagtgagctggacagcctgcgcgccgacaacatcaagctctttgagaagatcaagttcctgcagagctaccctggccggggcagcggcagtgatgacacggagctgcggtactcgtcccagtacgaggagcgcctggaccccttctcctccttcagcaagcgggagcggcagaggaagtacctgagcttgagtccctgggacaaggccaccctcagcatggggcgtctggttctctccaacaagatggcgcgcaccatcggcttcttctacacactgttcctgcactgcctggtcttcctggtgctctacaagctggcatggagcgagagcatggagagggactgtgccaccttctgcgccaagaagttcgctgaccacctgcacaagttccacgagaatgacaacggggctgcggctggtgacttgtggcagtgataccccggggcctcccccgtgacagtgacggctgcgcctccaccccgactgctcagtgcatctaatcacttagactcccctgaagaatcccccatggaaactgcccttatccgctgtccagcagctgccagaggccccaggtcacctcgggtccccttgaaagaatgtctcggtcacatcaggcccgctaggtccagagagcgagcccccaatgcccggccaggctaagccgcagagaccctctcagcccccacctcaggttagggctctgcccgcagcctgacctctagccctggtggcagaggtccctcagctgcgaggctaattgggtgaccaccgattccagctgcggttaatccagcttgggcctgtctgcactgcgatcctcttgggctctcctaggatccccccatgccccgtaagaggtggaagacgcttccttccaggacagcaggctttgagtccagcacccccagcctgcctttgccaccagccccaccctgcagagtatatgaggcttgacagagtctgccccctcccccactgcaccccaagagagagagccccagccagcggaacagtttctattaccccctccctgcccccagacccatgtgatttctgctttcttctttagcaagatattctggtttctagataaggaagagtctctaatgagcccccgagccccagtctcttcagactcatggattggtctgaggggtctgaacgtctcctagccaatcagaactggctgtggaccaccctagcacggccacctctcagggccactggcagg

SEQ ID NO: 675 - DNA, 336 bp, Artificial
  cDNA Sequence
atgaaagcagaggttggaacgatggaagcagaagttggaacgatggaagcagaagttggaatgatggaagcagaagttggaatgatggaagcagaggttggaatgatggaagcagaggttggaatgatagaagtagaggttggaatgatagaagcagaggttggaatgatggaagcagaggttggaatgatggaagcagaggttggaatgagggaagcagaagttggaatgatagaagcagaggttggattgagggaagaagaggttggaatgtggaagcagaggttggaacgatggaagcagaggttggaacgatggaagcagaagctggaatga

SEQ ID NO: 676 - DNA, 789 bp, Artificial
  cDNA Sequence
cggaaaaggacaaggatccaaactggcgaatttgctgatcttcgcgtccctctccgctttccggccggcagcgctgccagggtatatttccttttttccgatcctgcaacagcctctttaaactgtttaaatgagaatgtccttggctcagagagtactactcacctggcttttcacactactcttcttgatcatgttggtgttgaaactggatgagaaagcaccttggaactggttcctcatattcattccagtctggatatttgatactatccttcttgtcctgctgattgtgaaaatggctgggcggtgtaagtctggctttgaccctcgacatggatcacacaatattaaaaaaaaagcctggtacctcattgcaatgttacttaaattagccttctgcctcgcactctgtgctaaactggaacagtttactaccatgaatctatcctatgtcttcattcctttatgggccttgctggctggggctttaacagaactcggatataatgtcttttttgtgagagactgacttctaagtacatcatctcctttctattgctgttcaacaagttaccattaaagtgttctgaatctgtcaagcttcaagaataccagagaactgagggaaaataccaaatgtagttttatactacttccataaaacaggattggtgaatcacggacttctagtcaacctacagcttaattattcagcatttgagttattgagatccttattatctctatgtaaataaagtttgttttggacctcatttttctacatga

SEQ ID NO: 677 - DNA, 2481 bp, Artificial
  cDNA Sequence
atggccaagcgcagctcgctgtacatccgcatcgtggaggggaagaaccttcccgccaaggacatcactggcagcagcgacccctactgcatcgtgaaggtggacaatgagcccatcatcaggtaccgcccccacccccaggaccgaggggcgctcagcctctcatcggcccgcgctctccccgcaaaggggacagccacagtgtggaagaccctgtgccccttctggggtgaggagtaccaagtgcacctgccgcccaccttccacgctgtggctttctatgtcatggatgaggatgccctcagccgggacgacgttatcggaaaggtctgccttacaagggacaccatagcctctcaccctaagggtttcagcgggtgggcccacctgacggaggtcgaccccgatgaggaggtgcagggcgagatccacctgcggctggaagtgtggccaggggcccgggcctgccggctacgctgctctgtgctggaggccagggatctggccccaaaggaccgcaatggcacatctgaccccttcgtccgagtgcgctacaagggccggacacgggagacctcgatcgtgaagaagtcatgctacccacgctggaatgagacgtttgaatttgagctgcaggagggggccatggaggcgctgtgcgtggaggcctgggactgggaccttgtcagccgaaacgacttcctgggcaaagtggtgattgatgtccagagactgcgggtggtgcagcaggaggagggctggttccggctgcagcccgaccagtccaagagccggcggcatgacgagggcaacctgggctccttgcagctggaggtgcggctgcgggacgagacggtgctgccctccagctactaccagccactggtgcacctgctgtgccacgaggtcaagctgggcatgcagggcccagggcagctgatcccactcatcgaggagacaaccagcaccgagtgtcgccaggacgtggccacgaacctgctcaagctcttcctggggcaggggctggccaaggacttcctggacctgctcttccagctggagctgagtcgcaccagtgagaccaacaccctgttccggagcaactctctggcctcaaagtccatggagtcttttctgaaggtggccgggatgcagtacctgcacggcgtcctgggccccatcatcaacaaggtgtttgaggagaagaagtacgtggagctggaccccagcaaagtggaagttaaggatgtagggtgctccgggctgcaccgcccgcagaccgaggccgaggtgctggagcagagcgcgcagacgctgcgcgcccacctgggggccctgctgagcgcgctcagccgctcggttcgcgcgtgccccgccgtggtgcgcgccaccttccgccagctcttccggcgcgtgcgcgagcgcttccccggcgcccagcacgagaatgtaccgttcatcgccgtcaccagcttcctgtgcctgcgcttcttctctcccgccatcatgtcgcccaagctcttccacctgcgggagcgccacgcggacgcccgcaccagccgcaccctgctcctgttggccaaggcagtccagaacgtgggcaacatggacacgccggcttccagggccaaggaggcttggatggagccgctgcagcccaccgtgcgccagggcgtggcgcagctgaaggacttcatcaccaagctcgtggacatcgaggagaaggacgagctggacctgcagcggacgctgagtttgcaggcgccacctgtgaaggaggggccactcttcatccacaggaccaagggcaagggccccctcatgtcctcctccttcaagaagctctacttctccctcactaccgaggccctcagcttcgcgaagacgcccagctccaagaaaagcgccctcatcaagttagccaacatccgggcagcggaaaaggttgaggaaaagagctttggcggctcgcacgtcatgcaggtcatctacacggacgacgccggcaggccccagactgcctacctgcagtgcaagtgtgtgaatgagcttaaccagtggctgtctgcgctgcggaaggtgagcatcaacaacaccggactgctgggctcctaccaccctggcgtcttccgtggggacaagtggagctgctgccaccaaaaagagaagacaggtcagggctgcgataagacccggtcacgggtgaccctgcaggagtggaatgaccctcttgaccatgaccttgaggcccagctcatctgccggcacctgctgggcgtggaggccatgctgtgggagaggcaccgggagctgagcgggggcgcagaggcaggcacggtgcccacgagccctggcaaagtccccgaggactcattggcccggctgctccgggtgctgcaggacctccgcgaggcccatagctccagcccggccggctccccaccctcagagcccaactgcctcctggagctgcagacgtga

SEQ ID NO: 678 - DNA, 1354 bp, Artificial
  cDNA Sequence
gtcgccctccgtcgtggtctggcgtgtattccgagcgttggtgtctggcggtttccgagcgttggtgtctggcggtttccgaccgttggtgtctggcggtttccgaccgttggtgtctggcacgcgccaccctctcttgctttggttgcgccatgccgatgtaccagacaagaagacaagaaaatgatttgaggacagcttcaatcgcggtgtgaagaagaaagcagcaaaacgaccactgaaaacaacgccggtggcaaaatatccaaagaaagggtcccaagcggtacatcgtcatagccggaaacagtcagagccaccagccaatgatattttcaatgctgcgaaagctgccaaaagtgacatgcagcaccgagaagtccgcgtgaagtgcgtgaaggctctgaaagggctgtacggtaaccgggacctgaccgcacgcctggagctcttcactggccgcttcaaggactggatggtttccatgatcgtggacagagagtacagtgtggcagtggaggccgtcagattactgatacttatccttaagaacatggaaggggtgctgatggacgtggactgtgagagcgtctaccccattgtgtaggcctctaattgaggcctggcctctgctgtgggtgaatttctgtactggaaacttttctaccctgagtgcgagataagaacgatgggtggaagagagcaacgccagagcccaggcgcccagaggactttcttccagcttctgctgtccttctttgtggagagcaagctccacgaccacgctgcttacttagtagacaacctgtgggactgtgcagggactcagctgaaggactgggagggtctgacaagcctgctgctggagaaggaccagagcacgtgccacatggagccagggccagggaccttccacctcctagggtgaaaccaggagagattgcttgcttcacttgtacaaggcaggaacggtggcatggcgtgggggaaacttggagttggaaggtggctaatctttgattctatgtttttgatcctcctggcactccagacctgggtgatatgcaggagagcacactgatagaaatccttgtgtccagtgcccagcaactcctgcctcagcctcccgagcagctgggactacaggtgcccgccaccacgcccgtctctactaaaaacacaaaaaattagccgggcgtggtggcgcatgcctgtaatcccagctacttgggaggctgaggcaggagaatcgcttgaacctaggaggcagaggttgcagtgagctgagatcgcaccactgcaccccagcctgggcaataagagtgaaactccatctcaaaaaaaaaaaaaaaaa

SEQ ID NO: 679 - DNA, 1965 bp, Artificial
  cDNA Sequence
cagtgtggcagtggaggccgtcagattactgatacttatccttaagaacatggaaggggtgctgatggacgtggactgtgagagcgtctaccccattgtgtaggcctctaattgaggcctggcctctgctgtgggtgaatttctgtactggaaacttttctaccctgagtgcgagataagaacgatgggtggaagagagcaacgccagagcccaggtgcccagaggactttcttccagcttctgctgtccttctttgtggagagcaagctccacgaccacgctgcttacttagtagacaacctgtgggactgtgcagggactcagctgaaggactgggagggtctgacaagcctgctgctggagaaggaccagagcacgtgccacatggagccagggccagggaccttccacctcctagggtgaaaccaggagagattgcttgcttcacttgtacaagaatcggctcccagacacctgccactcgtgaatgcatctgataaactcactcacactgaggccttggggactgaggccctggcggatcacgggtgcccaggggctcggaggccgcctcctctgggaagcctgcccaggttccgatggactcccacaggcaatacccctgggccttcctcgcggcccctgttggccccaattcccccaccccctgcaaggtctgtgcctctcctgcagccccgccaccaactagggcgagaggagctcgcccccacccaaacgtattggttcgatgaaggaagggcccatggttctgccactggccctggacacccagtgctggtttcccgtggaagtccccctggactgagtggcggctgggtgctctagtgatttgcgacctggggcctctgactcccatcatgttgggaaagtcgttgaacctcaccggtgaaacgggcacagtgaagtcatttccccgaagtctcaggactctgtgtaaggctggggacaggggcttgttggggcctaagggcaccttgggaactgcaggagcccgttctgcctccataagacactcactcctggcagggtcccctctccgggcacagcccagatccacccccatcatccctctccatctgtggctccctgcccctcacagaggattcatcactctgttcagaatccccaggactccctagggaaggaggtcccagcctggcctcccaagaccgtgcttgcccaattccaggacttcctcacatggctcctacctccagcacagaagcggcactaaaccaggtggtcaatcagggagcaccaccgaggttctgaatggtccagggatgagcagtgatgcctcaagctaagccaatcaaagccttccctgggattgtctcaaggagtccgcagtgagattctgggtctcagtactgggaaagggtgaggctgaggctgcctgctgtcctgggggcctcaccctgccaccaacaggaagccacacagagggaagcagaaatgagacgcagccagtgagggcagggtacaaaggtgagatcccggagagacagatgctgggacatcatccttgggtactggttccaacagtgcctgcagatggagccaccctcggagagtccacaacagcagccaatccattctatgcgtgtctgagctactttaagtcgggtttttgactgtttgaatgagagtctcatcttggctaggcaccatggcgcaacaactggggaggtggaggtaggaagattgcttgaggccaagagtcccagagcagcctgggcaacctatcaagacgctgtctttacgaaaagaaaaaaaactagctaggtgtggtggtgcgtgcctgtggtcccagctactggggaggctgaggtgggaggattgcttgagcccaggaagtggaggctgcagtgacctatgatggcaccactgtactccagcctgggtgacagagcaagaccctgtctaaaaaaaaaaaaaaaaaa

SEQ ID NO: 680 - DNA, 462 bp, Artificial
  cDNA Sequence
atggggggaagcgcgttaaaccagggagtcctggaaggggacgacgcccccggccagtccctgtacgagcggttaagtcagaggatgctggacatctcgggggaccggggcgtgctgaaggacgtcatccgagaaggagctggagacctagtggcgcctgatgcttcggtgctaaaatactatggatacctggaacacttggacagacccttcgattctaattactttaggaaaactcctcggctaatgaaacttggagagattacattgtggggcatggagctgggccttctgagcatgcagagaggagagctggccaggtttctgttcaaaccgaactacgcctatggaacgctgggctcccctcccttgatccccccaaacaccactgtcctgttcaagattgagctgcttgacttcctagactgtgctgagtcagacaagttttgtgctctctcagct

SEQ ID NO: 681 - DNA, 1965 bp, Artificial
  cDNA Sequence
cagtgtggcagtggaggccgtcagattactgatacttatccttaagaacatggaaggggtgctgatggacgtggactgtgagagcgtctaccccattgtgtaggcctctaattgaggcctggcctctgctgtgggtgaatttctgtactggaaacttttctaccctgagtgcgagataagaacgatgggtggaagagagcaacgccagagcccaggtgcccagaggactttcttccagcttctgctgtccttctttgtggagagcaagctccacgaccacgctgcttacttagtagacaacctgtgggactgtgcagggactcagctgaaggactgggagggtctgacaagcctgctgctggagaaggaccagagcacgtgccacatggagccagggccagggaccttccacctcctagggtgaaaccaggagagattgcttgcttcacttgtacaagaatcggctcccagacacctgccactcgtgaatgcatctgataaactcactcacactgaggccttggggactgaggccctggcggatcacgggtgcccaggggctcggaggccgcctcctctgggaagcctgcccaggttccgctggactcccacaggcaatacccctgggccttcctcgcggcccctgttggccccaattcccccaccccctgcaaggtctgtgcctctcctgcagccccgccaccaactagggcgagaggagctcgcccccacccaaacgtattggttcgatgaaggaagggcccatggttctgccactggccctggacacccagtgctggtttcccgtggaagtccccctggactgagtggcggctgggtgctctagtgatttgcgacctggggcctctgactcccatcatgttgggaaagtcgttgaacctcaccggtgaaacgggcacagtgaagtcatttccccgaagtctcaggactctgtgtaaggctggggacaggggcttgttggggcctaagggcaccttgggaactgcaggagcccgttctgcctccataagacactcactcctggcagggtcccctctccgggcacagcccagatccacccccatcatccctctccatctgtggctccctgcccctcacagaggattcatcactctgttcagaatccccaggactccctagggaaggaggtcccagcctggcctcccaagaccgtgcttgcccaattccaggacttcctcacatggctcctacctccagcacagaagcggcactaaaccaggtggtcaatcagggagcaccaccgaggttctgaatggtccagggatgagcagtgatgcctcaagctaagccaatcaaagccttccctgggattgtctcaaggagtccgcagtgagattctgggtctcagtactgggaaagggtgaggctgaggctgcctgctgtcctgggggcctcaccctgccaccaacaggaagccacacagagggaagcagaaatgagacgcagccagtgagggcagggtacaaaggtgagatcccggagagacagatgctgggacatcatccttgggtactggttccaacagtgcctgcagatggagccaccctcggagagtccacaacagcagccaatccattctatgcgtgtctgagctactttaagtcgggtttttgactgtttgaatgagagtctcatcttggctaggcaccatggcgcaacaactggggaggtggaggtaggaagattgcttgaggccaagagtcccagagcagcctgggcaacctatcaagacgctgtctttacgaaaagaaaaaaaactagctaggtgtggtggtgcgtgcctgtggtcccagctactggggaggctgaggtgggaggattgcttgagcccaggaagtggaggctgcagtgacctatgatggcaccactgtactccagcctgggtgacagagcaagaccctgtctaaaaaaaaaaaaaaaaaa

SEQ ID NO: 682 - DNA, 888 bp, Artificial
  cDNA Sequence
atggcccaggaggagggtgggagcctgcccgaggtgcgggcgcgggtcagggccgcgcatggcatccccgacctggcccaaaagctccatttctatgaccgctgggctccggactacgaccaggatgtggccaccctgctgtaccgtgcgccccgcctcgcagtggactgcctcacacaagcccttccaggcccgccccacagtgccctgatcctggacgtggcctgtggcacaggcctagtggctgccgagctgcgggctccaggcttcctccagctgcatggggtggatgggagcccagggatgctggaacaggcccaggcccccggcctctatcagcgcctcagcctctgcaccctgggccaggagcctctgcccagcccggaaaccttcgacgcggtgctgatagtcggtgccctcagtgacggccaggtgccctgcaatgcgatacctgagctacatgtcaccaagccatgcctttggagcatctctttctctttcctggtctcagtcttctcatctgggaaatggggctgctcaggggagatgagagctgtgagcaccgtttgtaaactttgcacattgcgctgcccgggctgggctggtgtgtctgaccaccaggaccaactcgtccaaccttcaatacaaggaggctctggaggccaccctggacaggctggagcaggctgggatgtgggaaggcctggtggcctggcctgtggaccgcctgtggaccgctgggagctggctacctccgagctggaggtggtatccggcatctctgccaaggatggcttcatctccggcattgtctacctgtaccgaaagtggaaggcgacccaggttgaggaagtgagatccagcccccagcccccagctggcccctga

SEQ ID NO: 683 - DNA, 426 bp, Artificial
  cDNA Sequence
atgtggggcagcaccaagggcctgggcctggccttgctcagtgcctgggagcagctgggcctgtctgtggccatctggacagatctgtttttgtcatgtctgcacggcctgatgttggtggccttgctcttggtggtagtgacctggagggtgtgtcagaagtcccactgcttccgactgggcaggcagctcagtaaggccttgcaagtgaactgcgtgctgtctgacctgctagaggacctacagagacagaatgagcagaaagcaccctggggccgttggcatcatccttggaccatcctgatggaccttcccatctcatcccatccgcagcccgctgctggaaatgggaagctgacatgtcccaaaggtcgatgcactggaatgcccggaggtcatcctctgggagtgtccacatatttgtga

SEQ ID NO: 684 - DNA, 3678 bp, Artificial
  cDNA Sequence
atgtctccggcggctgcggcggctggagcaggcgagcggcggcggccgatagcgagtgtcagggacggccggggccggggctgcggcgggccggccggggcggcgcttctcggcctgtcgctggtcggcctcctactgtacctcgtgcctgctgcggctgcgctggcctggctggccgtggggactaccgcggcctggtggggactgagccgcgagccccgaggttcgcgccccttgtcctccttcgttcagaaggcgcgacatcggcgaacactgttcgcttcgcctccggccaagtcgacagccaacggaaacctcctagagccgcggaccctgctcgaaggacctgaccctgccgaactgctcctcatgggcagttacctgggcaagcccgggccgccgcagcccgcccccgctccggagggccaggacctgcggaataggcctggccgccgcccacccgcccgcccggcgccgcgctccacaccgccctccccgccgacccatcgcgttcaccacttttacccctctctccccactcctcttctccgaccctccgggaggccttccccagatcgtgggactttaccagatcggtttgtaataacacctcgaagacgctatccgatccatcagacccagtattcctgtccgggggtacttcccacagtgtgctggaatggttatcacaagaaggctgtgctgtcccctcgcaactccaggatggtgtgtagcccagtgactgtgaggatcgcccctcctgacagaagattttcacgttctgcgccagagcagataatcagctcaacactgtcgtcaccatcaagtaatgccccagacccatgtgcaaaggagactgtactgagtgccctcaaagagaagaagaagaaaaggacagtggaggaagaagaccaaatattccttgatggccaggaaaataaaagacgccatgatagcagtggcagtggacattcagcatttgagcccctggtggccagtggagtccccgcttcttttgtgcctcctgggtctctgaagagaggcctcaattctcagagctcagatgaccacttgaataagagatcccgaagctcttccatgagctccttgacaggcgcttacacaagtggcatccctagctccagccgcaatgccattaccagttcctacagctccactcgaggcatctcacagcccagcctcatcccgctcccagacaccggagaggccagcaaagaaaataaggtattcggcattctcctgcagttttcatttgctacgtggacagaagggggtgaggaagaagaagagctgtgtcatcattccagttcttcaactccattggcagcagacaaggagtcccagggagaaaaggcagatacaaccccaaggaagaaacaaaactcgaattctcagtctacacctggcagctctgggcagcgtaagcggaaagttcagctgctgccttctcggcgaggggaacagctgaccttgcctccacctccccagcttggctattcgatcactgccgaggacctagacttagagaagaaggcttcattacagtggttcaaccaggccttggaggacaagagtgctgcctcgaactctgtcactgagaccccacctaccactcagccttcatttacctttaccctgcctgctgctgcaactgcctccccacccacctccctcctggccccaagcaccaacccactgttagagagcttgaagaagatgcagactcccccgagcctgccaccctgcccatctgctggagcagcaaccactgaggccctctcacctccaaagacacccagcctcctacccccgctgggtttatcacagtcagggccgccagggctgctccccagcccctcctttgactccaaacccccgaccactttgctggggctgatccctgctccatccatggtaccagccactgacaccaaggcacctccaacccttcaagcagagacggctaccaaaccccaagccacatctgccccgtcccccgcccccaagcaaagcttcctgtttggaacacagaacacctcaccttccagccctgccgcccctgctgcatcttcagcatctcccatgttcaagcccattttcacggctccacccaagagtgagaaggaaggccccacaccgcctggcccttcagtcacagccacagcgccctccagctcctccctccccacgaccaccagcaccacagccccgaccttccagcctgtctttagcagcatggggccacctgcatctgtgcccttgcctgctcccttcttcaagcagacaactactcccgccactgctcccaccacaactgccccgctcttcactggcctggccagcgccacctctgctgtggctcccatcacctctgccagtccatccacagactctgcttcgaagcctgcgtttggctttggcataaacagtgtgagcagcagcagtgtgagtaccacgaccagcaccgccactgccgcctcacagcctttcctcttcggggcgccccaggcctctgctgccagcttcaccccggccatgggctccatattccagtttggcaaacctcctgccttgcccacaaccaccacagtcaccaccttcagccagtccctgcccactgccgtgccaacggccaccagcagcagcgctgccgactttagtggttttggcagcaccctcgccacctccgccccggccaccagcagccagcccactctgacgttcagtaacacgagcacccccacgttcaacattccctttggctcaagcgccaagtccccgctcccatcatatccgggagccaacccccagcccgcatttggggccgctgaggggcagccaccgggggccgccaagccagcccttacccccagctttggcagctctttcacttttggaaactctgcagccccggccccggctactgcacccacacctgcacctgcgtccacgatcaagatcgtgcctgcgcacgtgcctacgcccatccagcctacctttggcggtgccacgcactcggcgtttggattgaaagccacggcttccgccttcggcgctcccgccagctcacagcccgcctttggcggctccactgctgtcttctccttcggtgcagccaccagctccggctttggagccaccacccagaccgccagcagcgggagcagcagctcggtgtttggcagcacaacaccatcacccttcacgtttgggggttcggcagcccccgctggcagtgggagctttgggatcaacgtggccaccccaggctccagcgccaccaccggagctttcagctttggagcaggacagagtgggagcacagccacctccacccccttcacagggggcttaggtcagaacgccctgggcaccaccggccagagcacaccgtttgccttcaacgtgggcagcacaactgagagcaaacctgtgtttggaaccgccacccccacctttggtcagaacacccctgcgcctggagtgggcacatcgggcagcagcctctcctttggggcatcttcagcacccgcccaaggctttgttggtgttggaccgttctcggcggccccttcattttccattggtgcgggatccaagaccccaggggctcgacagcgactgcaggcccgaaggcagcacacccgcaaaaagtag

SEQ ID NO: 685 - DNA, 1074 bp, Artificial
  cDNA Sequence
atggccatactgcccaaagtaatttatagattcaatgccatccccatcaagctaccaatgactttcttcacagaattggaaaaaactactttaaagttcatatggaaccaaaaaagagcccgcattgccaagacaatcctaagccaaaagaacaaagatggaggcatcacactacctgacttcaaactatactacaaggctacagtaaccaaaacagcactgagggctttatctgtttgtccagaagccagggaggatgtggatggagagcacgcagtgaagcgtcagaaggtaagaggccagacacgctgcaggccagaaacggcccgcaagtggctccaggtagcacagtttgaaaccagcagatccaatcccttcattttacagaaaaagaaacccacagaaggtgaaaaaatggggaaacgtgacaaaattcacagtgtgatgcatccagcctgggccagaaacaaaagaggcctggagagaatgtcaggggcgtggtgtagaagtcgaaccttgcttggtagaggcggtggctttgaggaccctggcgatggagagggtgtgtacactgttaagggcccatctgggaaaccgcagcctgtggagatgttggggacaaagccttttttgtcctttgccaccggaaaagaaacaattattgaacacatactacatgtcaggtacatcttggcagcctatgaatacaactgcaagcagcgacctggaaaatcttggtcttgtccagcatatgcaaagggcaggaattccgtgaggagctctttgcatgagaaactgaatgcaaatcctcccagcccttccatccttgccgaagcaagaagggaggaagagccaaacattgccactcacttgggttctccttcaaactccatgaaggacatctcatcagctccatttggcactgccccttcatgggcaggctttcactccagaccacgttatggccacggctcaaatctgttcagtcctgctgatacaccaggttccctctaccacaggacctttgcactgtctacactgcctggaatgttgaggctgcaagaaaacatgtga

SEQ ID NO: 686 - DNA, 2274 bp, Artificial
  cDNA Sequence
atggcgggtctgacggcggcggccccgcggcccggagtcctcctgctcctgctgtccatcctccacccctctcggcctggaggggtccctggggccattcctggtggagttcctggaggagtcttttatccaggggctggtctcggagcccttggaggaggagcgctggggcctggaggcaaacctcttaagccagttcccggagggcttgcgggtgctggccttggggcagggctcggcgccttccccgcagttacctttccgggggctctggtgcctggtggagtggctgacgctgctgcagcctataaagctgctaaggctggcgctgggcttggtggtgtcccaggagttggtggcttaggagtgtctgcaggtgcggtggttcctcagcctggagccggagtgaagcctgggaaagtgccgggtgtggggctgccaggtgtatacccaggtggcgtgctcccaggagctcggttccccggtgtgggggtgctccctggagttcccactggagcaggagttaagcccaaggctccaggtgtaggtggagcttttgctggaatcccaggagttggaccctttgggggaccgcaacctggagtcccactggggtatcccatcaaggcccccaagctgcctggtggctatggactgccctacaccacagggaaactgccctatggctatgggcccggaggagtggctggtgcagcgggcaaggctggttacccaacagggacaggggttggcccccaggcagcagcagcagcggcagctaaagcagcagcaaagttcggtgctggagcagccggagtcctccctggtgttggaggggctggtgttcctggcgtgcctggggcaattcctggaattggaggcatcgcaggcgttgggactccagctgcagctgcagctgcagcagcagccgctaaggcagccaagtatggagctgctgcaggcttagtgcctggtgggccaggctttggcccgggagtagttggtgtcccaggagctggcgttccaggtgttggtgtcccaggagctgggattccagttgtcccaggtgctgggatcccaggtgctgcggttccaggggttgtgtcaccagaagcagctgctaaggcagctgcaaaggcagccaaatacggggccaggcccggagtcggagttggaggcattcctacttacggggttggagctgggggctttcccggctttggtgtcggagtcggaggtatccctggagtcgcaggtgtccctggtgtcggaggtgttcccggagtcggaggtgtcccgggagttggcatttcccccgaagctcaggcagcagctgccgccaaggctgccaagtacggagtggggaccccagcagctgcagctgctaaagcagccgccaaagccgcccagtttgggttagttcctggtgtcggcgtggctcctggagttggcgtggctcctggtgtcggtgtggctcctggagttggcttggctcctggagttggcgtggctcctggagttggtgtggctcctggcgttggcgtggctcccggcattggccctggtggagttgcagctgcagcaaaatccgctgccaaggtggctgccaaagcccagctccgagctgcagctgggcttggtgctggcatccctggacttggagttggtgtcggcgtccctggacttggagttggtgctggtgttcctggacttggagttggtgctggtgttcctggcttcggggcaggtgcagatgagggagttaggcggagcctgtcccctgagctcagggaaggagatccctcctcctctcagcacctccccagcaccccctcatcacccagggtacctggagccctggctgccgctaaagcagccaaatatggagcagcagtgcctggggtccttggagggctcggggctctcggtggagtaggcatcccaggcggtgtggtgggagccggacccgccgccgccgctgccgcagccaaagctgctgccaaagccgcccagtttggcctagtgggagccgctgggctcggaggactcggagtcggagggcttggagttccaggtgttgggggccttggaggtatacctccagctgcagccgctaaagcagctaaatacggtgctgctggccttggaggtgtcctagggggtgccgggcagttcccacttggaggagtggcagcaagacctggcttcggattgtctcccattttcccaggtggggcctgcctggggaaagcttgtggccggaagagaaaatga

SEQ ID NO: 687 - DNA, 912 bp, Artificial
  cDNA Sequence
atggctcagaggctcaggcaagagctacagatgctcatgaccgaatgtctcacctgggcccggaatggcagcagcaagcaccctctcagcctagcccagaagccagagttcctatttcatcagttgcaaagcagagacaatgccatctgcccgatagcagagcaaaaggcagcccctggggtagatcccagccccccacgtaggtcccttggctggaaaaggaagagggaatgtttggatgaatctgatgatgagccagagaaggagctcgcccctgagcctgaggagacctgggtggcggagacgctgtgtggcctcaagatgaaggcgaagcgacggcgagtgtcgctcgtgctccctgagtactacgaggccttcaacaggctgcttgaggatcctgtcattaaaagactcctggcctgggacaaagatctgagggtgtcggacaagtatctcctggctatggtcatagcgtatttcagccgggccggcctcccctcctggcaataccaacgcattcatttcttcctggctctctatctggccaatgacatggaggaggacgatgaggcccccaaacaaaacatcttctacttcctgtacgaggagacccgctctcatatacccttgctccgtgagctttggttccagttatgccgttacatgaacccgagggccaggaagaactgctctcagatagccttgttccggaagtatcggttccacttcttttgttccatgcgctgcagggcttgggtttccctggaggagttggaagagatccaggcttatgacccagagcactggaacaccggacccaggggagatgtggattttcagcaggaactttattccaatgctaatggcagacatcaggaaggaggagaggaaccatttgtgcagatcatctag

SEQ ID NO: 688 - DNA, 1110 bp, Artificial
  cDNA Sequence
atgttgtccaggctggccttgaactcctgggttcaagcaatcctcctgccgtggcctcccaaagtgctgggattacagccccggcgccgcggctcctttaagagcgggaggggcgccccctggcggcggagcggtgcgtgcggccggagccggagcggatcctggagccggagcggagcggagcggagcggagccggggcggagcgggccgagcgggccgagccagcagccgagctgggggcgcgggcgggcggcatgtaccgggcccgggcggcgcgggcggggccggagcccggcagcccggggcgctttgggatcctcagcaccgggcagctccgggacctgcttcaggatgagcccaagctggaccggatcgtgcggctcagcaggaagttccagggcctgcagctggagcgtgaggcctgcctggcctccaactacgcgctggccaaggagaacctggccctgcggccccgcctggagatgggccgggctgccctggccatcaaataccaggagcttcgtgaggtggccgagaactgcgcggacaagctgcagcgactggaaagcatgcatcgctggagtccccactgcgcgctgggctggctgcaggctgagctagaagaggcggagcaggaggcagaggagcagatggagcagctgctgctcggggagcaaagcctggaggccttcctgcctgccttccagcgtggccgcgccctggcccacctgaggcggacgcaggcagagaagctgcaggagctgctgcggcgtcgggagcgttctgcccagccggcccccacctcggctgctgatccccccaaatccttcccggctgcagctgtcctgcccactggggccgcccgggggccaccagcagtgccccggagcctgccccccttggactcccgcccagtgcccccactgaagggctcccccgggtgccccctcggcccggcccccctgctgagccctcggccctcgcagccagagcccccccacttcacactcagtcccgaacagaaacacttgagcacctacaatctcacagccaactccctgccaacgtccagtgactcacagttaagagagcttcagcagcagctctga

SEQ ID NO: 689 - DNA, 11565 bp, Artificial
  cDNA Sequence
ctcggcgggggcccgctcccaggcccgctcccgagcccgttccgctcccgtccgccttcttctcgccttctctccgcgtggctcctccgtcccggcgtctccaaaactgaatgagcgagcggcgcgtagggcgcgcggcggcggcggcggcggcggcggcatggagcgcagtggctgggcccggcagactttcctcctagcgctgttgctgggggcgacgctgagggcgcgcgcggcggctggctattacccccgcttttcgcccttctttttcctgtgcacccaccacggggagctggaaggggatggggagcagggcgaggtgctcatttccctgcatattgcgggcaaccccacctactacgttccgggacaagaataccatgtgacaatttcaacaagcaccttttttgacggcttgctggtgacaggactatacacatctacaagtgttcaggcatcacagagcattggaggttccagtgctttcggatttgggatcatgtctgaccaccagtttggtaaccagtttatgtgcagtgtggtagcctctcacgtgagtcacctgcccacaaccaacctcagtttcatctggattgctccacctgcgggcacaggctgtgtgaatttcatggctacagcaacacaccggggccaggttattttcaaagatgctttagcccagcagttgtgtgaacaaggagctccaacagatgtcactgtgcacccacatctagctgaaatacatagtgacagcattatcctgagagatgactttgactcctaccaccaactgcaattaaatccaaatatatgggttgaatgtaacaactgtgagactggagaacagtgtggcgcgattatgcatggcaatgccgtcaccttctgtgaaccatatggcccacgagaactgattaccacaggccttaatacaacaacagcttctgtcctccaattttccattgggtcaggttcatgtcgctttagttattcagaccccagcatcatcgtgttatatgccaagaataactctgcggactggattcagctagagaaaattagagccccttccaatgtcagcacaatcatccatatcctctaccttcctgaggacgccaaaggggagaatgtccaatttcagtggaagcaggaaaatcttcgtgtaggtgaagtgtatgaagcctgctgggccttagataacatcttgatcatcaattcagctcacagacaagtcgttttagaagatagtctcgacccagtggacacaggcaactggcttttcttcccaggagctacagttaagcatagctgtcagtcagatgggaactccatttatttccatggaaatgaaggcagcgagttcaattttgccaccaccagggatgtagatctttccacagaagatattcaagagcaatggtcagaagaatttgagagccagcctacaggatgggatgtcttgggagctgtcattggtacagaatgtggaacgatagaatcaggcttatcaatggtcttcctcaaagatggagagaggaaattatgcactccatccatggacactaccggttatgggaacctgaggttttactttgtgatgggaggaatttgtgaccctggaaattctcatgaaaatgacataatcctgtatgcaaaaattgaaggaagaaaagagcatataacactggataccctttcctattcctcatataaggttccgtctttggtttctgtggtcatcaatcctgaacttcagactcctgctaccaaattttgtctcaggcaaaagaaccatcaaggacataataggaatgtctgggctgtagactttttccatgtcttgcctgttctcccttctacaatgtctcacatgatacagttttccatcaatctgggatgtggaacgcatcagcctggtaacagtgtcagcttggaattttctaccaaccatgggcgctcctggtccctccttcacactgaatgcttacctgagatctgtgctggaccccacctcccccacagcactgtctactcctctgaaaactacagtgggtggaaccgaataacaattccccttcctaacgcagcactaacccggaacaccaggattcgctggagacaaacaggaccaatccttggaaacatgtgggcaattgataatgtttatattggcccgtcatgtctcaaattctgttctggcagaggacagtgcactagacatggttgcaagtgtgaccctggattttctggcccagcttgtgagatggcatcccagacattcccaatgtttatttctgaaagctttggcagttccaggctctcctcttaccataacttttactctatccgtggtgctgaagtcagctttggttgtggtgtcttggccagtggtaaggccctggttttcaacaaagatgggcggcgtcagctaattacatctttccttgacagctcacaatccaggtttctccagttcacactgagactggggagcaaatctgttctgagcacgtgcagagcccctgatcagcctggtgaaggagttttgttgcattattcttatgataatgggataacttggaaactcctggagcattattcatatctcagctatcatgagcccagaataatctccgtagaactaccaggtgatgcaaagcagtttggaattcagttcagatggtggcaaccgtatcattcttcccagagagaagatgtatgggctattgatgagattatcatgacatctgtgcttttcaacagcattagtcttgactttaccaatcttgtggaggtcactcagtctctgggattctaccttggaaatgttcagccatactgtggccacgactggaccctttgttttacaggagattctaaacttgcctcaagtatgcgctatgtggaaacacaatcaatgcagataggagcatcctatatgattcagttcagtttggtgatgggatgtggccagaaatacaccccacacatggacaaccaggtgaagctggagtactcaaccaaccacggccttacctggcacctcgtccaagaagaatgccttccaagtatgccaagttgtcaggaatttacatcagcaagtatttaccatgccagtgagtttacacagtggaggagagtcatagtgcttcttccccagaaaacttggtccagtgctacccgtttccgctggagccagagctattacacagctcaagacgagtgggctttggacagcatttacattgggcagcagtgccccaacatgtgcagtgggcatggctcatgcgatcatggcatatgcaggtgtgaccaggggtaccaaggcactgaatgccacccagaagctgcccttccgtccacaattatgtcagattttgagaaccagaatggctgggagtctgactggcaagaagttattgggggagaaattgtaaaaccagaacaagggtgtggtgtcatctcttctggatcatctctgtacttcagcaaggctgggaaaagacagctggtgagttgggacctggatacttcttgggtggactttgtccagttctacatccagataggcggagagagtgcttcatgcaacaagcctgacagcagagaggagggcgtcctccttcagtacagcaacaatgggggcatccagtggcacctgctagcagagatgtacttttcagacttcagcaaacccagatttgtctatctggagcttccagctgctgccaagaccccttgcaccaggttccgctggtggcagcccgtgttctcaggggaggactatgaccagtgggcagtcgatgacatcatcattctgtccgagaagcagaagcagatcatcccagttatcaatccaactttacctcagaacttttatgagaagccagcttttgattaccctatgaatcagatgagtgtgtggttgatgttggctaatgaaggaatggttaaaaatgaaaccttctgtgctgccacaccatcagcaatgatatttggaaaatcagatggagatcgatttgcagtaactcgagatttgaccctgaaacctggatatgtgctacagttcaagctaaacataggttgtgccaatcaattcagcagtactgctccagttcttcttcagtactctcatgatgctggtatgtcctggtttctggtgaaagaaggctgttacccggcttctgcaggcaaaggatgcgaaggaaactccagagaactaagtgagcccaccatgtatcacacaggggactttgaagaatggacaagaatcaccattgttattccaaggtctcttgcatccagcaagaccagattccgatggatccaggagagcagctcacagaaaaacgtgcctccatttggtttagatggagtgtacatatccgagccttgtcccagttactgcagtggccatggggactgcatttcaggagtgtgtttctgtgacctgggatatactgctgcacaaggaacctgtgtgtcaaatgtccccaatcacaatgagatgttcgataggtttgaggggaagctcagccctctgtggtacaagataacaggtgcccaggttggaactggctgtggaacacttaacgatggcaaatctctctacttcaatggccctgggaaaagggaagcccggacggtccctctggacaccaggaatatcagacttgttcaattttatatacaaattggaagcaaaacttcaggcattacctgcatcaaaccaagaactagaaatgaagggcttattgttcagtattcaaatgacaatgggatactctggcatttgcttcgagagttggacttcatgtccttcctggaaccacagatcatttccattgacctgccacaggacgcgaagacacctgcaacggcatttcgatggtggcaaccgcaacatgggaagcattcagcccagtgggctttggatgatgttcttataggaatgaatgacagctctcaaactggatttcaagacaaatttgatggctctatagatttgcaagccaactggtatcgaatccaaggaggtcaagttgatattgactgtctctctatggatactgctctgatattcactgaaaacataggaaaacctcgttatgctgagacctgggattttcatgtgtcagcatctacctttttgcagtttgaaatgagcatgggctgtagcaagcccttcagcaactcccacagtgtacagctccagtattctctgaacaatggcaaggactggcatcttgtcaccgaagagtgtgttcctccaaccattggctgtctgcattacacggaaagttcaatttacacctcggaaagattccagaattggaagcggatcactgtctaccttccactctccaccatttctcccaggacccggttcagatggattcaggccaactacactgtgggggctgattcctgggcgattgataatgttgtactggcctcagggtgcccttggatgtgctcaggacgagggatttgtgatgctggacgctgtgtgtgtgaccggggctttggtggaccctattgtgttcctgttgttcctctgccctcgattcttaaagacgatttcaatgggaatttacatcctgacctttggcctgaagtgtatggtgcagagagggggaatctgaatggtgaaaccatcaaatctggaacatctctaatttttaaaggggaaggactaaggatgcttatttcaagagatctagattgtacaaatacaatgtatgtccagttttcacttagatttatagcaaaaagtaccccagagagatctcactctattctgttacaattctccatcagtggaggaatcacttggcacctgatggatgaattttactttcctcaaacaacgaatatacttttcatcaatgttcccttgccatacactgcccaaaccaatgctacaagattcagactctggcaaccttataataacggtaagaaagaagaaatctggattgttgatgacttcattatcgatggaaataatgtaaacaaccctgtgatgctcttggatacatttgattttgggcccagagaagacaattggtttttctatcctggtggtaacatcggtctttattgtccatattcttcaaagggggcacctgaagaagattcagctatggtgtttgtttcaaatgaagttggtgagcattccattaccacccgtgacctaaatgtgaatgagaacaccatcatacaatttgagatcaacgttggctgttcgactgatagctcatccgcggatccagtgagactggaattttcaagggacttcggggcgacctggcaccttctgctgcccctctgctaccacagcagcagccacgtcagctctttatgctccaccgagcaccaccccagcagcacctactacgcaggaaccatgcagggctggaggagggaggtcgtgcactttgggaagctgcacctttgtggatctgtccgtttcagatggtaccagggattttaccctgccggctctcagccagtgacatgggccattgataatgtctacatcggtccccagtgtgaggagatgtgtaatggacaggggagctgtatcaatggaaccaaatgtatatgtgaccctggctactcaggtccaacctgtaaaataagcaccaaaaatcctgattttctcaaagatgatttcgaaggtcagctagaatctgatagattcttattaatgagtggtgggaaaccatctcgaaagtgtggaatcctttctagtggaaacaacctctttttcaatgaagatggcttgcgcatgttgatgacacgagacctggatttatcacatgctagatttgtgcagttcttcatgagactgggatgtggtaaaggcgttcctgaccccaggagtcaacccgtgctcctacagtattctctcaacggtggcctctcgtggagtcttcttcaggagttccttttcagcaattccagcaatgtgggcaggtacattgccctggagatacccttgaaagcccgttctggttctactcgccttcgctggtggcaaccgtctgagaatgggcacttctacagcccctgggttatcgatcagattcttattggaggaaatatttctggtaatacggtcttggaagatgatttcacaacccttgatagtaggaaatggctgcttcacccaggaggcaccaagatgcccgtgtgtggctctactggtgatgccctggtcttcattgaaaaggccagcacccgttacgtggtcagcacagacgttgccgtgaatgaggattccttcctacagatagacttcgctgcctcctgctcagtcacagactcttgttatgcgattgaattggaatactcagtagatcttggattgtcatggcacccattggtaagggactgtctgcctaccaatgtggaatgcagtcgctatcatctgcaacggatcctggtgtcagacactttcaacaagtggactagaatcactctgcctctccctccttataccaggtcccaagccactcgtttccgttggcatcaaccagctccttttgacaagcagcagacatgggcaatagataatgtctatatcggggatggctgcatagacatgtgcagtggccatgggagatgcatccagggaaactgcgtctgtgatgaacagtggggtggcctgtactgtgatgaccccgagacctctcttccaacccaactcaaagacaacttcaatcgagctccatccagtcagaactggctgactgtgaacggagggaaattgagtacagtgtgtggagccgtggcgtcgggaatggctctccatttcagtgggggttgtagtcgattattagtcactgtggatctaaacctcactaatgctgagttcatccaattttacttcatgtatgggtgcctgattacaccaaacaaccgtaaccaaggtgttctcttggaatattctgtcaatggaggcattacctggaacctgctcatggagattttctatgaccagtacagtaagcccggatttgtgaatatccttctccctcctgatgctaaagagattgccactcgcttccgctggtggcagccaagacatgacggcctggatcagaacgactgggccattgacaatgtcctcatctcaggctctgctgaccaaaggaccgttatgctggacaccttcagcagcgccccagtaccccagcatgagcgctcccctgcagatgccggccctgtcgggaggatcgcctttgacatgtttatggaagacaaaacttcagtgaatgagcactggctattccatgatgattgtacagtagaaagattctgtgactcccctgatggtgtgatgctctgtggcagtcatgatggacgggaggtgtatgcagtgacccatgacctgactcccactgaaggctggattatgcaattcaagatctcagttggatgtaaggtgtctgaaaaaattgcccagaatcaaattcatgtgcagtattctactgacttcggtgtgagttggaattatctggtccctcagtgcttgcctgctgacccaaaatgctctggaagtgtttctcagccatctgtattctttccaactaaagggtggaaaaggatcacctacccacttcctgaaagcttagtgggaaatccggtaaggtttaggttctatcagaagtactcagacatgcagtgggcaatcgataatttctacctgggccctggatgcttggacaactgcaggggccatggagattgcttaagggaacagtgcatctgtgatccgggatactcagggccaaactgctacttgacccacactctgaagactttcctgaaggaacgctttgacagtgaagaaatcaaacctgacttatggatgtccttagaaggtggaagtacttgcactgagtgtggaattcttgccgaggacactgcactctattttgggggatccactgtgagacaagcggttacacaagatttggatcttcgaggtgcaaagttcctgcaatactgggggcgcatcggtagtgagaacaacatgacctcttgccatcgtcccatctgccggaaggaaggcgtgctgttggactactctaccgatggaggaattacctggactttgctccatgagatggattaccagaaatacatttctgttagacacgactacatacttcttcctgaagatgccctcaccaacacaactcgacttcgctggtggcagccttttgtgatcagcaatggaattgtggtctctggggtggagcgtgctcagtgggcactggacaacattttgattggtggagcagaaatcaatcccagccaattggtggacacttttgatgatgaaggcacttcccatgaagaaaactggagtttttaccctaatgctgtaaggacagcaggattttgtggcaatccatcctttcacctctattggccaaataaaaagaaggacaagactcacaatgctctctcctcccgagaactcattatacagccaggatacatgatgcagtttaaaattgtggtgggttgtgaagccacttcttgtggtgaccttcattccgtaatgctggaatacactaaggatgcaagatcggattcctggcagctcgtacagacccagtgccttccttcctcttctaacagcattggctgctcccctttccagttccatgaagccaccatctacaactctgtcaacagctcaagctggaaaagaatcaccatccagctgcctgaccatgtctcctctagtgcaacacagttccgctggatccagaagggagaagaaactgagaagcaaagctgggcaattgaccacgtgtacattggagaggcttgccccaagctctgcagcgggcacggatactgcacgaccggtgccatctgcatctgcgacgagagcttccaaggtgatgactgctctgttttcagtcacgaccttcccagttatattaaagataattttgagtccgcaagagtcaccgaggcaaactgggagaccattcaaggtggagtcataggaagtggctgtgggcagctggccccctacgcccatggagactcactgtactttaatggctgtcagatcaggcaagcagctaccaagcctctggatctcactcgagcaagcaaaatcatgtttgttttgcaaattgggagcatgtcgcagacggacagctgcaacagtgacctgagtggcccccacgctgtggacaaggcagtgctgctgcaatacagcgtcaacaacgggatcacctggcatgtcatcgcccagcaccagccaaaggacttcacacaagctcagagagtgtcttacaatgtccccctggaggcacggatgaaaggagtcttactgcgctggtggcaaccacgccacaatggaacaggtcatgatcaatgggctttggaccatgtggaggtcgtccttaacagcactcgcaaacaaaattacatgatgaatttttcacgacaacatgggctcagacatttctacaacagaagacgaaggtcacttaggcgatacccatgaagaatcaaaaagtttattttttttcttccaacatgtgatgtgttgctctccattcttttaaatctcgcactacatctgatatcaggaaatatctgtgaaggacttggtgattacctgaaagcccttctcaagaccgagtgtacaccactttcccacactgtgaactaatgacaagtgacttatttgctcataagtaaatgtcttcatgttgatgtgtccgtgaaagttgtgatctgttgtaatatcagttacagtggcagtattgacaataagaaacagtttaacagaaaaatgaaatttaagcacaaaaaatttaagagattttatgtttaaaatggcatttagcacagtatttaacattcttggtcacaaagctatttaagtggactgtatttcggctatgtctcatgttttatatgattaaattatcattgtttgtcctttatgtattctcttctacaatacaacacattgaaactgtatttacttgttatgttgtaatattttgctgctgaatttggggctacttatattctgcagaaaattaattgaaatacctattcaagaagatagttgtaaagatattgtatctcctttaatatactccttaaaaatgtatgttggtttagcgttgttttgtggataagaaaaatgcttgaccctgaaatattttctactttaaattgtggatgaagaccctatctcccacaaataagttcccatttccttgtctaaagatctttttttaagtgttctgtggctgatttactaacagtaactgccattttttgtctgtgataacagagtgatttgtaaaacagtggttgttttttcattgtgttttcttcgtggattgttttttctgcgggtcatattcataccttctgatgaagttgtacaacaccagcaacattataatggccctgtagctctgaatgctatttgtgtaactgaaaggttgcactctagggtgaaccaagctataaaagcccatgcttaaataaaaattatgtccaaaagcc

SEQ ID NO: 690 - DNA, 942 bp, Artificial
  cDNA Sequence
aaaaggaagaaggagtggtcagatgaatctgaggaggagccggagaaggagctcgcccctgagcctgaggagacctgggtagtggagatgctgtgtgggctcaagatgaagctgaagcaacagcgagtgtcacccatcctccctgagcaccacaaggacttcaacagtcagcttgcccctggggtagatcccagccccccgcataggtccttttgctggaaaaggaagagggagtggtgggacgaatctgaggagtcgttggaggaggagccacggaaggtgctcgcccctgagcctgaggagatctgggtggcggagatgctgtgtggcctcaagatgaagctgaagcgacggcgagtgtcgctcgtgctccctgagcaccacgaggccttcaacaggctgcttgaggatcctgtcattaaaagattcctggcctgggacaaagatctgagggtgtcggacaagtatctcctggctatggtcatagcgtatttcagccgggccggcctcccctcctggcaataccaacgcattcatttcttcctggctctctacctggccaatgacatggaggaggacgacgaggaccccaaacaaaacatcttctacttcctgtatgggaagacccgctctcgcatacccttggtccgtaaccgtcggttccagttatgccgttgcttgaacccgagggccaggaagaaccgctctcagatagccctgttccagaaacttcggttccatgagctttggttccagttatgccgttacatgaacccgagggccaggaagaactgctctcagatagccttgttccggaagtatcggttccacttcttttgttccatgcgctgcagggcttgggtttccctggaggagttggaagagatccaggcttatgacccagagcactgggtgtgggcgcgagatcgcgcccacctttcc

SEQ ID NO: 691 - DNA, 2478 bp, Artificial
  cDNA Sequence
atggccaagcgcagctcgctgtacatccgcatcgtggaggggaagaaccttcccgccaaggacatcactggcagcagcgacccctactgcatcgtgaaggtggacaatgagcccatcatcaggtaccgcccccacccccaggaccgaggggcgctcagcctctcatcggcccgcgctctccccgcaaaggggacagccacagtgtggaagaccctgtgccccttctggggtgaggagtaccaagtgcacctgccgcccaccttccacgctgtggctttctatgtcatggatgaggatgccctcagccgggacgacgttatcggaaaggtctgccttacaagggacaccatagcctctcaccctaagggtttcagcgggtgggcccacctgacagaggtcgaccccgacgaggaggtgcagggcgagatccacctgcggctggaagtgtggccaggggcccgggcctgccggctacgctgctctgtgctggaggccagggatctggccccaaaggaccgcaatggcacatctgaccccttcgtccgagtgcgctacaagggccggacacgggagacctcgatcgtgaagaagtcatgctacccacgctggaatgagacgtttgaatttgagctgcaggagggggccatggaggcgctgtgcgtggaggcctgggactgggaccttgtcagccgaaacgacttcctgggcaaagtggtgattgatgtccagagactgcgggtggtgcagcaggaggagggctggttccggctgcagcccgaccagtccaagagccggcggcatgacgagggcaacctgggctccttgcagctggaggtgcggctgcgggacgagacggtgctgccctccagctactaccagccactggtgcacctgctgtgccacgaggtcaagctgggcatgcagggcccagggcagctgatcccactcatcgaggagacaaccagcaccgagtgtcgccaggacgtggccacgaacctgctcaagctcttcctggggcaggggctggccaaggacttcctggacctgctcttccagctggagctgagtcgcaccagtgagaccaacaccctgttccggagcaactctctggcctcaaagtccgtggagtcttttctgaaggtggccgggatgcagtacctgcacggcgtcctgggccccatcatcaacaaggtgtttgaggagaagaagtacgtggagctggaccccagcaaagtggaagttaaggatgtagggtgctccgggctgcaccgcccgcagaccgaggccgaggtgctggagcagagcgcgcagacgctgcgcgcccacctgggggccctgctgagcgcgctcagccgctcggttcgcgcgtgccccgccgtggtgcgcgccaccttccgccagctcttccggcgcgtgcgcgagcgcttccccggcgcccagcacgagaatgtaccgttcatcgccgtcaccagcttcctgtgcctgcgcttcttctctcccgccatcatgtcgcccaagctcttccacctgcgggagcgccacgcggacgcccgcaccagccgcaccctgctcctgttggccaaggcagtccagaacgtgggcaacatggacacgccggcttccagggccaaggaggcttggatggagccgctgcagcccaccgtgcaccagggcgtggcgcagctgaaggacttcatcaccaagctcgtggacatcgaggagaaggacgagctggacctgcagcggacgctgagtttgcaggcgccacctgtgaaggaggggccactcttcatccacaggaccaagggcaagggccccctcatgtcctcctccttcaagaagctctacttctccctcactaccgaggccctcagcttcgcgaagacgcccagctccaagaaaagcgccctcatcaagttagccaacatccgggcagcggaaaaggttgaggaaaagagctttggcggctcgcacgtcatgcaggtcatctacacggacgacgccggcaggccccagactgcctacctgcagtgcaagtgtgtgaatgagcttaaccagtggctgtctgcgctgcggaaggtgagcatcaacaacaccggactgctgggctcctaccaccctggcgtcttccgtggggacaagtggagctgctgccaccaaaaagagaagacaggtcagggctgcgataagacccggtcacgggtgaccctgcaggagtggaatgaccctcttgaccatgaccttgaggcccagctcatctaccggcacctgctgggcgtggaggccatgctgtgggagaggcaccgggagctgagcgggggcgcagaggcaggcacggtgcccacgagccctggcaaagtccccgaggactcattggcccggctgctccgggtgctgcaggacctccgcgaggcccatagctccagcccggccggctccccaccctcagagcccaactgcctcctggagctgcagacg

SEQ ID NO: 692 - DNA, 3215 bp, Artificial
  cDNA Sequence
ccccgcgctgcgcggagcagggaccaggcggttgcggcggcgacagccatggccggcgcgctggcaggtctggccgcgggcttgcaggtcccgcgggtcgcgcccagcccagactcggactcggacacagactcggaggacccgagtctccggcgcagcgcgggcggcttgctccgctcgcaggtcatccacagcggtcacttcatggtgtcgtcgccgcacagcgactcgctgccccggcggcgcgaccaggaggggtccgtggggccctccgacttcgggccgcgcagtatcgaccccacactcacacgcctcttcgagtgcttgagcctggcctacagtggcaagctggtgtctcccaagtggaagaatttcaaaggcctcaagctgctctgcagagacaagatccgcctgaacaacgccatctggagggcctggtatatccagtatgtgaagcggaggaagagccccgtgtgtggcttcgtgacccccctgcaggggcctgaggctgatgcgcaccggaagccggaggccgtggtcctggaggggaactactggaagcggcgcatcgaggtggtgatgcgggaataccacaagtggcgcatctactacaagaagcggctccgtaagcccagcagggaagatgacctcctggcccctaagcaggcggaaggcaggtggccgccgccggagcaatggtgcaaacagctcttctccagtgtggtccccgtgctgctgggggacccagaggaggagccgggtgggcggcagctcctggacctcaattgctttttgtccgacatctcagacactctcttcaccatgactcagtccggcccttcgcccctgcagctgccgcctgaggatgcctacgtcggcaatgctgacatgatccagccggacctgacgccactgcagccaagcctggatgacttcatggacatctcagatttctttaccaactcccgcctcccacagccgcccatgccttcaaacttcccagagccccccagcttcagccccgtggttgactccctcttcagcagtgggaccctgggcccagaggtgcccccggcttcctcggccatgacccacctctctggacacagccgtctgcaggctcggaacagctgccctggccccttggactccagcgccttcctgagttctgatttcctccttcctgaagaccccaagccccggctcccaccccctcctgtacccccacctctgctgcattaccctccccctgccaaggtgccaggcctggagccctgccccccacctcccttccctcccatggcaccacccactgctttgctgcaggaagagcctctcttctctcccaggtttcccttccccaccgtccctcctgccccaggagtgtctccgctgcctgctcctgcagccttcccacccaccccacagtctgtccccagcccagcccccacccccttccccatagagcttctacccttggggtattcggagcctgcctttgggccttgcttctccatgcccagaggcaagccccccgccccatcccctaggggacagaaagccagcccccctaccttagcccctgccactgccagtccccccaccactgcggggagcaacaacccctgcctcacacagctgctcacagcagctaagccggagcaagccctggagccaccacttgtatccagcaccctcctccggtccccagggtccccgcaggagacagtccctgaattcccctgcacattccttcccccgaccccggcccctacaccgccccggccacctccaggcccggccacattggccccttccaggcccctgcttgtccccaaagcggagcggctctcacccccagcgcccagcggcagtgaacggcggctgtcaggggacctcagctccatgccaggccctgggactctgagcgtccgtgtctctcccccgcaacccatcctcagccggggccgtccagacagcaacaagaaccggcgtatcacacacatctccgcggagcagaagcggcgcttcaacatcaagctggggtttgacacccttcatgggctcgtgagcacactcagtgcccagcccagcctcaaggagcgtgcgggcttgcaggaggaggcccagcagctgcgggatgagattgaggagctcaatgccgccattaacctgtgccagcagcagctgcccgccacaggggtacccatcacacaccagcgttttgaccagatgcgagacatgtttgatgactacgtccgaacccgtacgctgcacaactggaagttctgggtgttcagcatcctcatccggcctctgtttgagtccttcaacgggatggtgtccacggcaagtgtgcacaccctccgccagacctcactggcctggctggaccagtactgctctctgcccgctctccggccaactgtcctgaactccctacgccagctgggcacatctaccagtatcctgaccgacccgggccgcatccctgagcaagccacacgggcagtcacagagggcacccttggcaaacctttatagtcctggccagaccctgctgctcactcagctgccctgggggctgctttccctgggcacgggctccagggatcatctctgggcactcccttcctgccccaggccctggctctgcccttccctggggggtggagcagggtccaggtttcacacttgccacctcctggaggtcaagaagagcagagtccccgtccctgctctgccactgtgctccagcaccgtgaccttgggtgactcgtccgctgtctttggaccgctgtgtttcaatctgcaaaatggggatggggaaggttcaatcagcagatgacccccaggccttggcagctgtgacattgggggcctaggctggcaactccgggggctcaacggtggaaagaggaggatgctgtttctctgtcacctccacttgctccccgacaggtggggcacagacctctgttcctgagcagagaagcagaaaaggaggttccctctctctgctccttcactgctgacccagaggggctgcaggatggtttcccctgggagaggccaggagggcctgatcccaggagacaccagggccagagtgaccacagcagggcaggcatcatgtgtgtgtgtgtgtgtggatgtgtgtgtgtgggttttgtaaagaattcttgaccaataaaagcaaaaactgtctgctggtt

SEQ ID NO: 693 - DNA, 1172 bp, Artificial
  cDNA Sequence
cctgccgaatcaattcaacatggcagccatgcgctggcgatggtggcagcggctgttaccttggaggttgctgcaggcccgtggctttccacaaaattctgcacccagcctgggcctaggagcgaggacttattcccagggcgactgctcgtattcgcgcacggcgctgtatgatctgctcggcgtcccctccacagccacgcaggcccaaatcaaggcggcttactaccgtcagtgctttctctaccacccggaccgcaactccgggagcgcggaggccgccgagcgcttcacgcgcatctcccaggcctacgtggtgctgggcagtgccaccctccgtcgcaagtatgatcgcggcctactcagcgacgaggacctgcgcggacctggcgtccggccctccaggacgcccgcacccgaccccggctcgccgcgtaccccgccgcccacctctcggacccacgacggttctcgggcctcccccggcgccaaccgcacgatgttcaactttgacgccttctaccaggcccactacggggaacaactggagcgggaacggcgcctgagggcccggcgggaggcccttcgcaaacggcaggagtatcggtccatgaaaggcctccgctgggaggatacccgagacacggctgccattttcctcatcttttcaatcttcatcatcatcggcttttatatttaatcggagagagaagggaaggggagtgtccccagccaaccccccagaaacggccttttttcctgcctctgaacccttggccattgatagtctacctttgctgggatccgaaggaactgtactccccctgccctccccgacccgcccagcttagccgatgacctgcacatcgctccactgtggtccagaaaaggaggcctttcgatgtctgagaaagaggccccacgctgtagagtcccgaaagcccaggagtgaagggggttcctggagtctctagggtgcttcttccagagtctgtcttcttgcttccagatgtggtcaacttctggaacactcgctgtagctttattgtttagccccaagcaagatttatctcctcctgccccgcatgtgtatggtgggcctctgtaaccttgaaatgtgcaatgtgaccaattgttgactaccaaaagaaaaggtctggggttgtacgaaa

SEQ ID NO: 694 - DNA, 111 bp, Artificial
  cDNA Sequence
aggggagtggggtctctcagcgtgaaaacaggagtcattgtcagcctcgctcccccagctctgcctcccatgactggcgtttttggttctattctaatttcctgctgggtt

SEQ ID NO: 695 - DNA, 1447 bp, Artificial
  cDNA Sequence
ggagaaggagcgcggggaggacgtaccttgtgagatgcgagccggccaacagcttgcaagcatgctccgctggacccgagcctggaggctcccgcgtgagggactcggcccccacggccctagcttcgcgagggtgcctgtcgcacccagcagcagcagcggcggccgagggggcgccgagccgaggccgcttccgctttcctacaggcttctggacggggaggcagccctcccggccgtcgtctttttgcacgggctcttcggcagcaaaactaacttcaactccatcgccaagatcttggcccagcagacaggccgtagggtgctgacggtggatgctcgtaaccacggtgacagcccccacagcccagacatgagctacgagatcatgagccaggacctgcaggaccttctgccccagctgggcctggtgccctgcgtcgtcgttggccacagcatgggaggaaagacagccatgctgctggcactacagaggccagagctggtggaacgtctcattgctgtagatatcagcccagtggaaagcacaggtgtctcccactttgcaacctatgtggcagccatgagggccatcaacatcgcagatgagctgccccgctcccgtgcccgaaaactggcggatgaacagctcagttctgtcatccaggacatggccgtgcggcagcacctgctcactaacctggtagaggtagacgggcgcttcgtgtggagggtgaacttggatgccctgacccagcacctagacaagatcttggctttcccacagaggcaggagtcctacctcgggccaacactctttctccttggtggaaactcccagttcgtgcatcccagccaccaccctgagattatgcggctcttccctcgggcccagatgcagacggtgccgaacgctggccactggatccacgctgaccgcccacaggacttcatagctgccatccgaggcttcctggtctaagagttgctggcaagaagatggccgggcgtggtggctcatgcctgtaattccagcactttgggaggctaaggcgggaggatgacttgaggccaggagttggagaccagcctggccaacatggtgaaaccctgtctctactaaaaatacaaaaattagcctggcgtggtggtgcacacctgtaatcccagctactctggaggctgaggcaggagaatcacttgaaccctggaggcagaggttgcaatgagccgagatcacaccactacactccagcctaggcaacagagcaagactctgtctcaaaaaaaacaaaacaaaaaggaggcacaaaaccccaggcttcaagtctctgcagcctgctccacatttgggcacagaaggactcagacaggcactgtgtgggcacgaggttttacaggggtggtcagacctcaggctttaatgaataaagacactactcccaaa

SEQ ID NO: 696 - DNA, 1191 bp, Artificial
  cDNA Sequence
gtgctgctgaggcgtgagaatggcgtcccgcggccggcgtccggagcatggcggacccccagagctgttttatgacgagacagaagcccggaaatacgttcgcaactcacggatgattgatatccagaccaggatggctgggcgagcattggagcttctttatctgccagagaataagccctgttacctgctggatattggctgtggcactgggctgagtggaagttatctgtcagatgaagggcactattgggtgggcctggatatcagccctgccatgctggatgaggctgtggaccgagagatagagggagacctgctgctgggggatatgggccagggcatcccattcaagccaggcacatttgatggttgcatcagcatttctgctgtgcagtggctctgtaatgctaacaagaagtctgaaaaccctgccaagcgcctgtactgcttttttgcttctcttttttctgttctcgtccggggatcccgagctgtcctgcagctgtaccctgagaactcagagcagttggagctgatcacaacccaggccacaaaggcaggcttctccggtggcatggtggtagactaccctaacagtgccaaagcaaagaaattctacctctgcttgttttctgggccttcgacctttataccagaggggctgagtgaaaatcaggatgaagttgaacccagggagtctgtgttcaccaatgagaggttcccattaaggatgtcgaggcggggaatggtgaggaagagtcgggcatgggtgctggagaagaaggagcggcacaggcgccagggcagggaagtcagacctgacacccagtacaccggccgcaagcgcaagccccgcttctaagtcaccacgcggttctggaaaggcacttgcctctgcacttttctatattgttcagctgacaaagtagtattttagaaaagttctaaagttataaaaatgttttctgcagtaaaaaaaaagttctctgggccgggcgtggtggctcacacctgtaatcccagcaccttgggaggctgaggtgggaggatcatttgaggccaggagtttgagacctgcctgggcaacataatgaaacttcctttccagggaggaaaaaaaaaaaaaaaaaaagctctgagagcatcttattttgtttaaaggcaagaaataaaatttccttttgtgga

SEQ ID NO: 697 - DNA, 2618 bp, Artificial
  cDNA Sequence
cacttgtaatcctagcacttggaaaggctgagacaggaggatcacttgaggccaggagtttgagaccaacctgggcaatatagtgagaccctatttctacaaaaaataaaataaatagccaggcctggtggtatgcacctgtagtcctagctactgaggaggctgacggaggaggatcacttgagcccaggaattggaggctgcagtgagctatgatcacgccactgcactccagcctgggcgacagagccagaccctatctctgaaaacaataataaaacgacaaccaatgctgactgtgtctccatcactgggtggggctgaggaagcaggcctcagaaaggaagccagttttcccccaaaattattccctgaggctgcctctgggcctgtggatccagatgtgtgggggccttcaggagtggcaggggagtggggcctccagcgtgaaaacagaagtcaccgtcagccttgcacccccggctctgcctcccaggactggtgtttttgcctctgttttaatttcctgctgggtcctcccttggacattgtcaggtatgcaggctgggacatcccttctttcctcctacattccccctagagcccaaggctctgtccgtggtccagccactccatggcagggaagctgtacctccataatcagctgcctgagggcccctgacccaccaccaggcaccaccctggtggggctgaggttagaagggaaagaatgccagaactccagtcctggaggcaggagagtgtgtgagcccagccccgccctctcagactctcagacctttatttcatcctcattttcctggctagaggttccatgcatcatttttttttttttttttttcagatggagtctcactctattgcccaggctggagtgcagtggtgctatgtcggctcactgaaacctccgcctctcaggttcaagcaattctcctgcctccgcctcccaagtagctgggattacaggcatgcaccaccacacctggctagtttttgtatttttagtagagacggggtttcaccatgttggccaggctggtctcaaactcctgacctcaggtgatccacctgcctgggcttcccaaagtactgggattataggcttgagccaccacgcccggctggttccatgcatcttacctggatgacttgggtccctaaatgggcccctgggtgcccagcctcccctcctccaatacattctctgataatctgaccttgtcatgaccattggggcacctgttgcccacagggtagaggccaggtgcctgaggacagcactgaaggccgtgcacctccacctccagcctccagtcacctcacctagctcactgctctctctcctgcaaagtctctcctgcttccctccctaagggaagggctggccgctcactgcttgggcccccttgatttctaagacacctgtgaagggtcccacaaggccaggcacagtggctcttgtctgtaatcccagcgctctgggaggctgaggcaggaggatcacttgaggtcaggagttcaatgtggacaacacagtaagaccctgtctctacaaaaaaatttaaaacttagctggcattggtggcgcatgcctatagtcccagctacttgggaggttgaggtaggaggatcgcttgaacccaggagttcaagtctgcagtgagctatgattgcaccactgcactccagcctgggtgatagagcaagaccccaactcaaaaaaaaaaaaaaggatcccacggttcaccttgtgctgccacgatcggttggcagctctgctctgtgccgtcctgtgcctgtcactgagtaagatgcaggagaagttgggcaaaagccctcaggataaacgaataagtcattcagagtaggtgctggtgggaaatgggcttgagtcactcacctggggccagaagaggcccccagggagttgtgagcagattagaccctccaagaccgccccaggggttggcccatgctttccctaactgtgcaaaaatggtttgggataggctgggtgccgtgggtcacgcctgtaatcccagcactttgggaggctgaggcaggtggatcacctcaagtcaggagttcgagaccagcctggccaacatggtgaaaccccatctctactaaaaatacagaaattagctgggtgtggttgcacacgcctgtaatcccagctactcaggaggctgagggaggagaatcccttgaacccgggaggcggaggttcatggggaacccagcaggaaattagaatagaaccaaaaacgccagtcatgggaggcagagctgggggagcgaggctgacaatgactcctgttttcacgctgagagaccccactcccctgctgagatcgcgccactgcactccagcctgggcgacagagcaagactccatctcaaaaaaaaagttaattaattaattagattaaagtacaacaattagcagggcatggtggtgcacgtctgtagtcccagctactcaggaggctgaggcagaagaatcgcttgaaccctggaggcggaggttgccgtgagccaagatcgcaccactgcactccagcctgggcgacaaagtgagactctgtctccaaaaa

SEQ ID NO: 698 - DNA, 917 bp, Artificial
  cDNA Sequence
agggggagaggtagagatgagacaagaggtagaggggagaggtagaggtagccacgagctgataattacagacaagagatgcggagtatgtgggggctcattatcctgcatagtctatctttgtatatctttgaacttttcaagaataaaaaagcttaaaaagtatacatggcctggtcctaccagagactcacccaatgccagcctccagccagggagagccaagtttgcattttcacacgcatctcacactcctctgcactctcaacttggagagctccaaacagggaaaccccaagccttgctggcttctgccaaccccctgagcagaagcatgggtccccctgatcaccacctcaccaccctcatcctgatctcactgtacactccctttcctggtctgctaagtagcgggtgtttttccttgacactaacgctacagctagaccacggtgggcttggcaacaggtgtcttcccagatgctggcgttaccgctagaccaaggagccctctggtggccctgtccgggcataacagaaagctcgcactcttgtcttctggtcactcctcattgtcccctcagctcctatctctgtatggcctggtgtttcctaggttatgattgtagagcgaggattattataatattggaataaagaataattactacaaactaatgattaatgattcatatataatcatatctaagatctatatctagtataactattcttattttatatattttattatactggaacagctcgtgccctcggtctcttgcctcggcacctgggtggcttgctgcccacatccaccaagtgcactttgggaggctgaggctggaggactgctggaggccaggagttcaataccagcctgggcaacatagggagacccccccccccaccatctc

SEQ ID NO: 699 - DNA, 913 bp, Artificial
  cDNA Sequence
agggggagaggtagagatgagacaagaggtagaggggagaggtagaggtagccacgagctgataattacagacaagagatgcggagtatgtgggggctcattatcctgcatagtctatctttgtatatctttgaacttttcaagaataaaaaagcttaaaaagtatacatggcctggtcctaccagagactcacccaatgccagcctccagccagggagagccaagtttgcattttcacacgcatctcacactcctctgcactctcaacttggagcgctccaaacagggaaaccccaagccttgctggcttctgccaaccccctgagcagaagcatgggtccccctgatcaccacctcaccaccctcatcctgatctcactgtacactccctttcccggtctgctaagtagcgggtgtttttccttgacactaacgctaccgctagaccacggtgggcttggcaacaggtgtcttcccagatgctggcgttaccgctagaccaaggagccctctggtggccctgtccgggcataacagaaagcttgcactcttgtcttctggtcactcctcactgtcccctcagctcccatctctgtatggcctggtttttcctaggttatgattgtagagcgaggattattataatattggaataaagaataattactacaaactaatgattaatgattcatatataatcatatctaagatctatatctagtataactattcttattttatatattttattatactggaacagctcgtgccctcggtctcttgcctcggcacctgggtggcttgctgcccacatccaccaagtgcactttgggaggctgaggctggaggactgctggaggccaggagttcaataccagcctgggcaacatagggagacccccccccccccca

SEQ ID NO: 700 - DNA, 918 bp, Artificial
  cDNA Sequence
gcccggcaggtcaaagagcagctgattaagcacaatatcggacaacgtattttcggacattatgtgttgggactgtctcaagggtccgtgagcgagattctggcccggcccaagccatggaataaactgactgttcgtggcaaggagccatttcacaagatgaaacagttcctctccgatgagcagaacatcctggccctccgtagcatccaaggcagacaaagagagaatccaggccagagcctgaacagactatttcaggaagtaccgaaacgaagaaatgggtctgaaggtaacatcaccacccggatccgagcctcggagactggctctgatgaagccatcaagtccatcctagagcaagccaagagggagctccaagtgcagaaaactgcagagccggcccagccttcctccgcatccggcagcgggaactctgatgacgccatccgctccatcctgcagcaagcccgccgggagatggaggcccagcaggctgccctcgaccctgccttaaagcaggcaccactgtcccagagtgacatcaccatcctcacccccaagcttctgtccacctcgcccatgcccaccgtgtccagctacccacctctcgccatctccctgaagaagccctccgcagctcctgaggccggtgcctctgctctgccgaaccccccggccctcaaaaaggaggcccaggacgcccccgggctggacccccagggagcagccgattgtgcacaaggggtcctgagacaggtgaaaaatgaggtgggccgcagcggtgcctggaaggaccactggtggagcgcggtgcagccggagagaagaaatgccgcctcctccgaggaggccaaggccgaagaaacgggcggcgggaaagagaagggcagcggtggcagcggaggtggcagccag

SEQ ID NO: 701 - DNA, 2202 bp, Artificial
  cDNA Sequence
atgcagagcgacgtttgtgggcgcggcccctctcccaccccttaccgctgggggcagctcccagggcgggtcactgccgcgctgccgctcgcagatcagacaggtccggatgcccttgcaaccgcattcccgaaggacttcgggggtctcggcggcagccgccgccatcgcgccgtccgcgtggccaccgcggacgccagtgccgggctccaggagacgcagggcgacgccacacgccggggtggccgactgggtcagcgcgggctgcgcctcctcgccatgggccccctctcggcgcggctgctaatgcagcgcgggcgccccaagagcgaccggctggggaagatccggagtctgctgtcaggattggagctgctttccgagcacctggaccccaaactcctgtgccgcctgacgcagctgcaggagcttgacctgtctaacaaccacctggagacgctgccggacaacctgggcctgtcccacctgcgtgtcctccgctgcgccaacaaccagctgggggatgttactgccttgtgccagttccccaagctcgaggaactcagcctggagggcaaccccttcctgacggtcaatgacaacctgaaagtctcctttctcctgcccacgctccgtaaggtcaatggcaaggatgcgtcctcaacttactctcaggtggagaacctgaatcgggagctgaccagcagggtcacagctcactgggagaagttcatggccacactgggtcctgaagaggaggctgagaaggcccaggcggactttgtgaagtcggctgtcagggatgtccgctacgggcccgagtccctcagcgagttcacccagtggcgggtgcggatgatctctgaggagctggtggccgccagtaggacccaggtgcaaaaggctaacagcccagagaagcccccagaagctggagctgcccacaagcccagggccagactggcggccttgaaacggccagacgacgtcccactcagcctctctcccagcaagcgggcgtgtgcctccccgtcggcccaggtggagggcagccctgtggcaggctccgatggcagccagcctgctgtgaagctggagcccctgcacttcctgcagtgccacagcaagaacaacagcccccaggacctcgagacccagctgtgggcctgtgccttcgagccggcctgggaggaggccacatcccagaccgtggccacgtgcggcggggaggctgtgtgcgtaattgattgccagacgggcatcgtgctccacaagtacaaggcacccggcgaggagttcttttctgtggcctggaccgctctgatggtggtcacacaggctggccacaagaagcgctggagtgtgctggcggctgcaggcctacggggcctggtccggctgctgcacgtgcgtgccggcttctgctgcggggtcatccgagcccacaagaaggccatcgccaccctgtgcttcagccccgcccacgagacccatctcttcgcctcctatgacaagcggatcatcctctgggacatcggggtgcccaaccaggactacgaattccaggcccagctgctcacactggacaccacctctatccccctgcgcctctgccctgtcgcctcctgcccggacgcccgcctgctggccggctgcgagggcggctgctgctgctgggacgtgcggctggaccagccccaaaagagggtgtgtgaagtggaattcgtcttctctgagggctccgaggcatctggacggagagtggatgggctggcatttgtgaatgaggacatcgtgtccaaggggagcggcctgggcaccatctgcctgtggagctggaggcagacgtgggggggccggggcagccagtccacggtggcagtggtggtcctggcgcggctgcaatggtcgtccaccgagttggcctacttctcgctcagcgcctgccctaaggggattgtgctctgtggggatgaggagggcaacgtgtggctctacgacgtcagcaacatcctgaagcagccacccctgctgccggcagccctgcaggcccccacacagatcctgaagtggccccagccctgggcccttggccaggtggtgaccaagaccatggtgaacacagtggtggccaatgcctccttcacctacctcaccgccctgacggactccaacatcgtagccatctgggggaggatgtag

SEQ ID NO: 702 - DNA, 873 bp, Artificial
  cDNA Sequence
atggcttggcaggtgagcctgctggagctggaggaccggcttcagtgtcccatctgcctggaggtcttcaaggagtccctaatgctacagtgcggccactcctactgcaagggctgcctggtttccctgtcctaccacctggacaccaaggtgcgctgccccatgtgctggcaggtggtggacggcagcagctccttgcccaacgtctccctggcctgggtgatcgaagccctgaggctccctggggacccagagcccaaggtctgcgtgcaccaccggaacccgctcagccttttctgcgagaaggaccaggagctcatctgtggcctctgcggtctgctgggctcccaccaacaccacccggtcacgcccgtctccaccgtctgcagccgcatgaaggaggagctcgcagccctcttctctgagctgaagcaggagcagaagaaggtggatgagctcatcgccaaactggtgaaaaaccggacccgaatcgtcaatgagtcggatgtcttcagctgggtgatccgccgcgagttccaggagctgcgccacccggtggacgaggagaaggcccgctgcctggaggggatagggggtcacacccgtggcctggtggcctccctggacatgcagctggagcaggcccagggaacccgggagcggctggcccaagccgagtgtgtgctggaaagttccactccatggcctccaccagtcatcacttccacagggatgactcagaagttccctctccgggagacccgtcccttacaggccacatccagtagcgctccagccattcagcagctccgcctggacgtcaagggcatgtccaaaaccgcgctcatgatcttcctactcccccatccctga

SEQ ID NO: 703 - DNA, 399 bp, Artificial
  cDNA Sequence
atgatgatgataaaggctgtgaccatagataaactgcagggaagttctgttactgtatctaccgaagatgggttgctgaaagccaagtatctttatacagaatcatcatttctgtcttctgctgctggggatattacattaggaagtgttcataatataacattacaaagcgagatgggtaacatcacagtatcgtcttctggatgtctaaaagcctcaactaatcagggtgccatagatgtttatgtcagccaactggggaaagtggaattgaaatcccataaagaacgcggctcctcaccagtaacggaacaaagctggatggagaatgactttgacgagttgagagaagaaggcttcagacaatcaaactactctgagctaaaggaggaagtttga

SEQ ID NO: 704 - DNA, 2727 bp, Artificial
  cDNA Sequence
atgttgaggagcctagacttaattctgaaggtgatgaggtcctttgaagggtctaaagcaacacaagagtcagaggtccaactgctacagaatgccaaacgtttcactgagcaaatacaacagcagcagtttcacctgcagcaagctgataattttccagaagcattctccacggaggtctccaaaatgagagaacaacttctcaagtatcaaaatgaatataatgcagtgaaggaaagagagttccataatcagtacagattaaataaagccatctcattgagagctgcagtcagagaacacactccaccaaaccagttattagcattcccttgcccttcccctgccctggcagtggccccctcatcccatgactatagcagtaccagagcacgcatctgcatggaaatggagaagaagatgaaaatattgagagaaagcactgaagaattacgtaaagaaataatgcagaagaaattagaaattaaaaatttacgagaagatttggcatctaaacaaaagcaattattaaaagagcagaaggaactagaagaattgttgggacatcaggtcgtcctaaagttacctcctcttcaaaatgataacaaatatagctctcttacaaggtcagaaatggaaaagaaaaaaattgtcttggaacaagaagtcaaaacgctaaatgactccctaaagaaagttgaaaacaaggttagtgctatagtggatgagaaggaaaatgtaataaaggaagttgaaggcaaacgagccttacttgaaatcaaagaacgagaacataaccaattggtcaagctattggaattagccagagagaatgaagcaacttcattaactgaagggatcttggatctcaatttacgcaacagtctcattgacaagcagaactaccatgatgaactttctcgtaagcaaagagagaaagaacgagattttcgaaatttaagaaagatggaactgctcttgaaagtgtcctgggatgcacttaggcaaactcaagcactgcatcaaaggcttctattagagatggaagctatccccaaagatgattctacattatctgagagaaggcgagagcttcacaaggaagttgaagtagctaagaggaatttggcccaacagaaaattatatcagaaatggagtctaagttagtagaacaacaacttgcagaagaaaacaagcttttaaaggagcaagaaaacatgaaagagctagtagtcaaccttctccgcatgactcaaatcaaaattgatgaaaaggaacaaaagtccaaggatttcctgaaagctcagcaaaaatacaccaacattgttaaagaaatgaaagcaaaggatcttgaaatcaggatacacaagaagaaaaaatgtgaaatttatcggctgagagagtttgctaaactgtatgacaccattcgaaatgaaagaaacaaatttgttaacttactccacaaagctcatcagaaagtaaatgaaataaaagaaaggcataaaatgtcattaaatgaacttgaaattctgagaaatagtgccgttagtcaagaaaagctacaaaattccatgctgaaacacgccaacaatgttaccatcagagagagcatgcaaaacgatgtgcgcaaaattgtatcaaaacttcaggaaatgaaagaaaagaaggaagcccagttaaataacattgacagacttgccaacacgatcacaatgatcgaagaggagatggtgcagcttcgcaaaagatacgaaaaagctgttcagcatcgaaatgaaggcgttcagctgatagagcgggaagaagaaatatgcattttttatgaaaaaataaatatccaagagaagatgaaactaaatggagaaattgaaatacatctactggaagaaaagatccaattcctgaaaatgaagattgctgagaagcaaagacaaatttgtgtgacccagaaattactgccagccaagaggtccctggatgccgacctagctgtgctccaaattcagttttcacagtgtacagacagaattaaagacctggagaaacagttcgtaaagcctgatggtgagaatagagctcgcttccttccagggaaagatctgaccgaaaaagaaatgatccaaaaattagacaagctggaactacaactggccaagaaggaggagaagctgctggagaaggatttcatctatgagcaggtctccaggctcacagacaggctctgcagcaaaactcagggctgcaagcaggacacactgctcttagccaagaagatgaatggctatcaaagaaggatcaaaaatgcaactgagaaaatgatggctcttgttgctgagctgtccatgaaacaagccctaaccattgaactccaaaaggaagtcagggagaaagaagacttcatcttcacttgcaattccaggatagaaaaaggtctgccactcaataaggaaattgagaaagaatggttgaaagtccttcgagatgaagaaatgcacgccttggccatcgctgaaaagtctcaggagttcttggaagcagataatcgccagctgcccaatggtgtttacacaactgcagagcagcgtccgaatgcctacatcccagaagcagatgccactcttcctttgccaaaaccttatggtgctttggctccttttaaacccagtgaacctggagccaatatgaggcacataaggaaacctgttataaagccagttgaaatctga

SEQ ID NO: 705 - DNA, 5555 bp, Artificial
  cDNA Sequence
cggctcggccgcggggcgcgcaggcggctgctgggcggcctcggtgcgcgcctcccgccttcccagagacgtggcgcgaggcccgggccctgagcacctatcgcggggatccccggcgccaggagggggtgcagccggtgggcagcgccgcgcagggaggggccgcagcatcctcgccccccagcgcgcccgggcccgagaggaggaggccggggctctccgggcctcccgccgcttagcctgatgctggaaggacgaaggtgagtgaagatggcagagaggacgtgaccagcactcacccttgtccacctgcccagtggcaccgccatgcagaagcccagcggcctgaagccccccggccgtggggggaagcactccagccccatgggccggacatctactgggtcagcttcatcctcggcggcggtggccgctagctccaaggaaggctccccactgcacaaacagtcatctggaccctcctcctccccggccgcagctgctgcccccgagaagccgggccccaaggcggcggaagtgggggatgacttcctgggggactttgtggtgggcgagcgggtgtgggtgaacggcgtgaagccaggcgtggtgcagtatctgggagagacgcagttcgcaccgggccagtgggctggcgtggtgctggacgacccggtgggcaagaatgatggcgcggtgggcggcgtgcgctacttcgagtgcccggccctccagggtatcttcacgcggccctccaagctgacccggcagcccacggccgagggctcggggagtgatgcccactccgtggagtcgctgactgcccagaacctgtcattgcattcgggcacggccacgcccccgctgaccagccgcgtcatccccctgcgggagagcgtcctcaacagctccgtgaagactggcaacgagtcgggatccaacctctcagacagcggctctgtgaagcggggcgaaaaggacctgcgcctgggggaccgcgtgctggttggcgggacgaagactggcgtggtgcggtacgtgggggagacagactttgccaagggcgagtggtgtggcgtggagctggacgagccccttgggaagaatgatggggcggtggcgggcaccaggtacttccagtgcccacccaagtttggtctcttcgcgcccatccacaaagtgatccgtatcggcttcccatctaccagcccagccaaggccaagaagaccaagcgtatggccatgggtgtgtcagcactgacccacagtcccagcagttcctccatcagctccgtcagctctgtggcctcctccgtggggggtcggcccagccgcagtggcctgctcacggagacctcttcacgctacgcccgcaagatctcgggcaccacggccttgcaggaggcactgaaggagaagcagcagcacattgagcagctgctggctgaacgagacctggaacgggctgaggtggccaaggccacaagccacatctgcgaggtggagaaggagattgccctgctcaaggcacagcatgagcagtatgttgcagaagccgaggagaagctgcagcgagcccggctgctcgtggagagcgtgcggaaagagaaggtggacctgtccaaccagctggaggaggagaggaggaaggtggaggatctgcagttccgcgtggaggaggagtccatcaccaagggagacctggagacccagacgcagctggagcacgcgcgcattggggagctggaacagagcctgctactggagaaggcgcaggccgagcggctgctccgagaattagcggacaacaggctgaccacagtggccgagaagtcgcgcgtgctgcagctggaggaggagctcaccctgcgccgaggtgaaatcgaggagctccagcagtgcctgttgcactcgggtcccccacctccggaccacccagacgccgccgagatcctgcggctacgggagcggctgctctcggccagcaaggaacaccagagggagagtggggtgctgcgggataaatacgagaaggccctgaaggcctaccaggcggaggtggacaagctccgcgcggccaacgagaagtacgcacaggaggtggcgggcctgaaggacaaggttcagcaggccaccagcgagaacatggggctaatggacaactggaaatccaagctggactcgctggcctcggaccaccagaagtccctggaggacctcaaagccaccctgaactcgggcccaggcgcccagcagaaggagatcggcgagctgaaggcagtgatggagggcatcaagatggagcaccagctggagctgggtaacttgcaggccaagcatgacctggagaccgccatgcacgtgaaggagaaggaggccctgcgagagaagctgcaggaggcccaggaggagctggctgggctgcagcggcactggcgggcccagctggaggtgcaagccagccagcaccggctggagctgcaggaggcccaggaccagcgccgggatgccgagctgcgtgtgcacgagctggaaaaactggacgtggagtaccggggccaggcgcaggctatcgagttcctcaaggagcagatctcgctggccgagaagaagatgttggactacgagcggctgcagcgggcagaagcccagggcaaacaggaggtcgagagtttgcgggagaagctcctggtggctgagaacagactccaggcggtcgaggccctgtgctcctcccagcacacccacatgattgagtcgaatgacatttcagaggagacgatcaggacgaaggaaactgtggagggcctgcaggacaagctgaacaagagggacaaagaggtgacagccttgacctcccagaccgagatgctcagggcccaagtaagtgcgctggagagcaagtgtaagtcaggcgagaagaaggtggacgccctcctgaaggagaagcggcgcctggaggcagagctggagaccgtgtcccggaagacccatgacgcctcgggccagctagtcctcatcagccaggagctgctgcggaaggagcggagcctgaacgaactgcgggtgttgctgctggaggccaatcgtcactccccagggccggagagggacctgagccgtgaggtacacaaggctgagtggcggatcaaggagcagaaactcaaggatgacatccggggcctgcgtgaaaagctgaccgggctggacaaagagaaatccctgtcggatcagaggcgctactccctcatcgaccggtcctcggcgcccgagcttctgcggctgcagcaccagctgatgagcacggaggacgccctgcgggatgcgctggaccaggctcagcaggtggagaagctgatggaggccatgaggagctgccctgacaaggcccagaccatcggcaattccggttctgcaaacggcatccaccagcaggacaaagctcagaaacaagaggacaagcactgatcctgaggggatactgtggagcagcccagtccacaccagagccccacgcggctgcccggcagtacctcctccaggcaggagccgggactgtcactttggagacaaaacagtgtttgtaacaataacgtactcaccgccgcggacaatcccccaccccgatccctcgccagaccaggacgcttcctcaagcccagccttctacagagagtgtgaacggtacagccccggcctgacccggggaccttcagcctggacacccggcagcttctggagtttgtcagtggaggcagaggggatccggccaggcccctctgtccagaaggagctgccctgaggaccatcttagcggccctgtcctctttttccgcccattctccctcgggtctccccagaggggccggcgggggctggggagggggtaagtttatccatgcagacaccaagggggagcatccagtctttaagagccaagtgggggccccttttccgaagccacttccaggccaaggcagtcgccagggcttcttgtccccaccttctgaaccttcttcaaacagtagtacaagctcccctcagccagcctgcctgcccagcgaggcccccaggttcaaggtgttggcgggggcggagggcaggggaacgggatccttctcccgctgcccaccaacaccaacacacacacacctctaagctgctggccgaagatgtcaccaaggccaaagacacagtattatgaaggtttggaaacccctctcctcacctcccaccgtgaccttgggcaaaccctggctcggagcccagggcagaggcagctcagagtggaggctctaggcaggtttgacaaaggtcagtaatacggtttcccctggggttgaccagatgttccaaaatatctgcatccacctggagatgcagctaagtgggtccttatgtacacaccacgttcacacacacacagagggaccacgtgtgcacgcatgaccgtgtgggtggcggcgtttgctgtgaaccacgctcaggccacacagagacacatacttggtttctgggactgagacccaggcctggcaggaccgtgcctacagatactgcaaacgttcctacagcctagaggtgcgtatacacacccaagtacacgcagccaggcattcaggggtgtgtttgccacatggagcatcccttcctggtcttgccaggcacctgcacagagcgtctccagccccatctcctaacgggggctgggggtaagagaaatctaactgcgctcccccaacccctcgccctgccatcttcccctcaagcctgctaagttatcccaggcctgtgcgtggtggaaaaagccagccttggccctgcagcctccacctcgccgctgggggaccaacaggttgcttacagctttgcaccccggcatcagcacaggggtccctgccccaccctccggcagctcagggagtgttttcctgtgaggcctcccccatcagtggaccagagggagaagcccgatgccccatcccggctttcccgtaacgcacaggacacgtgtgcaattcataggaacggcccagatcgccctcatgagtgccacctggtacaggtaggtggcgctcacgttcctgcccaaatgcagcccatcggggagtcacagtcagtccccccggcccccctcccagtccctgttggctttcggtagctctcgcatgcagttctattaacagccgtctagaagcgatgctttagtggcctaacccagggtcaaatacagctctttctagcaaaatcaggcagctctgccccatcggtaggggcaccgattagtctactaacagccagaggtccatctagcagggtgccgggaggagctgagcccccggaggtgggctcctggtgacgggtgtccaagaagcggtttccttgggagcttctgcctccgtgggcctctcagcccgccccgtgtggccgcccgggtgtggctcagccatgtcccctccccaggtccttcattcacccctcccctccccacagtggaattgttgaagtgtggcgagtctgtgctcgggacaataaagcttgtgacaggtccagga

SEQ ID NO: 706 - DNA, 2523 bp, Artificial
  cDNA Sequence
atggcggaaccgccgagccccgtgcactgtgtcgctgccgcggcccccaccgccaccgtctcggagaaagaaccgtttggcaagctgcaactctcctcccgggaccctccgggttctctgtccgccaagaaggtccggactgaggagaagaaggcaccgcggagagtgaacggagaagggggcagcggcgggaacagcaggcagctgcagccgccggcagcaccttcgcctcagagctatggcagccccgcgtcttggagctttgcccctctgtctgctgctccctccccgtcctcttctcggagcagtttctctttctccgctggcacggccgttccctcctcagcctccgcttccttgtctcagccggtgccgcgcaaactgctggtccctcctacgctgctgcacgctcagcctcaccatctcctcctgcccgccgccgccgccgctgcctcggctaacgccaagtcgcgcagacctaaggagaagcgggagaaggagaggaggaggcacggtctcggtggggcccgagaggccggcggggcctcccgggaggagaacggggaggtgaagccgctgccccgaaatgataaaaccaggagctttgacgatttttcgccagatcaagcggctgcagaatgtttgagcattagaaaaaggcgaattcttaagggttcttgtcagacatgttttgcagcttccattgtggtgtttttatgtgtggaattctttttatttattccaaaaatcaaagacaaaattaaagagagagacaaagaaaaagaaagagaaaaaaagaaacataaagtaatgaatgagatcaagaaagagaatggagaagtaaagattttgctgaaagggaaggagaaaccaaaaacaaatatagaagacttacaaattaaaaaggtaaagaagaaaaagaaaaagaaacacaaagagaatgaaaaacggaagcgtccgaaaatgtatagcaaatctattcagaccatctgctcaggattgctaactgatgttgaagatcaagcagccaaaggcatcctaaatgataacataaaagattacgttgggaagaatttggataccaagaactatgattccaaaattccagagaacagtgagtttccatttgtctcattaaaggagccacgagttcagaataacctcaaaaggttggacactttggaatttaaacaactcattcatatagagcaccagcctaatggaggtgcatcggttatccatgcctacagtaacgaactctcccacctgtctcctatggagatggagaggtttgcagaagagtttgtgggtctagtgttcagtgaaaatgaaaactctgcagctttctacgtgatgggtattgttcatggggcagctacttatttacctgactttttagactatttttcatttaattttcccaattcaccagtgaaaatggagatattgggaaagaaagatatagagacaacgactatgtccaattttcatgctcaggtaaaaagaacgtattctcatggtacttacagagctggcccaatgagacaaataagcttggtgggagcagttgatgaagaagtaggagattatttccctgagttccttgacatgttggaagagtcaccatttttaaaatgtacactgccatgggggacgctatctagtctaaaattacagagtcgaaaagatagtgatgatggtcccatcatgtgggttcgtccaggagaacaaatgatccctgtggctgatatgccaaagtcacctttcaaaaggaaacctgatcaaccccgtataaccaaagatgtaatttgttttcatgctgaagatttcttagaagtagttcaacgaatgcagttagatttacatgaacctccactgtcccagtgtgtccaatgggttgatgatgcaaaactgaatcaactgaggagggaaggcattcgctatgccaggattcagctatatgataatgacatttattttattccaaggaatgttgttcatcagttcaagacagtttcagctgtatgcagtttagcatggcatattcggctcaaattatatcactcagaggaggacacttctcagaatacagctactcatgaaacaggcacatcatcagattccacatcatctgttcttggacctcacactgacaacatgatttgtgctgtaagcaaagcctccttggattctgttttttcagataaacttcattctaaatatgaattacagcagattaaacatgaacctattgcatctgtaagaatcaaggaagaacctgtgaatgttaatattcctgaaaagactacagcactgaataatatggatggcaagaatgttaaagcaaaattggatcatgttcaatttgcagaatttaagattgacatggattctaaatttgaaaatagcaacaaagatttaaaggaagaattgtgccctggaaatctaagtctagttgatacaaggcaacacagttcagcacattcaaatcaagataaaaaagacgatgacattttgtgctaa

SEQ ID NO: 707 - DNA, 2025 bp, Artificial
  cDNA Sequence
atggcgtccaaagtcacagatgctatagtctggtatcaaaagaaggagtttctctctgtggccaccaccgccccaggcccacagcaagtactgcctggctactgccagtgttcactcaaggaccaagggctcttcattcagtgtttgtttaatggagttgtgtctcctcttggcagtgttcctccctctggaactaagacctccaggccaggagaacgtaatgtctcaggaacaggaagcaaaaattttactagtgtatcactaggggtgatgattggagcatatgatcaacaaatatgggaaaaatctgttgaacagagagaaatcaagtttattaaactggggctaaggaataaaccaaagaaaacagcacatgtgaaaccagacctcatagatgttgatcttgtaagatctgcatttgcaaaggcaaagcctgaaagtccttggacttctctgaccagaaagggaattgttcgagttgtatttttcccctttttcttccggtggtggttacaagtaacatcaaaggtcatctttttctggcttcttgtcctttatcttcttcaagctgcaatagtattattctgctccacttctagcccacacagcatacctctgacagaggtgattgggccgatatggctgatgctgctcctgggaactgtgcattgccagattgtttccacaagaacacccaaacctcctctaagtacagggggtaaaagaagatcaaagaaagcaaagaattcaattgataaatcaactgaaactgacaatggctatgtatcccttgatgggaagaagactgttaaaagcggtgaagatggaatacaaaaccatgaacctcagtgtgaaactattcgaccagaagagacagcctggaacacaggaacactgaggaatggtcctagcaaagatacccaaaggacaataacaaatgtctctgatgaagtctccagtgaggaaggtcctgaaacaggatactcattacgtcgtcatgtggacaggacttctgaaggtgttcttcggaatagaaagtcacaccattataagaaacattaccctaatgaggacgcccctaaatcgggtactagttgcagctctcgctgttcaagttccagacaggattctgagagtgcaaggccagaatctgaaacagaagatgtgttatgggaagacttgttacattgtgcagaatgccattcatcttgtaccagtgagacagatgtggaaaatcatcagattaatccatgtgtgaaaaaagaatatagagatgacccttttcatcaggtgaacagccatataccaggaataggataccagatttttggaaatgcagtctctctcatactgggtttaactccatttgttttccgactttctcaagctacagacttggaacaactcacagcacattctgcttcagaactttatgtgattgcatttggttctaatgaagatgtcatagttctttctatggttataataagttttgtggttcgcgtgtctcttgtgtggattttcttttttttgctctgtgtagcagaaagaacttataaacagcgattactttttgcaaaactctttggacatttaacatctgcaaggagggctcgaaaatctgaggttcctcatttccggttgaagaaagtacagaatataaaaatgtggctatctctccgttcctatcttaagcgtcgaggtcctcagcgatcagttgatgtaatagtttcatctgctttcttattgactatctcagttgtatttatctgttgtgcccagataaacctctacttgaaaatggagaaaaaacctaacaaaaaggaggaactgacactagtgaataatgttttaaaactggctactaaactgctaaaggagttggacagtccttttagattatatgggcttacaatgaatccgctgctttataacatcacccaggttgttatcctgtcagctgtttctggtgttatcagtgacttgcttggatttaatttaaagctatggaagattaagtcatga

SEQ ID NO: 708 - DNA, 660 bp, Artificial
  cDNA Sequence
gagcacatcagctatgtgccccagctctcaaacgacaccttggcggggaggctcaccctgtccaccttcacgctggagcagcctctaggccagttcagcagccacaacatctctgacttggataccatctggctggtggtggccctcagcaacgccacccagagcttcacggccccacggacaaaccaggacatccctgctcctgccaacttctcccagaggggctactatctcacactgagggccaaccgggtgctgtaccagaccagaggccagctccatgtcctccgcgtcggcaatgatacccactgccaaccaacaaaaattggctgcaaccatcccctaccaggacccggcccctacagggtgaagttcctggtgatgaatgacgaaggacccgtggctgaaaccaagtggtccagcgacactcgcctgcagcaagcccaggcacttcgggctgtccccggcccccagagcccgggcaccgtggtcatcatcgccatcctgtctatcctcctggccgtcctcctcacggtcctcctggctgtgctcatatacacctgctgcaggagcacttccctatcaggcccagaggaggcagggagtgtgagaagatacaccacgcacctcgcgttcagcactcctgccgagggggcttcc

SEQ ID NO: 709 - DNA, 3709 bp, Artificial
  cDNA Sequence
ccattgaatcccagtcctaacagaagtactgcgaatcttgtggcctcattctgaacaaaagggattagagaagaaaaatctcttgatataaggcttgaaagcaagggcaggcaatcttggttgtgaatattttctgatttttccagaaatcaagcagaagattgagctgctgatgtcagttaactctgagaagtcgtcctcttcagaaaggccggagcctcaacagaaagctcctttagttcctcctcctccaccgccaccaccaccaccaccgccacctttgccagaccccacacccccggagccagaggaggagatcctgggatcagatgatgaggagcaagaggaccctgcggactactgcaaaggtggatatcatccagtgaaaattggagacctcttcaatggccggtatcatgttattagaaagcttggatgggggcacttctctactgtctggctgtgctgggatatgcaggggaaaagatttgttgcaatgaaagttgtaaaaagtgcccagcattatacggagacagccttggatgaaataaaattgctcaaatgtgttcgagaaagtgatcccagtgacccaaacaaagacatggtggtccagctcattgacgacttcaagatttcaggcatgaatgggatacatgtctgcatggtcttcgaagtacttggccaccatctcctcaagtggatcatcaaatccaactatcaaggcctcccagtacgttgtgtgaagagtatcattcgacaggtccttcaagggttagattacttacacagtaagtgcaagatcattcatactgacataaagccggaaaatatcttgatgtgtgtggatgatgcatatgtgagaagaatggcagctgaggccactgagtggcagaaagcaggtgctcctcctccttcagggtctgcagtgagtacggctccacagcagaaacctataggaaaaatatctaaaaacaaaaagaaaaaactgaaaaagaaacagaagaggcaggctgagttattggagaagcgcctgcaggagatagaagaattggagcgagaagctgaaaggaaaataatagaagaaaacatcacctcagctgcaccttccaatgaccaggatggcgaatactgcccagaggtgaaactaaaaacaacaggattagaggaggcggctgaggcagagactgcaaaggacaatggtgaagctgaggaccaggaagagaaagaagatgctgagaaagaaaacattgaaaaagatgaagatgatgtagatcaggaacttgcgaacatagaccctacgtggatagaatcacctaaaaccaatggccatattgagaatggcccattctcactggagcagcaactggacgatgaagatgatgatgaagaagactgcccaaatcctgaggaatataatcttgatgagccaaatgcagaaagtgattacacatatagcagctcctatgaacaattcaatggtgaattgccaaatggacgacataaaattcccgagtcacagttcccagagttttccacctcgttgttctctggatccttagaacctgtggcctgcggctctgtgctttctgagggatcaccacttactgagcaagaggagagcagtccatcccatgacagaagcagaacggtttcagcctccagtactggggatttgccaaaagcaaaaacccgggcagctgacttgttggtgaatcccctggatccgcggaatgcagataaaattagagtaaaaattgctgacctgggaaatgcttgttgggtgcataaacacttcacggaagacatccagacgcgtcagtaccgctccatagaggttttaataggagcggggtacagcacccctgcggacatctggagcacggcgtgtatggcatttgagctggcaacgggagattatttgtttgaaccacattctggggaagactattccagagacgaagaccacatagcccacatcatagagctgctaggcagtattccaaggcactttgctctatctggaaaatattctcgggaattcttcaatcgcagaggagaactgcgacacatcaccaagctgaagccctggagcctctttgatgtacttgtggaaaagtatggctggccccatgaagatgctgcacagtttacagatttcctgatcccgatgttagaaatggttccagaaaaacgagcctcagctggcgaatgccttcggcatccttggttgaattcttagcaaattctaccaatattgcattctgagctagcaaatgttcccagtacattggacctaaacggtgactctcattctttaacaggattacaagtgagctggcttcatcctcagacctttattttgctttgaggtactgttgtttgacattttgctttttgtgcactgtgatcctggggaagggtagtcttttgtcttcagctaagtagtttactgaccattttcttctggaaacaataacatgtctctaagcattgtttcttgtgttgtgtgacattcaaatgtcatttttttgaatgaaaaatactttcccctttgtgttttggcaggttttgtaactatttatgaagaaatattttagctgagtactatataatttacaatcttaagaaattatcaagttggaaccaagaaatagcaaggaaatgtacaattttatcttctggcaaagggacatcattcctgtattatagtgtatgtaaatgcaccctgtaaatgttactttccattaaatatgggagggggactcaaatttcagaaaagctaccaagtcttgagtgctttgtagcctatgttgcatgtagcggactttaactgctccaaggagttgtgcaaacttttcattccataacagtcttttcacattggattttaaacaaagtggctctgggttataagatgtcattctctatatggcactttaaaggaagaaaagatatgtttctcattctaaaatatgcattataatttagcagtcccatttgtgattttgcatatttttaaaagtacttttaaagaagagcaatttccctttaaaaatgtgatggctcagtaccatgtcatgttgcctcctctgggcgctgtaagttaagctctacatagattaaattggagaaacgtgttaattgtgtggaatgaaaaaatacatatatttttggaaaagcatgatcatgcttgtctagaacacaaggtatggtatatacaatttgcagtgcagtgggcagaatacttctcacagctcaaagataacagtgatcacattcattccataggtagctttacgtgtggctacaacaaattttactagctttttcattgtctttccatgaaacgaagttgagaaaatgattttccctttgcaggttgcacacagttttgtttatgcatttccttaaaattaattgtagactccaggatacaaaccatagtaggcaatacaattttagaatgtaatatatagaggtatatttagcctcttttagaagtcagtggattgaatgtctttttattttaaattttacattcattaaggtgcctcgtttttgactttgtccattaacatttatccatatgcctttgcaataactagattgtgaaaagctaacaagtgttgtaacaataatccattgtttgaggtgcttgcagttgtcttaaaaattaaagtgttttggtttttttttttccagacattgc

SEQ ID NO: 710 - DNA, 2528 bp, Artificial
  cDNA Sequence
gcgccccggccgggccactgggccacaggccacgcggccacgcagtccgagcgggagccgagccgggcggggcgagggcagctccgcctggctcccaccatgagtgctgagcttaacgtgcctatcgacccctctgctcctgcctgccctgagcccggccataagggcatggattaccgggactgggtccgccgcagctacctggaactggtcacctctaaccaccactcggtacaggccctgtcgtggcggaagctctacctgagcagggccaagctgaaggcctccagcaggacctccgccctcctctccggctttgccatggtggccatggtggaggtgcagctggagacgcagtaccagtacccgcggccgctgctgattgccttcagcgcctgcaccacggtgctggtggccgtgcacctgttcgccctcctcatcagcacctgcatcctgcccaatgtggaggccgtgagcaacatccacaacctgaactccatcagcgagtccccgcatgagcgcatgcacccctacatcgagctggcctggggcttctccaccgtgcttggcatcctactcttcctggccgaggtggtgctgctctgctggatcaagttcctccccgtggatgcccggcgccagcctggccccccacctggccctgggagtcacacgggctggcaggccgccctggtgtccaccatcatcatggtgcccgtgggcctcatcttcgtggtcttcaccatccacttctaccgctccctggtgcgccacaaaacggagcgccacaaccgcgagatcgaggagctccacaagctcaaggtccagctggacgggcatgagcgcagcctgcaggtcttgtgaggggccgagggccggggctgggagcggccctgtgcccgggagtccgcagaggcggggatttgtcagatgcagacattttgcaaggctgccgggtagttcaagaccaaagttttcctcttgtcttaataccataaggactggatgacttctcctgagatagaaccgtttggttcaatgagggactgtgttgctaagagcgttgggggcaaagccaggctggttccttggcctcggggtttcctgggtcggggacacggtgaagaggctccagcgggacctgcccatcagtcctgggccaggaggggctccaagcagcacccagcggtccgggggagtctcagacccggcatgcgtggctggcagacctgggagagccagggcagggttttgcgttcagagaaggattgccccagagacccgtggtggacttcatgggtgctgagtggcccgtgtgacagtgatgacacgaaggcttcggcgtttgagtgggtgcaggtgcacgccagggcttggtgcttccctgcctggccctggagggagctgggtggcctggcttcaggggaagacaggagccaggacacacgtcagcccagcaggtgtggggggtgctgcagccctcggcagtggggtcaggccctgggggatgtttccaatggtgggcagcctggccaggccggagaagacatgttcacgggcatctatcagatgcccccttgaggaggctgagttatttgagggctgctgcaaagtacgctaggctcaaattctcttttcccagccagagccctggccacacggactcagaggggccaccggggtggggaaaggacccctcccccaccccccgcagccactggcctccagctctcggccacagaatggcctctaaggctgactcagccactcccttgggctgtggcagcaggaggcgggggctctggctcaggccccggagcctgtgcagcttgcccatggccctaggcagcgaggggacagcctgggggacttcctgcctaggcaaggtcattggccgggcctggcctgtggatagtggggccaggggccggcccaggccaaatgagtgccctccttgttatgacaccaagtgactacaagggaggcaagacccctccaggcctctcagccgacactgggtcccaccacacacagtgactgtgccgtgcagtgcaggttctggccttttccttgaaggcatctggtagacccgaagccacgctctcgggccgcacatgcacgccgcagcaccagctgccctgagctgcttgtacaaccaaacacctttcccctcttctccagctgtaacctggagagtcagccatgccttgtcttttgttctcataaatagtcactggggccgggcgcagtgactcacgcctgtaatcccagcactttgggaggcctaggtgggcggatcacttgaggtcaggagttcgagaccagcctggccaacatggtgaaaccctgtctctactaaaaaaatacagaaaattagctgggcgtggtggcgggcgcctgtagccccagctacttgggaggctgaggcgggagaatggcaatggcgtgaacccgggaggcagagcttgcagtgagctgagatggcgccactgcactccagcctgggcgacagagccagactccatctc

SEQ ID NO: 711 - DNA, 2546 bp, Artificial; identical to SEQ ID NO: 432
  cDNA Sequence

SEQ ID NO: 712 - DNA, 1757 bp, Artificial
  cDNA Sequence
cagtgcggcggatgtacggatgattcagtggctggcaggaagcccgccctgcccgcccgccagtgtcagtggtgttggcatcagcttgggcaggtgtgcgggctcaggatggggcggccgtggtgaggaaccctggactctcagcatcacaagaggcaacaccaggagccaacatgagctcggggactgaactgctgtggcccggagcagcgctgctggtgctgttgggggtggcagccagtctgtgtgtgcgctgctcacgcccaggtgcaaagaggtcagagaaaatctaccagcagagaagtctgcgtgaggaccaacagagctttacggggtcccggacctactccttggtcgggcaggcatggccaggacccctggcggacatggcacccacaaggaaggacaagctgttgcaattctaccccagcctggaggatccagcatcttccaggtaccagaacttcagcaaaggaagcagacacgggtcggaggaagcctacatatgatgatgccaattcctacgagaatgtgctcatttgcaagcagaaaaccacagagacaggtgcccagcaggagggcataggtggcctctgcagaggggacctcagcctgtcactggccctgaagactggccccacttctggtctctgtccctctgcctccccggaagaagatgaggaatctgaggattatcagaactcagcatccatccatcagtggcgcgagtccaggaaggtcatggggcaactccagagagaagcatcccctggcccggtgggaagcccagacgaggaggacggggaaccggattacgtgaatggggaggtggcagccacagaagcctagggcagaccaagaagaaaggagccaaggcaaagagggaccactgtgctcatggacccatcgctgccttccaaggaccatttcccagagctactcaacttttaagcccctgccatggttgctcctggaaggagaaccagccaccctgaggaccacctggccatgcgtgcacagcctgggaaaagacagttactcacgggagctgcaggcccgtcaccaagccctctcccgacccaggctttgtggggcaggcacctggtaccaagggtaacccggctcctggtatggacggatgcgcaggatttaggataagctgtcacccagtccccataacaaaaccactgtccaacactggtatctgtgttcttttgtgctatgaatttggattcctaattgctattgttggttgctggggttttaaatgattgataagcttgtacagttaacttatagagggggagccatatttaacattctggatttcagagtagagatttctgtgttgtctcctagaaagcattacatgtagtttatttcagcatccttgttgggtggggccctggctctcttcccctttggtgggacctcccctttctttgggcttcagttcactcaggaagaaatgaggctgtcgccatctttatgtgcttccagtggaaatgtcacttgctacagacaatagtgcatgagagtctagagaagtagtgaccagaacagggcagagtaggtcccctccatggccctgaatcctcctctgctccagggctggcctctgcagagctgattaaacagtgttgtgactgtctcatgggaagagctggggcccagagggaccttgagtcagaaatgttgccagaaaaagtatctcctccaaccaaaacatctcaataaaaccattttagttgaaaagc

SEQ ID NO: 713 - DNA, 1241 bp, Artificial
  cDNA Sequence
gccgctcctgccgtgcatgttggggagccagtacatgcaggtgggctccacacggagaggggcgcagaccccgtgatagggctttacctggtacatcggcatggcgcaaccaaagcaagagagggtggcgcgtgccagacaccaacggtcggaaaccgccagacaccaacggtcggaaaccgccagacaccaacgctcggaaaccgccagacaccaacgctcggaatacacgccagaccacgacggagggcgaccacctcccttctgaccctgctgcgggcgttcggaaaaaaaacgcagtccggtgtgctctgattggtccaggctctttgacgtcacggactcgacctttgacagagccactaggcgaaaaggagagacgggaagtattttttccgccccgcccggaaagggtggagcacaacgtcgaaagcagccaatgggagcccaggaggcggggcgcctgtgggaaccgtggagggcactttcccagtccccgaggcggatccggtgttgcatccttggagagagctgagagctggagtacagaacctgctaaggccatcaaacctattgatcggaagtcagtccatcagatttgctctgggccggtagtactgagtctaagcactgcggtgaagaagatggtagaaaacagtctggatgctggtgccactaatattgatctaaagcttaaggactatggaatggatctcattgaagtttcaggcaatggatgtggggtagaagaagaaaacttcgaaggcttaactctgaaacatcacacatctaagattcaagagtttgccgacctaactcgggttgaaacttttggctttcggggggaagctctgagctcactttgtgcactgagtgatgtcaccatttctacctgccacgtatcggcgaaggttgggactcgactggtgtttgatcacgatgggaaaatcatccagaaaaccccctacccccaccccagagggaccacagtcagcgtgaagcagttattttctacgctacctgtgcgccataaggaatttcaaaggaatattaagaagaaacgtgcctgcttccccttcgccttctgccgtgattgtcagttccttgagggctccccagccatgcttcctgtacagcctgcaaaactgactcctagaagtaccccaccccacccctgctccttggaggacaacgtgatcactgtattcagctctgtcaagaatggtccaggttcttctaga

SEQ ID NO: 714 - DNA, 273 bp, Artificial
  cDNA Sequence
gctaaggccatcaaacctattgatcggaagtcagtccatcagatttgctctgggccggtggtactgagtctaagcactgcggtgaagaagatagtaggaaacagtctggatgctggtgccactaatattgatctaaagcttaaggactatggaatggatctcattgaagtttcaggcaatggatgtggggtagaagaagaaaacttcgaaggcttaatgatgtcaccatttctacctgccacgtatcggcgaaggttgggactcaactggtgt

SEQ ID NO: 715 - DNA, 2180 bp, Artificial
  cDNA Sequence
ccgccttcggcccgggcctcccgggatggccgtggcgcctctgcggggggcgctgctgctgtggcagctgctggcggcgggcggcgcggcactggagatcggccgcttcgacccggagcgcgggcgcggggctgcgccgtgccaggcggtggagatccccatgtgccgcggcatcggctacaacctgacccgcatgcccaacctgctgggccacacgtcgcagggcgaggcggctgccgagctagcggagttcgcgccgctggtgcagtacggctgccacagccacctgcgcttcttcctgtgctcgctctacgcgcccatgtgcaccgaccaggtctcgacgcccattcccgcctgccggcccatgtgcgagcaggcgcgcctgcgctgcgcgcccatcatggagcagttcaacttcggctggccggactcgctcgactgcgcccggctgcccacgcgcaacgacccgcacgcgctgtgcatggaggcgcccgagaacgccacggccggccccgcggagccccacaagggcctgggcatgctgcccgtggcgccgcggcccgcgcgccctcccggagacctgggcccgggcgcgggcggcagtggcacctgcgagaaccccgagaagttccagtacgtggagaagagccgctcgtgcgcaccgcgctgcgggcccggcgtcgaggtgttctggtcccggcgcgacaaggacttcgcgctggtctggatggccgtgtggtcggcgctgtgcttcttctccaccgccttcactgtgctcaccttcttgctggagccccaccgcttccagtaccccgagcgccccatcatcttcctctccatgtgctacaacgtctactcgctggccttcctgatccgtgcggtggccggagcgcagagcgtggcctgtgaccaggaggcgggcgcgctctacgtgatccaggagggcctggagaacacgggctgcacgctggtcttcctactgctctactacttcggcatggccagctcgctctggtgggtggtcctgacgctcacctggttcctggctgccgggaagaaatggggccacgaggccatcgaggcccacggcagctatttccacatggctgcctggggcctgcccgcgctcaagaccatcgtcatcctgaccctgcgcaaggtggcgggtgatgagctgactgggctttgctacgtggccagcacggatgcagcagcgctcacgggcttcgtgctggtgcccctctctggctacctggtgctgggcagtagtttcctcctgaccggcttcgtggccctcttccacatccgcaagatcatgaagacgggcggcaccaacacagagaagctggagaagctcatggtcaagatcggggtcttctccatcctctacacggtgcccgccacctgcgtcatcgtttgctatgtctacgaacgcctcaacatggacttctggcgccttcgggccacagagcagccatgcgcagcggccgcggggcccggaggccggagggactgctcgctgccagggggctcggtgcccaccgtggcggtcttcatgctcaaaattttcatgtcactggtggtggggatcaccagcggcgtctgggtgtggagctccaagactttccagacctggcagagcctgtgctaccgcaagatagcagctggccgggcccgggccaaggcctgccgcgcccccgggagctacggacgtggcacgcactgccactataaggctcccaccgtggtcttgcacatgactaagacggacccctctttggagaaccccacacacctctagccacacaggcctggcgcggggtggctgctgccccctccttgccctccacgccctgccccctgcatcccctagagacagctgactagcagctgcccagctgtcaaggtcaggcaagtgagcaccggggactgaggatcagggcgggaccccgtgaggctcattaggggagatgggggtctcccctaatgcgggggctggaccaggctgagtccccacagggtcctagtggaggatgtggaggggcggggcagaggggtccagccggagtttatttaatgatgtaatttattgttgcgttcctctggaagctgtgactggaataaacccccgcgtggcactgctgagtcctctctggctgggaaggggggaaggtaggagg

SEQ ID NO: 716 - DNA, 794 bp, Artificial
  cDNA Sequence
cagaaacgtgcctgcttccccttcgccttctgccgtgattgtcagcttcttgagggctccccagccatgcttcctgtacagcctgcaaaacttacagaacctgctaaggccatcaaacctattgatcggaagtcagtccatcagatttgctctgggcaggtggtactgagtctaagcactggatgaagaagatagtagaaaacagtctggatgctggtgccactaatgttgatctaaagcttaaggactatggaatggatctcattgaagtttcaggcaatggatgtggggtagaagaagaaaacttcgaaggcttaatccttactttacagtctctttcagctctgaaacatcacacatctaagattcaagagtttgccgacctaactcgggttgaaacttttggctttcgggggaaagctctgagctcactttgtgcactgagtgatgtcaccatttctacctgccacgtatcggcgaaggttgggactcgactggtgtttgatcacgatgggaaaatcatccagaaaaccccctacccccaccccagagggaccacagtcagcgtgaagcagttattttctacgctacctgtgcgccataaggaatttcaaaggaatattaagaagaaacgtgcctgcttccccttcgccttctgccgtgattgtcagcttcttgagggctccccagccatgcttcctgtacagcctgcaaaacttgtccaggatgtaactagagagctacgggcatgcagaagttggaagatgagggaaggcatcacagaggctgtgggg

SEQ ID NO: 717 - DNA, 123 bp, Artificial
  cDNA Sequence
accttggcagctttgccaaggctaccttcaatgccatctccaggacctacagctctgacttgtggaaagaggatgtatttaccaagtctccctatcaggaattcactggtcaccttgtaaaga

SEQ ID NO: 718 - DNA, 578 bp, Artificial
  cDNA Sequence
ttactagaaaaagaaactctgtattacagaaaagcaactgggtacaaggtacctcaaaatcacgacctaccaaatgcagcataggcacagaaaaagaacagtttaaataagctgaaccccttattgatgaagagatagagttaacacagggatttaccaattgaactcagagattttaaccagcttatcaaagctaattaaaatggggttgtgatattgaaaatatagcaagagaagaagagggaaaaagcttacgggaggtccttgaatactcaactgtgttctgggaaaaacgcaatgagctccaggacatagacaagattatggctcagagtgaaagggagagataagaattcagagaataatttgcatcagaaaagcacctgacaaaaagatcagatggtacagagcatctagcaccttttcttcagctgaggatatcatggtactagtataacagagggaaaaactgtactgaggaagaggatcattctgtactttgtgtgcttggattcaacaaggaaaatatttatgatgaaatgcaatagtgtaatcacaactctcctcagttcagattt

SEQ ID NO: 719 - DNA, 779 bp, Artificial
  cDNA Sequence
aaaggaaaggaggccaaggggaagaagttggctctggcccctgcttttgtgaagaagcaggaggccaagaaagtggtgaatcccctgtttgagaaaaggcctaagaattttggcattggacaggacatccagcccaaaagagacctcacctgctttgtgaaatggccccgctatatcaggttgcaatggcagagatccatactctataagcagctgaaagtgcctcctgcgattaaccagttcacccaggccctggaaggccaaacagctactcagctgcttaagctggcccacaaatacagaccagagacaaagcaagagaagaagtggaggctgttggcccaggcagagttgtgggcaaaggggacctccccatgaagagactacctgtctttcgagcaggagttaacaccgtcaccacctttgtggataacaagaaagctccgctggtggtgactacacacgacatggatcccattgagctgactgttttcctgcctgtcctgtgtcataaaatgggggccacttgctgcattatcaaggggaaggcaagactgggatgtctagttcacaggaagacctacaccactgtcgacttcacacaggttaactcagaagacaaaggagctttggctaagctggtggaagctatcgggaccaattacaatgccagatacgatgagacccactgtcactgggacggcaatgtcctgggtcccaagtctgtggctcacattgccaagctcgaaaaggcaaaggctaaagaacttgccactaaa

SEQ ID NO: 720 - DNA, 210 bp, Artificial
  cDNA Sequence
cattcctgtctcaaggccacaccttccacctgcagtggagtcttccacacccagcgcttcgacctttaccagcaggcctccccaccagatgccctgcactggatacctaagccttgggaatggacacggccgccacctcgagaagggccctcccaaaaggcagaggagcctgggtcccaaggggacaaggagcctggtttgcccccaccc

SEQ ID NO: 721 - DNA, 396 bp, Artificial
  cDNA Sequence
aaaaatcgaacctgtggtgcaggacaggatcctgtgccctatatgatttctctgattcacaaactctaagaatggtttactgtggagcagttggaagactatttgaattttgcaaaccacctcttgtgggtttttacaccattaacacttctaatacttccttactttactatctttcttctctaccttactattattttcctacacatttataagagaaagaacgtattaaaagaagcctactctcataatttatgggatggtgcaaggaacacggaggcaagtctgtgggatgggcatgcagcagtttggcatggtaagcgaggatgctttcatctctgtgttgccattcatgtgtgctgcattggaactgtgttaccatgccattttattgac

SEQ ID NO: 722 - DNA, 804 bp, Artificial
  cDNA Sequence
gagctcgcccctgagcctgaggagacctgggtagtggagacgctgtgtgggctcaagatgaagctgaagcaacagcgagtgtcacccatcctccctgagcaccacaaggacttcaacagtcagcttgcccctggggtagatcccagccccccgcataggtccttttgctggaaaaggaagatggagtggtgggacaaatctgaggagtcgttggaggaggagccacggaaggtgctcgcccctgagcctgaggagatctgggtggcggagatgctgtgtggcctcaagatgaagctgaagcgacggcgagtgtcgctcgtgctccctgagcaccacgaggccttcaacaggctgcttgaggatcctgtcattaaaagattcctggcctgggacaaaggtctgagggtgtcggacaagtatctcctggctatggtcatagtgtatttcagccgggccggcctcccctcctggcaataccaatgcattcatttcttcctggctctctacctggccaatgacatggaggaggacgacgaggaccccaaacaaaacatcttctacttcctgtatgggaagacccgctctcgcatacccttgctccgtaagcgtcggttccagttatgccgttgcatgaacccgagggccaggaagaaccgctctcagatagtcctgttccagaaacttcggttccagttcttctgttccatgagctgcagggcttgggtttccccggaggagttggaggagatccaggcttatgacccagagcactgggtgtgggcgcgagatcgcgctcgcctttcc

SEQ ID NO: 723 - DNA, 81 bp, Artificial
  cDNA Sequence
cccagtgtccaggatgtaactagagagctacgggcatgcagaagttggaagatgagggaaggcatcacagaggctgtgggg

SEQ ID NO: 724 - DNA, 924 bp, Artificial
  cDNA Sequence
aaaaggaagagggaatgtttggatgaatctgatgatgagccagagaaggagctcgcccctgagcctgaggagacctgggtggcggagacgctgtgtggcctcaagatgaaggcgaagcgacggcgagtgtcgctcgtgctccctgagtactacgaggccttcaacaggctgcttgcccctggggtagatcccagccccccacgtaggtcccttggctggaaaaggaagagggaatgtttggatgaatctgatgatgagccagagaaggagctcgcccctgagcctgaggagacctgggtggcggagacgctgtgtggcctcaagatgaaggcgaagcgacggcgagtgtcgctcgtgctccctgagtactacgaggccttcaacaggctgcttgaggatcctgtcattaaaagactcctggcctgggacaaagatctgagggtgtcggacaagtatctcctggctatggtcatagcgtatttcagccgggccggcctcccctcctggcaataccaacgcattcatttcttcctggctctctatctggccaatgacatggaggaggacgacgaggcccccaaacaaaacatcttctacttcctgtacgaggagacccgctctcatatacccttgctcagtgagctttggttccagttatgccgttacatgaacccgagggccaggaagaactgctctcagatagccttgttccggaagtatcgtgagctttggttccagttatgccgttacatgaacccgagggccaggaagaactgctctcagatagccttgttccggaagtatcggttccacttcttttgttccatgcgctgcagggcttgggtttccctggaggagttggaagagatccaggcttatgacccagagcactgggtgtgggcgcgagatcgcgcccacctttcc

SEQ ID NO: 725 - DNA, 468 bp, Artificial
  cDNA Sequence
atggggggaagcgcgttaaaccagggagtcctggaaggggacgacgcccccggccagtccctgtacgagcggttaagtcagaggatgctggacatctcgggggaccggggcgtgctgaaggacgtcatccgagaaggagctggagacctagtggcgcctgatgcttcggtgctagtgaaatagtatggatacctggaacacttggacagacccttcgattctaattactttaggaaaactcctcggctaatgaaacttggagaggatattacattgtggggcatggagctgggccttctgagcatgcagagaggagagctggccaggtttctgttcaaaccgaactacgcctatggaacgctgggctcccctcccttgatccccccaaacaccactgtcctgttcaagattgagctgcttgacttcctagactgtgctgagtcagacaagttttgtgctctctcagct

SEQ ID NO: 726 - DNA, 1202 bp, Artificial
  cDNA Sequence
gccgctcctgccgtgcatgttggggagccagtacatgcaggtgggctccacacggagaggggcgcagacccggtgatagggctttacctggtacatcggcatggcgcaaccaaagcaagagagggtggcgcgtgccagacaccaacggtcggaaaccgccagacaccaacgacaccaaggctcggaatacacgccagaccacgacggagggcgaccacctcccttctgaccctgctgcgggcgttcggaaaaaaaacgcagtccggtgtgctctgattggtccaggctctttgacgtcacggactcgacctttgacagagccactaggcgaaaaggagagacgggaagtattttttccgccccgcccggaaagggtggagcacaacgtcgaaagcagccaatgggagcccaggaggcggggcgcctgtgggagccgttgagggcactttcccagtccccgaggcggatccggtgttgcatccttggagagagctgagagctcgagtacagaacctgctaaggccatcaaacctattgatcggaagtcagtccatcagatttgctctgggccggtggtactgagtctaagcactgcggtgaagaagatagtaggaaacagtctggatgctggtgccactaatattgatctaaagcttaaggactatggaatggatctcattgaagtttcaggcaatggatgtggggtagaagaagaaaacttcgaaggcttaactctgaaacatcacacatctaagattcaagagtttgccgacctaactcgggttgaaacttttggctttcgggggaaagctctgagctcactttgtgcactgagtgatgtcaccatttctacctgccacgtatcggcgaaggttgggactcgactggtgtttgatcacgatgggaaaatcatccagaaaaccccctacccccaccccagagggaccacagtcagcgtgaagcagttattttctacgctacctgtgcgccataaggaatttcaaaggaatattaagaagaaacgtgcctgcttccccttcgccttctgccgtgattgtcagtttcttgagggctccccagccatgcttcctgtacagcctgcaaaactgactcctagaagtaccccaccccacccctgctccttggaggacaacgtgatcactgtattcagctctgtcaagaatggtccaggttcttctaga

SEQ ID NO: 727 - DNA, 1262 bp, Artificial
  cDNA Sequence
atggggctgtacgctgcggtggcaggcgtgctggccggcgtggagagccgccagggctctatcaaggggctggtgtactccagcaacttccagaacgtgaagcagctgtacgcgctggtgtgcgaaacgcagcgctactccgccgtgctggatgccgtgatctccagcgccggcctcctcagtgcgaagaagctgcagccgcacctggccaaggtgtatgagttgttgggaaagggctttcgagggggtgggggccaatggaaggctctgttgggacggcaccaggcgaggtgttgagttggctcggctcaaggttcttcggggtgtgagctggcatgaggacctgttggaagtgggatccaggcctggtccagcctcccagctgcctcgatttgtgcgtgtgaacactctcaagacctgctccgtttatgtagttatttcaagagacaaggtttctcctatcagggtcgggcttccagccttgatgacttacaagccctcaaggggaagcattttctcctggactccttgatgccggagctgctggtgtttcccgcccagacagatctgcatgaacacccactgtaccgggccggacacctcattctgcaggacagggccagctgtctcccagccatgctgctggacccccgccaggctcccatgtcatcgatgcctgtgccgccccaggcaataagaccagtcacttggctgctcttctgaagaaccaagggaagatctttgcctttgacctggatgccaagcggctggcatccatggccacgctgctggcctgggttggcgtctcctgctgtgagctggctgaggaggacttcctggcggtctcccccttagatccgcgctatcgtgaggtccactatgtcctgctggatccttcctgcagtggctcgggtatgccgagcagacagctggaggatcccggggcagggacacctagcccggtgcgtctgcatgccctggcagggttccagcagcgagccctgtgccacgcgctcactttcccttccctgcagcggctcgtctactccatgtgctccctctgccaggaggagaatgaagacatggtaccagatgcgctgcagcagaacccgggcgccttcaggctagctcccgccctgcctgcccggccccaccgaggcctgagcacgttcccgggtgccgagcactgcctccgggcttcccccaagaccacgcttagcggtggcttcttcgttgctgtaattgaacgggtcgagatgccg

SEQ ID NO: 728 - DNA, 793 bp, Artificial
  cDNA Sequence
atgtgtccttggcggcctagactaggccgtcgctgtatggtgagccccagggaggcggatctgggcccccagaaggacacccgcctggatttgccccgtaggcccggcccgggcccctcgggagcagaacagccttggtgaggtggacaggaggggacctcgcgagcagacgcgcgcgccagcgacagcagccccgccccggcctctcgggagccggggggcagaggctgcggagccccaggagggtctatcagccacagtctctgcatgtttccaagagcaacaggaaatgaacacattgcaggggccagtgtcattcaaagatgtggctgtggatttcacccaggaggagtggcggcaactggaccctgatgagaagatagcatacggggatgtgatgttggagaactacagccatctagtttctgtggggtatgattatcaccaagccaaacatcatcatggagtggaggtgaaggaagtggagcagggagaggagccgtggataatggaaggtgaatttccatgtcaacatagtccagaacctgctaaggccatcaaacctattgatcggaagtcagtccatcagatttgctctgggccagtggtactgagtctaagcactgcagtgaaggagttagtagaaaacagtctggatgctggtgccactaatattgatctaaagcttaaggactatggagtggatctcattgaagtttcagacaatggatgtggggtagaagaagaaaactttgaaggcttaatctctttcagctctgaaacatcacacatg

SEQ ID NO: 729 - DNA, 2055 bp, Artificial
  cDNA Sequence
caagatgatgattattctccaccgtctaagagaccaaaggccaatgagctaccgcagccaccagtcccggaacccgccaatgctgggaagcggaaagtgagggagttcaacttcgagaaatggaatgctcgcatcactgatctacgtaaacaagttgaagaattgtttgaaaggaaatatgctcaagccataaaagccaaaggtccggtgacgatcccgtaccctcttttctagtctcatgttgaagatctttatgtagaaggacttcctgaaggaattccttttagaaggccatctacttacggaattcctcgcctggagaggatattacttgcaaaggaaaggattcgttttgtgattaagaaacatgagcttctgagttcaacacgtgaagatttacagcttgataagccagcttcaggagtaaaggaagaatggtatgccagaatcactaaattaagaaagatggtggatcagcttttctgcaaaaaatttgcggaagccttggggagcactgaagccaaggctgtaccgtaccaaaaatttgaggcacacccgaatgatctgtacgtggaaggactgccagaaaacattcctttccgaagtccctcatggtatggaatcccaaggctggaaaaaatcattcaagtgggcaatcgaattaaatttgttattaaaagaccagaacttctgactcacagtaccactgaagttactcagccaagaacgaatacaccagtcaaagaagattggaatgtcagaattaccaagctacggaagcaagtggaagagatttttaatttgaaatttgctcaagctcttggactcaccgaggcagtaaaagtaccatatcctgtgtttgaatcaaacccggagttcttgtatgtggaaggcttgccagaggggattcccttccgaagccctacctggtttggaattccacgacttgaaaggatcgtccacgggagtaataaaatcaagttcgttgttaaaaaacctgaactagttatttcctacttgcctcctgggatggctagtaaaataaacactaaagctttgcagtcccccaaaagaccacgaagtcctgggagtaattcaaaggttcctgaaattgaggtcaccgtggaaggccctaataacaacaatcctcaaacctcagctgttcgaaccccgacccagactaacggttctaacgttcccttcaagccacgagggagagagttttcctttgaggcctggaatgccaaaatcacggacctaaaacagaaagttgaaaatctcttcaatgagaaatgtggggaagctcttggccttaaacaagctgtgaaggtgccgttcgcgttatttgagtctttcccggaagacttttatgtggaaggcttacctgagggtgtgccattccgaagaccatcgacttttggcattccgaggctggagaagatactcagaaacaaagccaaaattaagttcatcattaaaaagcccgaaatgtttgagacggcgattaaggagagcacctcctctaagagccctcccagaaaaataaattcatcacccaatgttaatactactgcatcaggtgttgaagaccttaacatcattcaggtgacaattccagatgatgataatgaaagactctcgaaagttgaaaaagctagacagctaagagaacaagtgaatgacctctttagtcggaaatttggtgaagctattggtatgggttttcctgtgaaagttccctacaggaaaatcacaattaaccctggctgtgtggtggttgatggcatgcccccgggggtgtccttcaaagcccccagctacctggaaatcagctccatgagaaggatcttagactctgccgagtttatcaaattcacggtcattagaccatttccaggacttgtgattaataaccagctggttgatcagagtgagtcaaaaggccccgtgatacaagaatcagctgaaccaagccagttggaagttccagccacagaagaaataaaagagactgatggaagctctcagatcaagcaagaaccagaccccacgtgg

SEQ ID NO: 730 - DNA, 381 bp, Artificial
  cDNA Sequence
agcgatgtcaccatttctacctgccacgcgtcggtgaaggttgggactcgactggtgtttgatcacgatgggaaaatcatccaggaaaccccctacccccaccccagagggaccacagtcagcgtgaagcagttattttctacgctacctgtgcgccataaggaatttcaaaggaatattaagaaggtacaacgtgcctgcttccccttcgccttctgccgtgattgtcagtttcctgaggcctccccagccatgcttcctgtacagcctgcagaactgactcctagaaggaccccacccccctccccccacccctgctcctaggaggacaacgtgatcactgtattcagctccatcaagaatggtccaggttcttctaga

SEQ ID NO: 731 - DNA, 1411 bp, Artificial
  cDNA Sequence
gccacttccgggagtcggaaaggaaagctgtgggaccatcctggcaaccccggtgtttggctgggttctagcgtagccgtctgtgtggccggtgggggacctgcggtcggagtgggagggccagtctgcacccaagaggtggaagaggacgggctttaggctggaagcgccttagaggagccatttttccaggtggggccccaggcagaggctccgacagggagcctggccatagtcgcgcagccggggaggtggagcgcgtcccagacccgagcccccgacctcagccaaacccattccttctgcccttggaggccagaggggactctgagctccggaaaggatgcctggtttgcttttatgtgaaccaacagagctttacaacatcctgaatcaggccacaaaactctccagattaacagaccccaactatctctgtttattggatgtccgttccaaatgggagtatgacgaaagccatgtgatcactgcccttcgagtgaagaagaaaaataatgaatatcttctcccggagtctgtggacctggagtgtgtgaagtactgcgtggtgtatgataacaacagcagcaccctggagatactcttaaaagatgatgatgatgattcagactctgatggtgatggcaaagatcttgtgcctcaagcagccattgagtatggcaggatcctgacccgcctcacccaccaccccgtctacatcctgaaagggggctatgagcgcttctcaggcacgtaccactttctccggacccagaagatcatctggatgcctcaggaactggatgcatttcagccataccccattgaaatcgtgccagggaaggtcttcgttggcaatttcagtcaagcctgtgaccccaagattcagaaggacttgaaaatcaaagcccatgtcaatgtctccatggatacagggcccttttttgcaggcgatgctgacaagcttctgcacatccggatagaagattccccggaagcccagattcttcccttcttacgccacatgtgtcacttcattgaaattcaccatcaccttggctctgtcattctgatcttttccacccaaggtatcagccgcagttgtgccgccatcatagcctacctcatgcatagtaacgagcagaccttgcagaggtcctgggcctatgtcaagaagtgcaaaaacaacatgtgtccaaatcggggattggtgagccagctgctggaatgggagaagactatccttggagattccatcacaaacatcatggatccgctctactgatcttctccgaggcccaccgaagggtactgaagagcctcacctgggggcattttgtgggtggagggccagagtgtgtatacccaggcttgtctggaaggagaaggcctttgctgcctgaaagtctca

SEQ ID NO: 732 - DNA, 1400 bp, Artificial
  cDNA Sequence
tgtcccatctgcctggaggtcttcaaggagcccctgatgctgcagtgtggccactcttactgcaagggctgcctggtttccctgtcctgccacctggatgccgagctgcgctgccccgtgtgccggcaggcggtggacggcagcagctccctgcccaacgtctccctggccagggtgatcgaagccctgaggctccctggggacccggagcccaaggtctgcgtgcaccaccggaacccgctcagccttttctgcgagaaggaccaggagctcatctgtggcctctgcggtctgctgggctcccaccaacaccacccggtcacgcccgtctccaccgtctacagccgcatgaaggtggggagtgagggtgcaggggcggctggagaggccgcggggaccagatcctgtgctctctggtgccatcacctggcaccaaaaggatccagctatcctcgatttccctgcagctctgggtgatccgccgcgagttccaggagctgcaccacctggtggatgaggagaaggcccgctgcctggaggggatagggggtcacacccgtggcctggtggcctccctggacatgcagctggagcaggcccagggaacccgggagcggctggcccaagccgagtgtgtgctggaacaaggaaagtcatgtccctgccttcaagggtctcgtagatgggtggggaggcagatggtgaactgtgggtacctagaacagcagaagttcactcaagctacagaaatactagaggagggtagctcatgcctgcaatcccagtactttgggaagccaaggcaggaggattgcttgaggccaggagttcgagaccagcctggccaatgtaccccggagcctctcaagttggaccctgccactgcccacccactcctggagctctccaagggcaacacggtggtgcagtgcgggcttctggcccagcggcgagccagccagcctgagcgcttcgactacagcacctgcgtcctggccagccgcggcttctcctgcggccgccactactgggaggtggtggtgggcagcaagagcgactggcgcctgggggtcatcaagggcacagccagccgtaagggcaagctgaacaggtcccccgagcacggcgtgtggctgatcggcctgaaggagggccgggtgtacgaagcctttgcctgcccccgggtacccctgcccgtggccggccacccccaccgcatcgggctctacctgcactatgagcagggcgaactcaccttcttcgatgccgaccgccccgatgacctgcggccgctctacaccttccaggccgacttccagggcaagctctaccccatcctggacacctgctggcacgagaggggcagcaactcgctgcccatggtgctgcccccgcccagc

SEQ ID NO: 733 - DNA, 1338 bp, Artificial
  cDNA Sequence
ccacccagtcatgggggacaccttcatccgtcacatcgccctgctgggctttgagaagcgcttcgtacccagccagcactatgtgtacatgttcctggtgaaatggcaggacctgtcggagaaggtggtctaccggcgcttcaccgagatctacgagttccataaaaccttaaaagaaatgttccctattgaggcaggggcgatcaatccagagaacaggatcatcccccacctcccagctcccaagtggtttgacgggcagcgggccgccgagaaccaccagggcacacttaccgagtactgcggcacgctcatgagcctgcccaccaagatctcccgctgtccccacctccttgacttcttcaaggtgcgccctgatgacctcaagctccccacggacaaccagacaaaaaagccagagacatacttgatgcccaaagatggcaagagtaccgcgacagacatcaccggccccatcatcctgcagacgtaccgcgccattgccaactacgagaagacctcgggctccgagatggctctgtccacgggggacgtggtggaggtcgtggagaagagcgagagcggttggtggttctgtcagatgaaagcaaagcgaggctggatcccagcatccttcctcgagcccctggacagtcctgacgagacggaagaccctgagcccaactatgcaggtgagccatacgtcgccatcaaggcctacactgctgtggagggggacgaggtgtccctgctcgagggtgaagctgttgaggtaattcacaagctcctggacggctggtgggtcatcaggaaagacgacgtcacaggctacttcccgtccatgtacctgcaaaagtcagggcaagacgtgtcccaggcccaacgccagatcaagcggggggcgccgccccgcaggtcgtccatccgcaacgtgcacagcatccaccagcggtcgcggaagcgcctcagccaggacgcctatcgccgcaacagcgtccgttttctgcagcagcgacgccgccaggcgcggccgggaccgcagagccccgggagcccgctcgaggaggagcggcagacgcagcgctctaaaccgcagccggcggtgcccccgcggccgagcgccgacctcatcctgaaccgctgcagcgagagcaccaagcggaagctggcgtctgccgtctgaggctggagcgcagtccccagctagcgtctcggcccttgccgccccgtgcctgtatatacgtgttctatagagcctggcgtctggacgccgagggcagccccgacccctgtccagcgcggctcccgccaccctcaataaatgttgcttggagtgga

SEQ ID NO: 734 - DNA, 1396 bp, Artificial
  cDNA Sequence
cgacttcctctttccagtgcatttaaggcgcagcctggaagtgccagggagcactggaggccacccagtcatgggggacaccttcatccgtcacatcgccctgctgggctttgagaagcgcttcgtacccagccagcactatgtgtacatgttcctggtgaaatggcaggacctgtcggagaaggtggtctaccggcgcttcaccgagatctacgagttccataaaaccttaaaagaaatgttccctattgaggcaggggcgatcaatccagagaacaggatcatcccccacctcccagctcccaagtggtttgacgggcagcgggccgccgagaaccgccagggcacacttaccgagtactgcggcacgctcatgagcctgcccaccaagatctcccgctgtccccacctcctcgacttcttcaaggtgcgccctgatgacctcaagctccccacggacaaccagacaaaaaagccagagacatacttgatgcccaaagatggcaagagtaccgcgacagacatcaccggccccatcatcctgcagacgtaccgcgccattgccaactacgagaagacctcgggctccgagatggctctgtccacgggggacgtggtggaggtcgtagagaagagcgagagcggttggtggttctgtcagatgaaagcaaagcgaggctggatcccagcgtccttcctcgagcccctggacagtcctgacgagacggaagaccctgagcccaactatgcaggtgagccatacgtcgccatcaaggcctacactgctgtggagggggacgaggtgtccctgctcgagggtgaagctgttgaggtcattcacaagctcctggacggctggtgggtcatcaggaaagacgacgtcacaggctacttcccgtccatgtacctgcaaaagtcagggcaagacgtgtcccaggcccaacgccagatcaagcggggggcgccgccccgcaggtcgtccatccgcaacgcgcacagcatccaccagcggtcgcggaagcgcctcagccaggacgcctatcgccgcaacagcgtccgttttctgcagcagcgacgccgccaggcgcggccgggaccgcagagccccgggagcccgctcgaggaggagcggcagacgcagcgctctaaaccgcagccggcggtgcccccgcggccgagcgccgacctcatcctgaaccgctgcagcgagagcaccaagcggaagctggcgtctgccgtctgaggctggagcgcagtccccagctagcgtctcggcccttgccgccccgtgcctgtacatacgtgttctatagagcctggcgtctggacgccgagggcagccccgacccctgtccagcgcggctcccgccaccctcaataaatgttgcttggagtg

SEQ ID NO: 735 - DNA, 1667 bp, Artificial; identical to SEQ ID NO: 579
  cDNA Sequence

SEQ ID NO: 736 - DNA, 1250 bp, Artificial
  cDNA Sequence
caaagccacaggcaggtgcaggcgcagccgcggcgagagcgtatggagccgagccgttagcgcgcgccgtcggtgagtcagtccgtccgtccgtccgtccgtcggggcgccgcagctcccgccaggcccagcggccccggcccctcgtctccccgcacccggagccacccggtggagcgggccttgccgcggcagccatgtccatgggcctggagatcacgggcaccgcgctggccgtgctgggctggctgggcaccatcgtgtgctgcgcgttgcccatgtggcgcgtgtcggccttcatcggcagcaacatcatcacgtcgcagaacatctgggagggcctgtggatgaactgcgtggtgcagagcaccggccagatgcagtgcaaggtgtacgactcgctgctggcactgccacaggaccttcaggcggcccgcgccctcatcgtggtggccatcctgctggccgccttcgggctgctagtggcgctggtgggcgcccagtgcaccaactgcgtgcaggacgacacggccaaggccaagatcaccatcgtggcaggcgtgctgttccttctcgccgccctgctcaccctcgtgccggtgtcctggtcggccaacaccattatccgggacttctacaaccccgtggtgcccgaggcgcagaagcgcgagatgggcgcgggcctgtacgtgggctgggcggccgcggcgctgcagctgctggggggcgcgctgctctgctgctcgtgtcccccacgcgagaagaagtacacggccaccaaggtcgtctactccgcgccgcgctccaccggcccgggagccagcctgggcacaggctacgaccgcaaggactacgtctaagggacagacgcagggagaccccaccaccaccaccaccaccaacaccaccaccaccaccgcgagctggagcgcgcaccaggccatccagcgtgcagccttgcctcggaggccagcccacccccagaagccaggaagcccccgcgctggactggggcagcttccccagcagccacggctttgcgggccgggcagtcgacttcggggcccagggaccaacctgcatggactgtgaaacctcacccttctggagcacggggcctgggtgaccgccaatacttgaccaccccgtcgagccccatcgggccgctgcccccatgctcgcgctgggcagggaccggcagccctggaaggggcacttgatatttttcaataaaagcctttcgttttgca

SEQ ID NO: 737 - DNA, 1680 bp, Artificial
  cDNA Sequence
ggcagctgtcggctggaaggaactggtctgctcacacttgctggcttgcgcatcaggactggctttatctcctgactcacggtgcaaaggtgcactctgcgaacgttaagtccgtccccagcgcttggaatcctacggcccccacagccggatcccctcagccttccaggtcctcaactcccgtggacgctgaacaatggcctccatggggctacaggtaatgggcatcgcgctggccgtcctgggctggctggccgtcatgctgtgctgcgcgctgcccatgtggcgcgtgacggccttcatcggcagcaacattgtcacctcgcagaccatctgggagggcctatggatgaactgcgtggtgcagagcaccggccagatgcagtgcaaggtgtacgactcgctgctggcactgccgcaggacctgcaggcggcccgcgccctcgtcatcatcagcatcatcgtggctgctctgggcgtgctgctgtccgtggtggggggcaagtgtaccaactgcctggaggatgaaagcgccaaggccaagaccatgatcgtggcgggcgtggtgttcctgttggccggccttatggtgatagtgccggtgtcctggacggcccacaacatcatccaagacttctacaatccgctggtggcctccgggcagaagcgggagatgggtgcctcgctctacgtcggctgggccgcctccggcctgctgctccttggcggggggctgctttgctgcaactgtccaccccgcacagacaagccttactccgccaagtattctgctgcccgctctgctgctgccagcaactacgtgtaaggtgccacggctccactctgttcctctctgctttgttcttccctggactgagctcagcgcaggctgtgaccccaggagggccctgccacgggccactggctgctggggactggggactgggcagagactgagccaggcaggaaggcagcagccttcagcctctctggcccactcggacaacttcccaaggccgcctcctgctagcaagaacagagtccaccctcctctggatattggggagggacggaagtgacagggtgtggtggtggagtggggagctggcttctgctggccaggatagcttaaccctgactttgggatctgcctgcatcggcgttggccactgtccccatttacattttccccactctgtctgcctgcatctcctctgttccgggtaggccttgatatcacctctgggactgtgccttgctcaccgaaacccgcgcccaggagtatggctgaggccttgcccacccacctgcctgggaagtgcagagtggatggacgggtttagaggggaggggcgaaggtgctgtaaacaggtttgggcagtggtgggggagggggccagagaggcggctcaggttgcccagctctgtggcctcaggactctctgcctcacccgcttcagcccagggcccctggagactgatcccctctgagtcctctgccccttccaaggacactaatgagcctgggagggtggcagggaggaggggacagcttcacccttggaagtcctggggtttttcctcttccttctttgtggtttctgttttgtaatttaagaagagctattcatcactgtaattattattattttctacaataaatgggacctgtgcacagga

SEQ ID NO: 738 - DNA, 2436 bp, Artificial
  cDNA Sequence
ggccaggccgcgcccccgcgtgcgtgcgcggcccggcagagccgtgcgggcgcccgcgtactcactagctgaggtggcagtggttccaccaacatggagctctcgcagatgtcggagctcatggggctgtcggtgttgcttgggctgctggccctgatggcgacggcggcggtagcgcgggggtggctgcgcgcgggggaggagaggagcggccggcccgcctggcccaggagcttttttcctgttggaattggggagcatctgcagtcatttaccacatgccagctttgtgactcaattaagtatcttttacaaaagtgactggctccactcccccgcacaggactcaacagatgttgacttctcatccccgagttctttcaggccaaaaagcaaatggatttccacctgacaaatcttcgggatccaagaagcagaaacaatatcagcggattcggaaggagaagcctcaacaacacaacttcacccaccgcctcctggctgcagctctgaagagccacagcgggaacatatcttgcatggactttagcagcaatggcaaatacctggctacctgtgcagatgatcgcaccatccgcatctggagcaccaaggacttcctgcagcgagagcaccgcagcatgagagccaacgtggagctggaccacgccaccctggtgcgcttcagccctgactgcagagccttcatcgtctggctggccaacggggacaccctccgtgtcttcaagatgaccaagcgggaggatgggggctacaccttcacagccaccccagaggacttccctaaaaagcacaaggcgcctgtcatcgacattggcattgctaacacagggaagtttatcatgactgcctccagtgacaccactgtcctcatctggagcctgaagggtcaagtgctgtctaccatcaacaccaaccagatgaacaacacacacgctgctgtatctccctgtggcagatttgtagcctcgtgtggcttcaccccagatgtgaaggtttgggaagtctgctttggaaagaagggggagttccaggaggtggtgcgagccttcgaactaaagggccactccgcggctgtgcactcgtttgctttctccaacgactcacggaggatggcttctgtctccaaggatggtacatggaaactgtgggacacagatgtggaatacaagaagaagcaggacccctacttgctgaagacaggccgctttgaagaggcggcgggtgccgcgccgtgccgcctggccctctcccccaacgcccaggtcttggccttggccagtggcagtagtattcatctctacaatacccggcggggcgagaaggaggagtgctttgagcgggtccatggcgagtgtatcgccaacttgtcctttgacatcactggccgctttctggcctcctgtggggaccgggcggtgcggctgtttcacaacactcctggccaccgagccatggtggaggagatgcagggccacctgaagcgggcctccaacgagagcacccgccagaggctgcagcagcagctgacccaggcccaagagaccctgaagagcctgggtgccctgaagaagtgactctgggagggcccggcgcagaggattgaggaggagggatctggcctcctcatggcactgctgccatctttcctcccaggtggaagcctttcagaaggagtctcctggttttcttactggtggccctgcttcttcccattgaaactactcttgtctacttaggtctctctcttcttgctggctgtgactcctccctgactagtggccaaggtgcttttcttcctcccaggcccagtgggtggaatctgtccccacctggcactgaggagaatggtagagaggagaggagagagagagagaatgtgatttttggccttgtggcagcacatcctcacacccaaagaagtttgtaaatgttccagaacaacctagagaacacctgagtactaagcagcagttttgcaaggatgggagactgggatagcttcccatcacagaactgtgttccatcaaaaagacactaagggatttccttctgggcctcagttctatttgtaagatggagaataatcctctctgtgaactccttgcaaagatgatatgaggctaagagaatatcaagtccccaggtctggaagaaaagtagaaaagagtagtactattgtccaatgtcatgaaagtggtaaaagtgggaaccagtgtgctttgaaaccaaattagaaacacattccttgggaaggcaaagttttctgggacttgatcatacattttatatggttgggacttctctcttcgggagatgatatcttgtttaaggagacctcttttcagttcatcaagttcatcagatatttgagtgcccactctgtgcccaaataaatatgagctggggattaaa

SEQ ID NO: 739 - DNA, 168 bp, Artificial
  cDNA Sequence
atgggtcaccagaagctatgctggagccacccgcgaaaattcggccagggttctcgctcttgtcgcgtctgttcaaaccggcacggtctgatccggaaatatggcctcaatatgtgccgccagtgtttttgtcagtatgggaaggatattggtttcattaagttggac

SEQ ID NO: 740 - DNA, 3332 bp, Artificial
  cDNA Sequence
gcgccgagccggtttccccgccggtgtccgagaggcgcccccggcccggcccggcccggcccgcgccctccgcccccgcctccccgggccggcggcggtgggcgagctcgcgggcccggccgcccccagccccagccccgccgggccccgccccccgtcgagtgcatgaggttgacgctactttgttgcacctggagggaagaacgtatgggagaggaaggaagcgagttgcccgtgtgtgcaagctgcggccagaggatctatgatggccagtacctccaggccctgaacgcggactggcacgcagactgcttcaggtgttgtgactgcagtgcctccctgtcgcaccagtactatgagaaggatgggcagctcttctgcaagaaggactactgggcccgctatggcgagtcctgccatgggtgctctgagcaaatcaccaagggactggttatggtggctggggagctgaagtaccaccccgagtgtttcatctgcctcacgtgtgggacctttatcggtgacggggacacctacacgctggtggagcactccaagctgtactgcgggcactgctactaccagactgtggtgacccccgtcatcgagcagatcctgcctgactcccctggctcccacctgccccacaccgtcaccctggtgtccatcccagcctcatctcatggcaagcgtggactttcagtctccattgaccccccgcacggcccaccgggctgtggcaccgagcactcacacaccgtccgcgtccagggagtggatccgggctgcatgagcccagatgtgaagaattccatccacgtcggagaccggatcttggaaatcaatggcacgcccatccgaaatgtgcccctggacgagattgacctgctgattcaggaaaccagccgcctgctccagctgaccctcgagcatgaccctcacgatacactgggccacgggctggggcctgagaccagccccctgagctctccggcttatactcccagcggggaggcgggcagctctgcccggcagaaacctgtcttgaggagctgcagcatcgacaggtctccgggcgctggctcactgggctccccggcctcccagcgcaaggacctgggtcgctctgagtccctccgcgtagtctgccggccacaccgcatcttccggccgtcggacctcatccacggggaggtgctgggcaagggctgcttcggccaggctatcaaggtgacacaccgtgagacaggtgaggtgatggtgatgaaggagctgatccggttcgacgaggagacccagaggacgttcctcaaggaggtgaaggtcatgcgatgcctggaacaccccaacgtgctcaagttcatcggggtgctctacaaggacaagaggctcaacttcatcactgagtacatcaagggcggcacgctccggggcatcatcaagagcatggacagccagtacccatggagccagagagtgagctttgccaaggacatcgcatcagggatggcctacctccactccatgaacatcatccaccgagacctcaactcccacaactgcctggtccgcgagaacaagaatgtggtggtggctgacttcgggctggcgcgtctcatggtggacgagaagactcagcctgagggcctgcggagcctcaagaagccagaccgcaagaagcgctacaccgtggtgggcaacccctactggatggcacctgagatgatcaacggccgcagctatgatgagaaggtggatgtgttctcctttgggatcgtcctgtgcgagatcatcgggcgggtgaacgcagaccctgactacctgccccgcaccatggactttggcctcaacgtgcgaggattcctggaccgctactgccccccaaactgccccccgagcttcttccccatcaccgtgcgctgttgcgatctggaccccgagaagaggccatcctttgtgaagctggaacactggctggagaccctccgcatgcacctggccggccacctgccactgggcccacagctggagcagctggacagaggtttctgggagacctaccggcgcggcgagagcggactgcctgcccaccctgaggtccccgactgagccagggccactcagctgcccctgtccccacctctggagaatccacccccaccagattcctccgcgggaggtggccctcagctgggacagtggggacccaggcttctcctcagagccaggccctgacttgccttctcccaccccgtggaccgcttcccctgccttctctctgccgtggcccagagccggcccagctgcacacacacaccatgctctcgccctgctgtaacctctgtcttggcagggctgtcccctcttgcttctccttgcatgagctggagggcctgtgtgagttacgcccctttccacacgccgctgccccagcaaccctgttcacgctccacctgtctggtccatagctccctggaggctgggccaggaggcagcctccgaaccatgccccatataacgcttgggtgcgtgggagggcgcacatcagggcagaggccaagttccaggtgtctgtgttcccaggaaccaaatggggagtctggggcccgttttccccccagggggtgtctaggtagcaacaggtatcgaggactctccaaacccccaaagcagagagagggctgatcccatggggcggaggtccccagtggctgagcaaacagccccttctctcgctttgggtcttttttttgtttctttcttaaagccactttagtgagaagcaggtaccaagcctcagggtgaagggggtcccttgagggagcgtggagctgcggtgccctggccggcgatggggaggagccggctccggcagtgagaggataggcacagtggaccgggcaggtgtccaccagcagctcagcccctgcagtcatctcagagccccttcccgggcctctcccccaaggctccctgcccctcctcatgcccctctgtcctctgcgttttttctgtgtaatctattttttaagaagagtttgtattattttttcatacggctgcagcagcagctgccaggggcttgggattttatttttgtggcgggcgggggtgggagggccattttgtcactttgcctcagttgagcatctaggaagtattaaaactgtgaagctttctcagtgcactttgaacctggaaaacaatcccaacaggcccgtgggaccatgacttagggaggtgggacccacccacccccatccaggaaccgtgacgtccaaggaaccaaacccagacgcagaacaataaaataaattccgtactccccaccc

SEQ ID NO: 741 - DNA, 1554 bp, Artificial
  cDNA Sequence
atgctcattgctgccccatccctctgggctggaggagcaaacgcctggaggctgaaatgcaagttcttcagtctgactgagacgccagaggattacactatcattgtcgatgaggaaggattcctaggtctcaggcctgggcttctccccaagaccactctgggtctcatccaaacctgccaagagactcctagtggcagagtcttggttatgtcagcaccccctcaaggtgtacacttcaccacctcggaggctatatcagcagccgcttccgctggggaggacagagccaggattggcccctcggagcccgaagcctgcggctttgataagagacaggcctcccactgctcaagactggggccgccctttcccatttctgtgcagccgcctgcctctctagccacccactggctgaccactggtccttctcagccagcgggaccaatgggctccttgggctgtggtcaccatggtgaccggagctgggcactgccctcctcggagcacctgagtgtggcagatgccacctggctggccctgaacgtggtgtccggcggtggcagcttctccagctcccagcccatcggcgtgaccaagatcgccaagtcagtcatcgccccactggctgaccagaacatatccgtgttcatgctgtccacgtatcagacagacttcatcctggtgcgcgagcgggacctgccctttgtcacccacacattgtcatcagagttcaccatcctgcgggtcgtcaatggcgagaccgtggcagccgagaacctcggcatcaccaatggcttcgtgaagcccaagctgcagaggccagtcatccacccactgtccagcccgagcaacaggttctgtgtcaccagcctggaccctgacacgctgcctgctgttgccacactcctcatggatgtcatgttctactccaatgtgaaggaccccatggccactggggatgactgcggccacatccgcttcttctccttctccctcatcgagggctacatctccctggtgatggacgtgcagacgcagcagtttcctagtaacttgctgttcacaagcgcatccggagagctctggaagatggtccggattggaggacagcccctggggtttgagtgtggcatcgtggcccagatctcagagcccttggctgctgcagacatcccagcctactacatcagtactttcaagtttgatcatgcacttgtccccgaagagaacatcaatggtgtcatcagtgccctgaagggcctgggcccgactcccagcaagactgccaagagggccctgtccagaccctcccccacaagcactcagtccttgggggaggagggagggtcccaggagacccaccagcctggagcaccagctcctgtcccctcggctctccctggacccgacttgggcgacaggcagtgggaatcgggagatgtcacaggagcctgggccctctcttctgaagggaagctaggagcagagatctgttacaagacgctggagccgctggcaccccacatgggaactcccaccaaccagctgtag

SEQ ID NO: 742 - DNA, 4529 bp, Artificial; identical to SEQ ID NO: 540
  cDNA Sequence

SEQ ID NO: 743 - DNA, 1038 bp, Artificial
  cDNA Sequence
atggactcacccacaccccatgacccagcagctccgctcctggtgactgttctagagagtgtccagaagaagaccaaggacagaacagagactaggtttggtgagatgggacagattttgggaaagatcatgatgagccatcaaccgcagccccaggaagagcggagcccccagcggagcacctcagggtaccccctccaggaggtggtggatgatgaagtgtcgggaccatcacctggggtagatcccagccccccacgtaggtcccttggctggaaaaggaagagggaatgtttggatgaatctgatgatgagccagagaaggagctcgcccctgagcctgaggagacctgggtggcggagacgctgtgtggcctcaagatgaaggcgaagcgacggcgagtgtcgctcgtgctccctgagtactacgaggccttcaacaggctgcttggtaggaggacaccccagagagcacctccaatcctgttctttctaaagaggaaacttccaataaccacacttttccaatgggaaaaatatgccccagtggatcctgtcattaaaagactcctggcctgggacaaagatctgagggtgtcggacaagtatctcctggctatggtcatagcgtatttcagccgggccggcctcccctcctggcaataccaacgcattcatttcttcctggcttatctggccaatgacatggaggaggacgacgaggcccccaaacaaaacatcttctacttcctgtacgaggagacccgctctcatatacccttgctcagtgagctttggttccagttatgccgttacatgaacccgagggccaggaagaactgctctcagatagccttgttccggaagtatcggttccacttcttttgttccatgcgctgcagggcttgggtttccctggaggagttggaagagaacaccggacccaggggagatgtggattttcagcaggaactttattccaatgctaatggcagacatcaggaaggaggagaggaaccatttgtgcagatcatctag

SEQ ID NO: 744 - DNA, 604 bp, Artificial
  cDNA Sequence
aaaaaagtaaagaaaaacctcttgcagtatgattgcttctccttatgggaagcccatttagataacctggaagttgaacccagtgaaaacagtacttgaatttaatcagacacaggaagaatgtgtggtcaagcttgtgagaacacactatgagtgtaaacagaaaactagtaccttgagcagggaagtacatggcttttagtaacagcatgggaacttttctggttacatggaataattcagacacattaagaaaagccaagtgtacagaatcaagttatactggaggaaaacattgcttttgtaggccatcaagacaaacattttagagttagactttaacagcagagttataatcagaggaaaaaagtgacaggagctgatgaaaaagttaaaagagagagttatcacctcaatcaagattaaaggtgtactttctcaaggggagaaagagttgaaagcagtgatgtatgacatgcagtaagatgcagcaaacattaaacttctgagatataagtctgagaagctttaagaggaaaactctacctcaagaaatgaaattaccatcctaagtgaagaagacagctttactaacgtgaaacta

SEQ ID NO: 745 - DNA, 248 bp, Artificial
  cDNA Sequence
ccccaccaggcccagctcttgcctcagcatggccgcctcaggccaggctcgtgttctgcctgtgggcagcctccacgggcccggctctcgcctctggccatcctctccaggcccagaagtgtttccagccagcctctccaggcccagctctccttgccggctgcgcctgccggcccagctcctgcctcgcaacagccacgttcggcccagctcctgcccagctcctggcagcctttgtaggccccagg

SEQ ID NO: 746 - DNA, 1825 bp, Artificial
  cDNA Sequence
atggcggcctcagcaaaaaagaagaataagaaggggaagactatctccctaacagactttctggctgaggatgggggtactggtggaggaagcacctatgtttccaaaccagtcagctgggctgatgaaacggatgacctggaaggagatgtttctacaacttggcacagtaacgatgacgatgtgtacagggcgcctccaattgaccgttccatccttcccactgctccacgggctgctcgggaacccaatatcgaccggagccgtcttcccaaatcgccaccctacactgcttttctaggaaacctaccctatgatgttacagaagagtcaattaaggaattctttcgaggattaaatatcagtgcagtgcgtttaccacgtgaacccagcaatccagagaggctgaaaggttttggttatgctgaatttgaggacctggattccctgctcagtgccctgagtctcaatgaagagtctctaagtaacaggagaattcgagtggacgttgctgatcaagcactggataaagacagggatgatcctccttttggccgtgatagaaatcgggattctgacaaaacagatacagactggagggctcgtcctgctacagacacctttgatgactacccacctagaagaggtgatgatagctttggagacaagtatcgagatcgttatgattcagaccggtatcgggatgggtatcgggatggcccacgccgggatatggatcgatatggtggccgggatcgctatgatgaccgaggcagcagagactatgatagaggctatgattcccggataggcagtggcagaagagcatttggcagtgggtatcgcagggatgatgactacagagaaggcagggactgctatgaagaccaatatgacagacgggatgatcggtcgtggagctccagagatgattactctcgggatgattataggcgtgatgatagaggtccccccccccccaaagacccaaactgaatctaaagcctcggagtactcctaaggaagatgattcctctgctagtaactcccagtccactcgagctgcttctatctttggaggggcaaagcctgttgacacagctgctagagaaagagaagtagaagaacggctacgaaggaacaagagaagttgcagcgtcagctggatgggccaaaactagaacgacggcctcgggagagacacccaagctggcaaagtgaagaaactcaggaacgggaacggtcgaggacaggaagtgagtcatcacagactgggacctccaccacatctggcagaaatgcatgaaggagagagagtgagaagtctctagaaaatgaaacactcaataaggaggaagattgccactctccaacttctaaacctcccaaacctgatcagcccctaaaggtaatgccagcccctccaccaaaggagaatgcttgggtgaagcgaagttctaaccctcctgctcgatctcagagctcagacacagagcagcaatcccctacaagtggtgggggaaaagtagctccagctcaaccatctgaggaaggaccaggaaggaaagatgaaaataaagtagatgggatgaatgtcccaaaaggccaaactgggaactctagccgtggtccaggagactgagggaacagagaccactggaaggagtcagataggaaagatggcaaaaaggatcaagactccagatctgcacctgagccaaagaaacctgaggaaaatccagcttccaagttcagttctgcaagcaagtatgctgctctctctgttgatggtgaagatgaaaatgagggagaagattatgccaaa

SEQ ID NO: 747 - DNA, 458 bp, Artificial
  cDNA Sequence
aaactgaagctacagagtggagagataacaaaagaagagaagcagccctgcatcagcgcagtccatcccacgcagcatccctcatccttcccctaggcagaggcccagaggctgtttcacctctgattcttccacagccttacctggcccaaatcctagcaccatggattctgaaagtaacgataagaacagaaattcatcagataaatggagcccctttgaatcaagatccctccaggagtatgattcaggaagttttgccacccaggcctactgaggagcccaaagccctctccaatggaatggatctgtgtccaagccactcaaatggctgaagacccatcatgaccctgaagctgcccaagatggacagcccagttatggaagggaggaaacagctgccatggacccataatctcaaaccctgtggtttgaatatgctcactctcactggcttc

SEQ ID NO: 748 - DNA, 153 bp, Artificial
  cDNA Sequence
atggtgaggcatttggctaccttgaaagtcatctttactccctgttaccctcactttattgaatttctttactttgactttcagagctctgggcagaaatcacatattagtttggaggactttgttattttattcaagttaaagtatagggtt

SEQ ID NO: 749 - DNA, 1758 bp, Artificial
  cDNA Sequence
ctttatatacagaatatttcttccccagaaagttctccagaaataaagagacgcacttatagtcaagagggatatgacagatcttcaaccatgttaacattggggccttttagaaattctaatttaactgaactgggtctgcaagaaataaagactattggttatacgagccctaggagtaggactgaagtcaacaggcagtgtcctggagaaaaggaacctgtgtcagaccttcagctaggactcgatgcagttgagccaactgccctacataaaaccctggaaacgcctgcacatgacagggctgagcccaacagccaactggactcgactcactctggacggggcacaatgtattcttcctgggtaaagagccctgacagaacaggagttaacttctcagtgaactccaacttgagggacctgacaccctcgcatcagttggaggttggaggaggcttccgaataagtgagtcaaagtgcctgatgcaggatgatactagaggcatgtttatggaaacaactgtgttttgtacttccgaagatgggcttgtatctggtttcggacggactgttaatgacaatttgatcgacgggaattgcacaccccagaatccaccacaaaagaaaaaggtttctctattagaataccgtaagagacaacgtgaagctaggaaaagtggctctaagacagagaactttccactcattagtgtatcaccccatgcaagtggaagcttgagcaacaatggtgatggctgtgccagcagtaatgacaatggggagcaggtggaccacactgctagcctacctttaccaacaccagctacagtttataatgccacttctgaagaaactagcaataactgccctgttaaggatgctactgctagtgagaagaatgaaccagaagttcaatggactgcctcaacttcagtggaacaagtcagagaaaggagttatcagagagctttacttctcagtgatcaccgaaaagataaagatagtgggggagaatcaccatgtgtctcatgttcaccgagtcatgttcagtcttcaccttcatctcattcaaatcacataccccagttgcaagctaagggcccagtcccttctttcagtgaacttatggaagaccctgatcctgaaaatccagaacccacaactacgaatgaatgtccatccccagatacttctcaaaatacttgtaaaagtcctccaaaaatgagcaagcctggttcacctggatctgtaattcctgctcaagcacacgggaaaatattcacaaaaccagatccccaatgggactccacagttagtgcatccgaagctgaaaatggtgttcacctaaaaacagagctccaacaaaaacagctatcaaataacaaccaagcactttcaaagaatcatcctcctcagacacacgttcgtaattcatctgagcaactttcacaaaagctgccttctgtgccaacaaagttgcactgtcctccatcacctcacctagaaaatcctccaaagtcatccacgcctcacacacctgtacagcatggttatctttcaccaaagcctccttcacagcagttaggatctccctacaggcctcatcattcacagtcacctcaagttggaacacctcagcgagagcctcaaagaaacttttatccagcagcacagaaccttccagccaatactcagcaggcaacttctggaacattatttacacagacaccctcaggacaatcttcagcaacatac

SEQ ID NO: 750 - DNA, 323 bp, Artificial
  cDNA Sequence
gaattcgcctgcatctactccaccctcattcttcactatgaacgaggtgaccgtcacagaggataaatcaaggccctaattaaagtaggtggtgtaaatgttgaaccttttcggcctggtttgttggcaaaggccctggcctatggtgacatcgagagactcatcctaatgtaggggttggtggacctgctccagcagctgctgctgcatcaacagtaggtcctgccctgtccagagcagctgctccagctgaggagaaggaagtgaaaaacaaagaagaatctgaggagtgtgatgatggcatgggctttggtctttttgac

SEQ ID NO: 751 - DNA, 225 bp, Artificial
  cDNA Sequence
tcagttgcccgacatgtgagtgccattccttggggcatttctgcaacggcagccctcaggcctgctgcgtctagaagaacaagcttgacaaacatattgtggtctggttctggtcaagcaaaattctttagcaccagttcctcacaccatgcacctgctgtcacccagcatgcgccctattttaagggtatagccgttgtcaatgaagagttcaaagacctaagc

SEQ ID NO: 752 - DNA, 313 bp, Artificial
  cDNA Sequence
gctctgcgctaccctatggccgtgggcctcaacaagggccaaaaggtgaccaagaacgtgagcgagcccaggcacagccgccgccgcgggcgtctgaccaaacacaccaagtttgtgcgggacatgatcccggaggcatgtggcttcgccccgtacaagcagcacgccaaggagttactgaaaggtctccaaagacaaacgggtcctcaagttcatcaagaaaagggtgtgggcgcacatccgcgccaagaggaagcgggaggagcaaagcaacgtcctggccgccatgaggaaagccgctgccaagaaagac

SEQ ID NO: 753 - DNA, 562 bp, Artificial
  cDNA Sequence
agtgccaacgaggaccaggagatggaactagaagcattacgctctatttatgaaggagatgaaagtttccgggaattaagttcagtttcttttcaatataggataggtgaaaatggtgatcccaaagccttcttaatagagatttcctggacagaaacatatccccaaacacctccaattctatctatgaacgctttttttttaacaacaccgtatcatcagctgtaaagcagagtatattagccaagttacaggaagcagtagaagctaatcttggaaccgctatgacctgtacattgtttgaatatgccaaagacaataagagcagttcatggagaatcacaatcccattaattccacaacatcgataagcaatatcatctcaattgaaactcctaatacagccccatcaagtaagaaaaaagacaaaaaagaataactttcaaaagcccagaagcgtaagctggcagacaaaacagatcacaaaggagaacttcctcgaggctggaactgggttgatgttgtgaagcatttaagcaaaactggctctaaggatgatgag

SEQ ID NO: 754 - DNA, 276 bp, Artificial
  cDNA Sequence
gtgtggcttgtgctttggatcgtaatgcttacctatgctacttaagttacataccctgtggcctttgtggccaggactgtgggctactacctggagtgattcgttaggggaaaggacccacagcctgtgcaggaggaaaaaagcatctctgagtacagggtggatgagctggatgagctgccgggcaagagccacgcacacccaggtggtgagtcttaaggataaggtggaatttgccccatagctgtcctggacagaaactgcccagagaagaat

SEQ ID NO: 755 - DNA, 286 bp, Artificial
  cDNA Sequence
ctgacctcgtgctgtctgtggtctaggcaccaggcaagtattcggggtgcccttggaaagccccagggtgtgacagccagggtttatgttggccaggtcattgtgtctatccgtactaagagcagaaccatgagggtgtgattgaggccatatgcagggccaagtctaagttccctggctgccagaagatccacagcacaaagcagcgggccttgaccaagttcaatgtggaagaaatcgatcccacgtggtggctgagaagcagctcatctggcatggctgtggg

SEQ ID NO: 756 - DNA, 312 bp, Artificial
  cDNA Sequence
atgacgacactaaacatgaaattggaaaacgacatgtatgattggctctcacaagctggtatcagcccacttcagctcaccactgtttttaactgtgcaccgaacgttttgcttgggatgcacttatttggccattacccagcacatgacgacttctatctcgtagtgtgcagtgcctgtaaccaggtcgtcaagccacaggttttccagtcgcactgctgttttaggagctgtagtccttctgctgaaatccgcagtcctgtcagaacaaatgagagaaaacctgcaacttgtctcggtcgatgggactag

SEQ ID NO: 757 - DNA, 1718 bp, Artificial
  cDNA Sequence
aacatggggctgtacgctgcggtggcaggcgtgctggccggcgtggagagccgccagggctctatcaaggggctggtgtactccagcaacttccagaacgtgaagcagctgtacgcgctggtgtgcgaaacgcagcgctactccgccgtgctggatgccgtgatctccagcgccggcctcctcagtgcgaagaagctgcagccgcacctggccaagggtgctagtgtatgagttgttgggaaagggctttcgagggggtgggggccaatggaaggctctgttgggacggcaccaggcgaggtgttgagttggctcggctcaaggttcttcggggtgtgagctggcatgaggacctgttggaagtgggatccaggcctggtccagcctcccagctgcctcgatttgtgcgtgtgaacactctcaagacctgctccgtttatgtagttatttcaagagacaaggtttctcctatcagggtcgggcttccaggctggatggagtgccctggcgcgatcttggctcaccgcaacctctgcctcctgggttcaagcgattctcctgcttcagccttctgagcagctgggattatgaaggggtggcctgcccctccacatctgtgggatatctcatcagcctcgatgacttacgagccctcaaggggaagcattttctcctggaccccttgatgccggagctgctggtgtttcccgcccagacagatctgcatgaacacccactgtaccgggccggacacctcattctgcaggacagggccagctgtctcccagccatgctgctggacccccgccaggctcccatgtcatggatgcctgtgccaccccaggcaataaagaccagtcacttggctgctcttctgaagaaccaagggaagatctttgcctttgacctggatgccaggcggctggcatccatggccacgctgctggcctgggctggcgtctcctgctgtgagctggctgaggaggacttcctggcggtctcccccttagatccgcgctatcgtgaggtccactatgtcctgctggatccttcctgcagtggctcgggtatgccgagcagacagctggaggagcccggggcagggacacctagcccggtgcgtctgcatgccctggcagggttccagcagcgagccctgtgccacgcgctcactttcccttccctgcagcggctcgtctactccatgtgctccctctgccaggaggagaatgaagacatggtacaagatgcgctgcagcagaacccgggcgccttcaggctagctcccgccctgcctgcccggccccaccgaggcctgagcacgttcccgggtgccgagcactgcctccgggcttcccccaagaccacgcttagcggtggcttcttcgttgctgtaattgaacgggtcgagatgccgacctcagcctcacaggccaaagcatcagcaccagaacgcacacccagcccagccccaaagagaaagaagagagcaaaaagctgcagccggtgcttgcacaccgccttgcacatagcagaggctccgggctcactccttcctggtgggaaaggaagatgcctgtcctctccgtggaagaccctgggccctcaccgcaggcagcagtttgcgttttgaaaggttattgggtcccttcctcgggctgtgttcttgctggtgagcaaaagtgttgcctgcagaaataaaatgcagaacgtactct

SEQ ID NO: 758 - DNA, 1604 bp, Artificial
  cDNA Sequence
taaaggcgcgcgggaacatggggctgtatgctgcagctgcaggcgtgttggccggcgtggagagccgccagggctctatcaaggggttggtgtactccagcaacttccagaacgtgaagcagctgtacgcgctggtgtgcgaaacgcagcgctactccgccgtgctggatgctgtgatcgccagcgccggcctcctccgtgcggagaagaagctgcggccgcacctggccaaggtgctagtgtatgagttgttgttgggaaagggctttcgagggggtgggggccgatggaaggctctgttgggccggcaccaggcgaggctcaaggctgagttggctcggctcaaggttcatcggggtgtgagccggaatgaggacctgttggaagtgggatccaggcctggtccagcctcccagctgcctcgatttgtgcgtgtgaacactctcaagacctgctccgatgatgtagttgattatttcaagagacaaggtttctcctatcagggtcgggcttccagcctcgatgacttacgagccctcaaggggaagcattttctcctggaccccttgatgccggagctgctggtgtttcccgcccagacagatctgcatgaacacccactgtaccgggccggacacctcattctgcaggacagggccagctgtctcccagccatgctgctggaccccccgccaggctcccatgtcatcgatgcctgtgccgccccaggcaataagaccagtcacttggctgctcttctgaagaaccaagggaagatctttgcctttgacctggatgccaagcggctggcatccatggccacgctgctggcccgggctggcgtctcttgctgtgaactggctgaggaggacttcctggcggtctccccctcggatccacgctaccatgaggtccactacatcctgctggatccttcctgcagtggctcgggtatgccgagcagacagctggaggagcccggggcaggcacacctagcccggtgcgtctgcatgccctggcagggttccagcagcgagccctgtgccacgcgctcactttcccttccctgcagcggctcgtctactccacgtgctccctctgccaggaggagaatgaagacgtggtgcgagatgcgctgcagcagaacccgggcgccttcaggctagctcccgccctgcctgcctggccccaccgaggcctgagcacgttcccgggtgccgagcactgcctccgggcctcccctgagaccacactcagcagtggcttcttcgttgctgtaattgaacgggtcgaggtgccaagctcagcctcacaggccaaagcatcagcaccagaacgcacacccagcccagccccaaagagaaagaagagacagcaaagagccgcagccggtgcttgcacaccgccttgcacatagcagaggctccgggctgactccttcctggtgggaaaggaagatgcctgtcctctccgtggaggaccctgggccctcaccgcaggaagcagtttgggttttgaaaggttattgggtcccttccttgggctgtgttcttgctggtgagcaaagtgttgcctgcaaaaataaaatgcagaacgtactcta

SEQ ID NO: 759 - DNA, 1173 bp, Artificial
  cDNA Sequence
atggacagaacggagactaggttccgtaagaggggacagattacgggaaagatcacgaccagccgtcaaccgcacccccagaatgagcagagtccccagcggagcacctcggggtaccccctccaggaggtggtggatgatgaaatgttgggaccatcagcccctggggtagatcccagccccccatgtaggtcccttggctggaaaaggaagagggagtggtcagatgaatctgaggaggagccggagaaggagctcgcccctgagcctgaggagacctgggtagtggagatgctgtgtgggctcaagatgaagctgaagcaacagcgagtgtcatccatcctccctgagcaccacaaggacttcaacagtcagcttgcccctggggtagatcccagccccccgcataggtccttttgctggaaaaggaagatggagtggtgggacgaatctgaggagtcgttggaggaggagccacggaaggtgctcgcccctgagcctgaggagatctgggtggcggagatgctgtgtggcctcaagatgaagctgaagcgacggcgagtgtcgctcgtgctccctgagcaccacgaggccttcaacaggctgcttgctgacctcagccggaggcctctcctggtggtgcccctgagcagcaacctgatttctgtcctcagctacctggccaatgacatggaggaggacgacgaggactccaaacaaaacatcttccacttcctgtataggaagaaccgctctcgcatacccttgctccgtaagccttggttccagttaggccattccatgaacccgagggccaggaagaaccgctctcgcatacccttgctccgtaagcgtcggttccagttataccgttccacgaacccgagggccaggaagaaccgctctcgcatacccttgctccgtaagcgtcggttccagttataccgttccatgaactcgagggccaggaagaaccgctctcagatagtcctgttccagaaacgacggttccacttcttctgttccatgagctgcagggcttgggtttccccagaggagttggaggagaacaccggacccaggggagatgtggattttcagcgggaactttattccaatgctaatggcagacaccaggcaggaggagaggaaccatttgtgcagatcatctag

SEQ ID NO: 760 - DNA, 759 bp, Artificial
  cDNA Sequence
atggggagtacatttagagtgggaactgcactcactcaattagaaaatttaaatgccatgggaataattggatcccaaggtggcagtgtccaagtagtggcactcaactgtcaaaggcaaacagtagaggcttatggaggtcaggtaattaatgaagttttagctcaggtccaacttacagtgggtccatttggtccccggactcattctgtgatgatttccccagggccagaatgcataattggcacaggcatacttagcagctggcagaatccccacattggctgcctgacaataaagtgggttgtacacagcagcattccatcatctaatggaagtggcacaaacgtaattgggcttaagcaggtccagaaggcacaagtttttaacttctttgccatgggttcaaacttcctctttagctcggagaaatttgatcatctgaagccttcttctctcaactcgtcaaagtcattctccatccagctttgttccgttgctgcctgccttgtgcttggctgtatgattttccctgatggctgggactcagatgaagtaaaacggatgtgtggagaaaagacagacaagtacactcttggggcttgctcagtccgctgggcatacatcctggctattattggaattttggatgccctgatcctctcatttctagcatttgtgcttggtaatcgacaagacagcttgatggcagaggaactgaaggcagaaaacaaattgccatcagaacttaatggctaa

SEQ ID NO: 761 - DNA, 240 bp, Artificial
  cDNA Sequence
gcagccctcccacttcactctctctgtctctcctgctccaacatggccagacgtgcctgcttccccttcgccttctgccgtgattgtcagtttcctgaggcctccccagccacgcttcctgtacagcctgcagaactgactcctagaaggaccccacccccctccccccacccctgctcctaggaggacaacgtgatcactgtattcagctccatcaagaatggtccaggttcttctaga

SEQ ID NO: 762 - DNA, 888 bp, Artificial
  cDNA Sequence
ctagattgtcccagcctgccctgtgcttcattagccggtcaacagatccatctcaaatacctcccatgggtactcactgattgctttaacccaaaccatggcactcttgaagactttccctcaggaagctcaaggactatgcatccttctgggtcagaactggacacacagccaccagtgctggacaatggcggcggctcagggacacactggagccctggcccctgcagagctcccagcatggttgggaagagagatgcaaaatgaccacacggcgggtgaggaggagctccctcggtgcggctgggatgagccctagacactctcaatcacccccacgatgaccccttcccagaggtcccctcagtcatctgccctgaaccaagctcttcctgatcctagaccctccaccctccctctatcttccagggcttggtgacattccaggcagaaatttctgacccttttactttggtccctccctccccagcccagtctctggtcaaactggattcctggctgttcccagaacgagctgcctttccccaccttgccacctctgcccttgttctctctgcctgaatgtcctccttcactagcctcgctgccttgcacatctctcctgagggctgtcatcccagaatgagctgcatttgtccagcctggcccaccgtctaccagaacgtcctccttcagcctgtcccactgccttgcaaaacttttctgggggacctgttcacgatgccttctgtagcatactccaagaatccggcgccccctggagttgtgccacacagcacccctttgcagtcaagctccctcagcaccaccacctccaccctggaagagttccccttccctttgaaatctcatgggactttgcaccca

SEQ ID NO: 763 - DNA, 1163 bp, Artificial
  cDNA Sequence
gtcaggtggcgtttgctgtggcggctaggcccgcgtgcgctggagacctccgcgctggcccccgcgagcctcctgccctggcccggcgctgcggctctgccgcggcggcagcatgggtggcccccggggcgcgggctgggtggcggcgggcctgctgctcggcgcgggcgcctgctactgcatttacaggctgacccggggtcggcggcggggcgaccgcgagctcgggatacgctcttcgaagtccgcagaagacttaactgatggttcatatgatgatgttctaaatgctgaacaacttcagaaactcctttacctgctggagtcaacggaggatcctgtaattattgaaagagctttgattactttgggtaacaatgcagccttttcagttaaccaagctattattcgtgaattgggtggtattccaattgttgcaaacaaaatcaaccattccaaccagagtattaaagagaaagctttaaatgcactaaataacctgagtgtgaatgttgaaaatcaaatcaagataaagatatacatcagtcaagtatgtgaggatgtcttctctggtcctctgaactctgctgtgcagctggctggactgacattgttgacaaacatgactgttaccaatgaccaccagcacatgcttcacagttacattacagacctgttccaggtgttacttactggaaatggaaacacgaaggtgcaagttttgaaactgcttttgaatttgtctgaaaatccagccatgacagaaggacttctccgtgcccaagtggattcatcattcctttccctttatgacagccacgtagcaaaggagattcttcttcgagtacttacgctatttcagaatataaagaactgcctcaaaatagaaggccatttagctgtgcagcctactttcactgaaggttcattgtttttcctgttacatggagaagaatgtgcccagaaaataagagctttagttgatcaccatgatgcagaggtgaaggaaaaggttgtaacaataatacccaaaatctgattggtcatatttttccaaagagtaatgcagtctggatataaacgtattttctgtcttccttataaggggattctcccagctgctaaatttaaacagtaaatatcacattttgtcattaacacag

SEQ ID NO: 764 - DNA, 240 bp, Artificial; identical to SEQ ID NO: 761
  cDNA Sequence

SEQ ID NO: 765 - DNA, 1653 bp, Artificial
  cDNA Sequence
aaacgcaaggcttgaattttctcggggccttatgatgctggttcttgagaagttagccactgatattccttgtctgctatatgatgacaatctcttctgtcatttggtggatgaagtactcttgtttgaaagggagctacacagtgttcatggctatcctggcacttttgctagttgtatgcatattctatcagaggaaacctgttttcagagatggttgacggtggagagaaaatttgctcttcaaaaaatggactcaatgctttcctcagaagctgcctgggtatcgcaatataaggatatcactgacgtggatgaaatgaaagttccagattgtgcagaaacttttatgactctactcttggttataactgacaggtataaaaatcttcccacagcttcccgaaagcttcagttcctggagttacagaaggacttagtagatgattttaggatacgattaacacaagtgatgaaagaagagactagagcttcccttggctttcgatactgtgcaattcttaatgctgtgaactacatctcaacagtactagcagattgggctgacaatgttttctttctacaacttcaacaggctgcactggaggtgtttgcagagaataatactctgagtaaattgcagctaggacagctagcctctatggagagctctgtctttgatgacatgattaacctcttagaacgtttaaagcatgatatgttgacccgtcaagtagaccacgtttttagagaagttaaagatgctgcaaaattgtataaaaaagaaagatggttgtccttgccatctcagtcagagcaggcagtgatgtccctgtccagttcggcttgcccgttgctgctgacgttacgagaccatttacttcagttggagcagcagctttgtttctccttatttaaaattttctggcaaatgcttgtagagaagctggatgtatacatctaccaagaaataattcttgctaatcacttcaatgaaggaggagcagcccagctgcagtttgatatgactcggaatcttttccctttgttttctcactattgcaagagaccagaaaattattttaaacatataaaagaagcctgtattgttttgaatttgaacgtcggttctgcactactgctgaaagatgtactgcagtcagcttcagggcagcttcctgccacagcagcattaaatgaagttggaatttacaaactggctcaacaagatgttgagattctacttaatttgaggacaaattggcctaatactggaaaataatgtctttcagaaaaaggtttctttggtttttgtttctaagaaagaggaagccaattggatttcaagttatatgatgaaattctgaattaatgaaactggaaaactttatagaattacttattatcttggatttatggtgttattaaaatgctgaccatatttccttcatcctcttgttcctaaggaaacaaaaacagaaaacgaaacaatgaaaactcaattctatttacaagtataaatgctgagtatgtctgttgaagacgagcagagatattaaattataaccaactttcaatttcctgtgctaattaagggaaattctgttgtggataatcaaacatagccaataaatttttttaaaactccctttg

SEQ ID NO: 766 - DNA, 1089 bp, Artificial
  cDNA Sequence
gctggggtgagcagcactgtaaagatgaagctggctaactggtactggctgagctcagctgttcttgccacttacggttttttggttgtggcaaacaatgaaacagaggaaattaaagatgaaagagcaaaggatgtctgcccagtgagactagaaagcagagggaaatgcgaagaggcaggggagtgcccctaccaggtaagcctgccccccttgactattcagctcccgaagcaattcagcaggatcgaggaggtgttcaaagaagtccaaaacctcaaggaaatcgtaaatagtctaaagaaatcttgccaagactgcaagctgcaggctgatgacaacggagacccaggcagaaacggactgttgttacccagtacaggagccccgggagaggttggtgataacagagttagagaattagagagtgaggttaacaagctgtcctctgagctaaaattcatcttctgaccaagagtaaggaaatgattctgagaatagatcttgaagactttaatggtgtcgaactatatgccttgtatgatcagttttatgtggctaatgagtttctcaaatatcgtttacacgttggtaactataatggcacagctggagatgcattacgtttcaacaaacattacaaccacgatctgaagtttttcaccactccagataaagacaatgatcgatatccttctgggaactgtgggctgtactacagttcaggctggtggtttgatgcatgtctttctgcaaacttaaatggcaaatattatcaccaaaaatacagaggtgtccgtaatgggattttctggggtacctggcctggtgtaagtgaggcacaccctggtggctacaagtcctccttcaaagaggctaagatgatgatcagacccaagcactttaagccataaatcactctgttcattcctccaggtattcgttatctaatagggcaattaattccttcagcactttagaatatgccttgtttcatatttttcatagctaaaaaatgatgtctgacggctaggttcttatgctacacagcatttgaaataaagctgaaaaacaatgcattttaaagga

SEQ ID NO: 767 - DNA, 1668 bp, Artificial
  cDNA Sequence
atggcttataccagcaaagagctcggttttcagaagcaggcagaaccagcaagtcccaaggttggaagcactccaaagacctccgccagctgcagccctgcccctgagtccccgatgagttccagtgagtcggtgaagagcctgaccgagctggtccagcagccctgtccccccatcgaggcgagcaaggacagcaagccaccagagcccagtgacccgccagcatccgactcccagcccacaaccccgctgcctctctccggacactcggccctcagcatccaagaattagtagccatgtccccggagctggacacctacggcataaccaagcgggtgaaggaggtgctgacggacaacaacctccagcgcttatttggggagaccatcttagggctcacccaaggctctgtctctgacctccttgcccgccccaaaccctggcataagctcagtctgaaaggacgagagcccttcgtccggatgcagctgtggctgaacgaccccaacaatgtggagaagctgatggacatgaaacggatggagaagaaagtagggaccagccccacagggtctgtgggtctctccccgtgtgtggagacgagagagtatagaaataaagacacaagacaaagagataaaaggcagctgggcccggggaaccactaccaccaagttgtggagactggtagtggccccaaatgccaggctgcactgatatttattggatacaagacaaaggggcaggataaggagagtgaaccatctccaatcatatacatgaagcggcggcacagctcagtcagtgacagccagccctgcgaaccgccctctgtcggcaccgagtacagccagggcgccagcccccagccccagcaccagctgaagaaaccccgggtggtgctggctccggaggagaaggaggcgctgaaacgagcgtatcagcaaaagccatacccgtcaccaaaaaccatcgaagacctcgccacccagctcaacctgaaaaccagcaccgtcatcaactggttccacaactactctcggatccgcagagaactgttcattgaggaaattcaggccgggagtcagggccaggcgggcgccagcgactcaccctcggcccgcagcggccgggcggcgcccagctcggagggcgacagctgcgacggcgtggaggccactgagggcccaggcagcgccgacaccgaggagcccaagtctcagggagaggccgagcgggaggaggtgccgcggccggcggagcagacggagccgccgccctcggggaccccgggcccggacgacgcccgcgacgacgaccacgagggaggccccgtggaaggcccggggcccctgcccagccccgcctccgcgaccgccaccgccgcgcccgcggcccccgaggacgccgctacctcagccgccgccgcgccgggggagggccccgcggccccgagctccgcgccgccgcccagcaacagcagcagcagcagcgccccccgcaggcccagctcgctgcagagccttttcggcctccccgaggccgcgggcgcccgggactcgcgcgacaaccccctgcgcaagaagaaggccgcgaacttgaacagcatcatccaccgcctggagaaggccgccagccgggaggaacctatcgaatgggagttctga

SEQ ID NO: 768 - DNA, 1703 bp, Artificial
  cDNA Sequence
agtaggaatagaataggagtggaagagggcctaggacagagtcttaaataatactggcctttagggttggggaggtatcagccaataaaagacaagaaggaatttccagttatgcaggaaaaaaaaaatgaggatgaggctcataaaagctaagggaagagagtagaccgggacagaggagtcaagtaagatgagaactaaaatgccgttgaatttagcaccatgaaggtcattagtgacgttagtgagagctgttctagtggagcatttgagatggaagcttactttggaattgactgaaaagtaaatggggattgagggaagaaatgcagcagtatggaggcaaaagatatgcacatttgatcacttacaaaatatgattacagaccaactaaaaacctaggagattccagaaactggaatgtacttcaacacaaattcttgggatacagataaatgtcattcacttattcaccaaacatttatgaagcactcggttccaggtcttgtgctaaagaaacatgtcagtctgatggcttttcttgtgtagccacagtgattggagatgtctttggctttgcactttagctgctagttgttctatttaaacgtctaggtaagtaaataggttaaagtgctctcctgtgtaggacccttcctagtgtggttctgtcttcaaagactatgattctcacctagagcagatgaggtgaacattcttcttattcccattcccattctggaatcctttttgcctctagattaatgggaatccaacatcagtgaagtgccctttgctgctgctgccagccattctgactccagagccggtgaataggtgctgcttccatcactaggtggaataacaggagcatgtgctgccaatcagcatggttgcctagcaacaggaggagatgctattcattgtctatcagtgtgggggcacaatatattttagtttaaggtgcttgatgaacacaatgattacatggaccctccatgtcagccttggaagttgtgattctgaggctgggaagctggactatctttggaagctaaatttggaagtgaaagggggatgtaggatatgatcatctggctacatagataagtattgaaaaataggatttgggtttctggctatggcttaagctgtaagaataatgggctcctggcaaaggataaagtgtatcatgaaacaagaaataatgtgtctggcaggcatgcaattctcattgaatatgaggaagtgggagacaaatgcctagataatctgaaaaacaaaaaagagattttacagaggacaccaggtataaagtagaaacaaccacagtgggaaagatacacagagtgaatatcaaattttaatacaagacagtactctgtctcctagatcttattgagatttggaagtgtcatgcaacatgggtcactttgtggtcaccaactgtcctaaaaagatttgggacaaattccacagtgtcatggtatggatgaaaaaataggcactattgagaacacttaaagaacaagaaccgaagatttttggctgtttctcatcatctcatggaaaggtgggcagggatcagggtgccacagaacccttcgtgtgtatctgtgttttagcgaaggaaccctctgctcccctgtggttctctctatttattgagaaagtggaaaacaacaacaacaaaaacaaaaca

SEQ ID NO: 769 - DNA, 1280 bp, Artificial
  cDNA Sequence
gaggagcctcgggtgggccggggttgctgcgccgtcctccactactggctactggcgctgcagccatgcagcccccgcccccgggcccgctgggcgactgcctgcgggactgggaggatctacagcaggacttccagaacatccaggagacccatcggctctaccgcctgaagctggaggagctgaccaaactttagaacaattgcaccagctccatcacgcggcagaagaagcggctccaggagctggccctcgccctgaagaaatgcaaaccctccctcccagcagaggccgagggggccgcacaggagctggagaaccagatgaaagagcgccaaggcctcttctttgacatggaggcctatttgcctaagaagaatggattgtacctgagcctggttctggggaacgtcaacgtcacgctcctgagcaagcaggctaagtttgcctacaaggacgagtatgagaagttcaagctctacctcaccatcatcctcatcctcatctccttcacttgccgcttcctgctcaactccagggtgacagatgctgccttcaacttcctgctggtctggtactactgcaccctgaccatccgggagagcatcctcatcaacaacggctcccggatcaaaggctggtgggtgttccatcactacgtgtccaccttcctgtcgggagtcatgctgacgtggcccgacggtctcatgtaccagaaattccggaaccaattcctctccttttccatgtaccagagcttcgtgcagtttctccagtactactaccagagcggctgcctctaccgcctgcgggcgctgggcgagcggcacaccatggacctcactgtggagggcttccagtcctggatgtggcggggcctcaccttcctgctgccttttcttttctttggacacttctggcagctttttaacgcgctgacgttgttcaacctggcccaggaccctcagtgcaaggagtggcaggtgcttatgtgcggctttcccttcctcctccttttcctcggcaatttcttcaccaccctgagggttgtgcaccacaagtttcacagtcagcggcacgggagcaagaaggattgaggctgggccttcccctgccggcccagaggggcttctgtcctgtgtgttgtgggaggggatgggaggcgcccctcgagtgtgcgtgtatcagggggtctcttctattctcccttgggttttatgggcgctgtgggccctgaaggaagacctgggcccagtgccctcaataaagagaggcccaga

SEQ ID NO: 770 - DNA, 726 bp, Artificial
  cDNA Sequence
atgctgtgtggcctcaagatgaagctgaagcgacggcgagtgtcgctcgtgctccctgagcaccacgaggccttcaacaggctgcttgatcctgtcattaaaagattcttggcctgggacaaagatctgagggtgtcggacaagtatctcctggctatggtcatagcgtatttcagccgggccggcttcccctcctggcaataccaacgcattcatttcttcctggcttacctggccaatgacatggaggaggacgacgaggactccaaacaaaacatcttccacttcctgtataggaagaaccgctctcgcatacccttgctccgtaagcgttggttccagttaggccattccatgaacccgagggccaggaagaaccgctctcgcatacccttgctccgtaagcgtcggttccagttataccgttccacgaacccgagggccaggaagaaccgctctcgcatacccttgctccgtaagcgtcggttccagttataccgttccatgaactcgagggccaggaagaaccgctctcagatagtcctgttccagaaacgacggttccacttcttctgttccatgagctgcagggcttgggtttccccagaggagttggaggagaacaccggacccaggggagatgtggattttcagcaggaactttattccaatgctaatggcagacaccaggcaggaggagaggaaccatttgtgcagatcatctag

SEQ ID NO: 771 - DNA, 1305 bp, Artificial
  cDNA Sequence
atggcacttgtgtatgtcgtaatgggaactggcatttcagctgggtttaacttgaaagaatcatacaatgtggatgtcgttggaacacttcctctactgctacctccagccaatccggacaccagcctcttccaccttgtgtacgtagatgccattgccatagccatcgttggattttcagtgaccatctccatggccaagaccttagcaaataaacatggctaccaggttgacggcaatcagaccttttcaatttcatgctccttgtctcgaagccttgttcaggagggaaccggtgggaagacacagcttgcaggttgtttggcctcattaatgattctgctggtcatattagcaactggattcctctttgaatcattgccccaggctgtgctgtcggccattgtgattgtcaacctgaagggaatgtttatgcagttctcagatctcccctttttctggagaaccagcaaaatagagctgaccatctggcttaccacttttgtgtcctccttgttcctgggattggactatggtttgatcactgctgtgatcattgctctgctgactgtgatttacagaacacagccaagctacaaagtccttggaaagcttcctgaaactgatgtgtatattgatatagacgcatatgaggaggtgaaagaaattcctggaataaaaatatttcaaataaatgcaccaatttactatgcaaatagcgacttgtatagcaatgcattaaaacgaaagactggagtgaacccagcagtcatcatgggagcaaggagaaaggccatgcggaagtacgctaaggaagtcggaaatgcaaatatggccaacgcaactgttgtcaaagcagatgcagaagtagatggagaggatgctaccaagcctgaagaagaggatggtgaagtaaaatatcccccaatagtgatcaaaagcacatttcctgaggaaatgcaaagatttatgcccccaggggataacgtccacactgtcattttggatttcactcaagtcaattttattgattctgttggagtgaaaactctggcagggattgtaaaagaatatggagacgtcggtatatatgtatacttagcaggatgcagtcaagttgtgaatgacctcactcggaatagattttttgaaaatcctgccctatgggagctgctgttccacagcattcatgatgcagttttaggcagccaacttagagaggcacttgctgaacaggaagcctcggctcccccttcccaggaggacttggagcccaatgccactcctgccactcctgaggcatag

SEQ ID NO: 772 - DNA, 311 bp, Artificial
  cDNA Sequence
cttggactcactgaggcagtaaaagaaccatatcctgtgtttgaatcaaatcccaagttcctgtacgtagaaggtttgccagacaggattccctttcgaagccctcctggtttggaattccatgacttgaaaggatcgtccatgggagtaataaaatcaaatttgttggtaaaaaacctgaactggttatttcctacttgcctcctggagttgctaataaaataaacactaaagcttcgcagtttctaaaaagaccatgaagccctgagagtaatgaaaaggttcctgaaattgaggtcactgtggaaggt

SEQ ID NO: 773 - DNA, 1846 bp, Artificial
  cDNA Sequence
gggacgtgagccgctgcgcccaccgggctagacccggcgccatcatgctgcttctgccaagcgccgcggacggccggggcaccgccatcacccacgctctgacctctgcctctacactctgtcaagttgaacctgtgggaagatggtttgaagcttttgttaagaggagaaacagaaatgcttctgcctcttttcaggaactggaggataagaaagagttatccgaggaatcagaagatgaagaattgcagttggaagagtttcccatgctgaaaacacttgatcccaaagactggaagaaccaagatcattatgcagttcttggacttggccatgtgagatacaaggctacacagagacagatcaaagcagctcataaagcaatggttttaaaacatcacccagacaaacggaaagcagctggtgaaccaataaaagaaggagataatgactacttcacttgcataactaaagcttatgaaatgttatctgatccagtgaaaagacgagcatttaacagtgtagatcctacttttgataactcagttccttctaaaagtgaagcaaaggataatttcttcgaagtgtttaccccagtgtttgaaaggaattccagatggtcaaataaaaaaaatgttcctaaacttggtgatatgaattcatcatttgaagatgtagatatattttattctttctggtataattttgattcttggagagaattttcttatttagatgaagaagaaaaagaaaaagcagaatgtcgtgatgagaggagatggattgaaaagcagaacagagcaacaagagcacaaagaaaaaaagaagaaatgaacagaataagaacattagttgacaatgcatacagctgtgatccaaggataaaaaagttcaaggaagaagaaaaagccaagaaagaagcagaaaagaaagcaaaagcagaagctaaacggaaggagcaagaagctaaagaaaaacaaagacaagctgaattagaagctgctcggttagctaaggagaaagaagaggaggaagtcagacagcaagcattgctggcaaagaaggaaaaagatatccagaaaaaagccattaagaaggaaaggcaaaaacttcgaaactcatgcaagatagaagaaataaatgagcaaatcagaaaagagaaagaggaagctgaggctcgtatgcgacaagcatctaagaacacagagaaatcaactggtggaggtggaaatggaagtaaaaattggtcagaagatgatctacaattactaattaaagctgtgaatctgttccctgctggaacaaattcaagatgggaagttattgctaattacatgaacatacattcttcctctggagtcaaaagaactgccaaagatgttattggcaaagcaaagagtctccaaaaacttgaccctcatcaaaaagatgacataaataaaaaggcatttgataagttcaaaaaagaacatggagtggtacctcaagcagacaacgcaacgccttcagaacgatttgaaggtccatatacagacttcaccccttggacaacagaagaacagaagcttttggaacaagctttgaaaacatacccagtaaatacacctgaaagatgggaaaaaatagcagaagcggtgcctggcaggacaaagaaggactgcatgaaacgatacaaggaacttgtcgagatggtaaaagcaaagaaagctgctcaagaacaagtgctgaatgcaagtagagccaagaaatgacaatctttgttgtgtgtgcatttttataataaaactgaaaatactgtaaacattttcattcttaaaattatactcatggtaataatttgaaagta

SEQ ID NO: 774 - DNA, 2742 bp, Artificial
  cDNA Sequence
atggcccaggtagcagtgtccaccctgcctgttgaagaagagtcctcctcagagaccaggatggtggtgacattcctcgtgtctgccctcgaatccatgtgtaaagaactggccaagtccaaggcagaagtggcctgcatcgcagtgtacgaaacagacgtgtttgtcgtcggaaccgagagaggatgcgcttttgttaatgccaggacggattttcagaaagattttgcaaaatacgttgcagagggactgtgtgaggtgaaacctccctgccctgtgaacgggatgcaggtccactcgggcgaaacggaaatactcaggaaggcagtggaggactatttctgcttttgttataaagccttagggacaacagtgatggtgcctgttccctatgagaagatgctgcgagaccagtcggctgtggtagtgcaggggcttccggaaggcgttgcctttcaacaccctgagaattacgaccttgcaaccctgaaatggattttggagaacaaagcagggatttcattcatcataaatcccttcctaggaccagagagtcagctgggccctgggatggtaacagatgcggagagatccatagtatcaccaagtgaatgcggccccatcaatgtgaaaactgaacccatggaagattctagccacccttcttccacaagcaatgaagtaatagaaatggaattaccaatggaatccactccgctggtcccttcagaagaaccaaatgaggaccctgaagccgaggtgaaaatcgaaaacacaaattcatccagtgttacaaattctgcagcaggtgttgaagatcttaacatcgttcaagtgactgttccaaatgagaaggaaagattatcaagcattgaaaagattaaacagctaagagaacaagttaatgacctctttagccgaaaatttgaagcaattggcgtggatttccctgtgaaagttccctacaggaagatcacattcaaccctggctgtgtggtgattgatggcatgcccccgggggtggtattcaaggcccccggctatctggaaatcagttccatgaggaggatcttggaggcagctgagtttatcaaattcacagtcatcgtccatgtgcaggatgtgcaggtttgttacacaggaaaacgcaagatagaccaggagggccgtgtgtttcaagaaaagtgggagagagcgtatttcttcgtggaagtacagaatattccaacatgtctcatatgcaaacaaagcatgtctgtgtccaaagaatataacctaagacgccactatcaaaccaatcacagcaagcattatgaccagtatatggaaagaatgcgtgacgagaagcttcacgagctgaaaaaagggctcaggaagtatctcttaggcttgtcagacaccgagtgtcccgagcaaaaacaagtgtttgcacacccaagtccaacccagaaatcccccgtgcagcctgtagaggacctagctgggaacttatgggagaagttacgtgaaaaaatcaggtcttttgtggcatattctatcgcaatcgatgagatcacggatataaataataccacccagttggccatattcatccgtggtgtcgatgagaatttcgatgtgtccgaagaacttctggacacggtgcccatgacgggtacaaaatctggcaacgagatcttttcgcgtgttgagaagagcctgaaaaagttctgtatcgactggtcgaaattagtaagcgtggcctccactggcaccccagcgatggtggatgccaataacgggcttgtcacaaaactgaagtccagggtggcgacgttctgcaagggtgcggaactgaagtccatctgttgtataattcatccggaatcactctgtgctcagaagttgaagatggaccacgtcatggacgtggtagtgaagtccgtgaactggatatgctcccggggactgaaccacagtgagttcacaaccttgctctatgagctggacagccagtatggtagcctcctgtactacacggagattaagtggctcagtcgcgggctcgtgctaaagagatttttcgaatccttggaagaaatcgactccttcatgtcatccagagggaaacccctgcctcaactgagctccatagattggatccgagacctggccttcttggttgacatgacgatgcatctgaacgctttgaacatctctctccaaggacactcccaaatcgtcacgcagatgtatgacctgatccgggcgttcctagcaaaactgtgcctctgggagactcatttgacgaggaataatctggcccactttcccaccctgaaattggcttccagaaatgaaagcgatggcctgaactacattcccaaaatcgcggaactcaagaccgaattccagaaaaggctgtctgatttcaaactctacgaaagcgaactgactctgttcagctccccgttctccacgaagatcgacagtgtgcacgaggagctccagatggaggttatcgacctgcaatgcaacacggtcctgaagacgaaatacgacaaggtgggaataccagaattctacaagtacctctggggtagctacccgaaatacaagcaccattgcgcaaagattctttccatgttcgggagcacctacatctgcgaacagctgttctccattatgaaactgagcaaaacaaaatactgctcccagttaaaggattcccagtgggattctgtactccacatcgcaacgtga

SEQ ID NO: 775 - DNA, 6624 bp, Artificial
  cDNA Sequence
cagcatcaataaggccattaatacgcaggaagtggctgtaaaggaaaaacacgccagaacgtgcatactgggcacccaccatgagaaaggggcacagaccttctggtctgttgtcaaccgcctgcctctgtctagcaacgcagtgctctgctggaagttctgccatgtgttccacaaactcctccgagatggacacccgaacgtcctgaaggactctctgagatacagaaatgaattgagtgacatgagcaggatgtggggccacctgagcgaggggtatggccagctgtgcagcatctacctgaaactgctaagaaccaagatggagtaccacaccaaaaatcccaggttcccaggcaacctgcagatgagtgaccgccagctggacgaggctggagaaagtgacgtgaacaactttttccagttaacagtggagatgtttgactacctggagtgtgaactcaacctcttccaaacagtattcaactccctggacatgtcccgctctgtgtccgtgacggcagcagggcagtgccgcctcgccccgctgatccaggtcatcttggactgcagccacctttatgactacactgtcaagcttctcttcaaactccactcctgcctcccagctgacaccctgcaaggccaccgggaccgcttcatggagcagtttacaaagttgaaagatctgttctaccgctccagcaacctgcagtacttcaagcggctcattcagatcccccagctgcctgagaacccacccaacttcctgcgagcctcagccctgtcagaacatatcagccctgtggtggtgatccctgcagaggcctcatcccccgacagcgagccagtcctagagaaggatgacctcatggacatggatgcctctcagcagaatttatttgacaacaagtttgatgacatctttggcagttcattcagcagtgatcccttcaatttcaacagtcaaaatggtgtgaacaaggatgagaaggaccacttaattgagcgactatacagagagatcagtggattgaaggcacagctagaaaacatgaagactgagagccagcgggttgtgctgcagctgaagggccacgtcagcgagctggaagcagatctggccgagcagcagcacctgcggcagcaggcggccgacgactgtgaattcctgcgggcagaactggacgagctcaggaggcagcgggaggacaccgagaaggctcagcggagcctgtctgagatagaaaggaaagctcaagccaatgaacagcgatatagcaagctaaaggagaagtacagcgagctggttcagaaccacgctgacctgctgcggaagaatgcagaggtgaccaaacaggtgtccatggccagacaagcccaggtagatttggaacgagagaaaaaagagctggaggattcgttggagcgcatcagtgaccagggccagcggaagactcaagaacagctggaagttctagagagcttgaagcaggaacttgccacaagccaacgggagcttcaggttctgcaaggcagcctggaaacttctgcccagtcagaagcaaactgggcagccgagttcgccgagctagagaaggagcgggacagcctggtgagtggcgcagctcatagggaggaggaattatctgctcttcggaaagaactgcaggacactcagctcaaactggccagcacagaggaatctatgtgccagcttgccaaagaccaacgaaaaatgcttctggtggggtccaggaaggctgcggagcaggtgatacaagacgccctgaaccagcttgaagaacctcctctcatcagctgcgctgggtctgcagatcacctcctctccacggtcacatccatttccagctgcatcgagcaactggagaaaagctggagccagtatctggcctgcccagaagacatcagtggacttctccattccataaccctgctggcccacttgaccagcgacgccattgctcatggtgccaccacctgcctcagagccccacctgagcctgccgactcactgaccgaggcctgtaagcagtatggcagggaaaccctcgcctacctggcctccctggaggaagagggaagccttgagaatgccgacagcacagccatgaggaactgcctgagcaagatcaaggccatcggcgaggagctcctgcccaggggactggacatcaagcaggaggagctgggggacctggtggacaaggagatggcggccacttcagctgctattgaaactgccacggccagaatagaggagatgctcagcaaatcccgagcaggagacacaggagtcaaattggaggtgaatgaaaggatccttggttgctgtaccagcctcatgcaagctattcaggtgctcatcgtggcctctaaggacctccagagagagattgtggagagcggcaggggtacagcatcccctaaagagttttatgccaagaactctcgatggacagaaggacttatctcagcctccaaggctgtgggctggggagccactgtcatggtggatgcagctgatctggtggtacaaggcagagggaaatttgaggagctaatggtgtgttctcatgaaattgctgctagcacagcccagcttgtggctgcatccaaggtgaaagctgataaggacagccccaacctagcccagctgcagcaggcctctcggggagtgaaccaggccactgccggcgttgtggcctcaaccatttccggcaaatcacagatcgaagagacagacaacatggacttctcaagcatgacgctgacacagatcaaacgccaagagatggattctcaggttagggtgctagagctagaaaatgaattgcagaaggagcgtcaaaaactgggagagcttcggaaaaagcactacgagcttgctggtgttgctgagggctgggaagaaggaacagaggcatctccacctacactgcaagaagtggtaaccgaaaaagaatagagccaaaccaacaccccatatgtcagtgtaaatccttgttacctatctcgtgtgtgttatttccccagccacaggccaaatccttggagtcccaggggcagccacaccactgccattacccagtgccgaggacatgcatgacacttccaaagactccctccatagcgacaccctttctgtttggacccatggtcatctctgttcttttcccgcctccctagttagcatccaggctggccagtgctgcccatgagcaagcctaggtacgaagaggggtggtggggggcagggccactcaacagagaggaccaacatccagtcctgctgactatttgacccccacaacaatgggtatccttaatagaggagctgcttgttgtttgttgacagcttggaaagggaagatcttatgccttttcttttctgttttcttctcagtcttttcagtttcatcatttgcacaaacttgtgagcatcagagggctgatggattccaaaccaggacactaccctgagatctgcacagtcagaaggacggcaggagtgtcctggctgtgaatgccaaagccattctccccctctttgggcagtgccatggatttccactgcttcttatggtggttggttgggttttttggttttgtttttttttttaagtttcactcacatagccaactctcccaaagggcacacccctggggctgagtctccagggccccccaactgtggtagctccagcgatggtgctgcccaggcctctcggtgctccatctccgcctccacactgaccaagtgctggcccacccagtccatgctccagggtcaggcggagctgctgagtgacagctttcctcaaaaagcagaaggagagtgagtgcctttccctcctaaagctgaatcccggcggaaagcctctgtccgcctttacaagggagaagacaacagaaagagggacaagagggttcacacagcccagttcccgtgacgaggctcaaaaacttgatcacatgcttgaatggagctggtgagatcaacaacactacttccctgccggaatgaactgtccgtgaatggtctctgtcaagcgggccgtctcccttggcccagagacggagtgtgggagtgattcccaactcctttctgcagacgtctgccttggcatcctcttgaataggaagatcgttccaccttctacgcaattgacaaacccggaagatcagatgcaattgctcccatcagggaagaaccctatacttggtttgctacccttagtatttattactaacctcccttaagcagcaacagcctacaaagagatgcttggagcaatcagaacttcaggtgtgactctagcaaggctcatctttctgcccggctacatcagccttcaagaatcagaagaaaggccaaggtgctggactgttactgacttggatcccaaagcaaggagatcatttggagctcttgggtcagagaaaatgagaaaggacagagccagcggctccaactcctttcagccacatgccccaggctctcgctgccctgtggacaggatgaggacagagggcacatgaacagcttgccagggatgggcagcccaacagcacttttcctcttctagatggaccccagcatttaagtgaccttctgatcttggaaaaacagcgtcttccttctttatctatagcaactcattggtggtagccatcaagcacttcccaggatctgctccaacagaatattgctaggttttgctacatgacgggttgtgagacttctgtttgatcactgtgaaccaacccccatctccctagcccacccccctccccaactccctctctgtgcattttctaagtgggacattcaaaaaactctctcccaggacctcggatgaccatactcagacgtgtgacctccatactgggctaaggaagtatcagcactagaaattgggcagtcttaatgttgaatgctgctttctgcttagtatttttttgattcaaggctcagaaggaatggtgcgtggcttccctgtcccagttgtggcaactaaaccaatcggtgtgttcttgatgcgggtcaacatttccaaaagtggctagtcctcacttctagatctcagccattctaactcatatgttcccaattaccaaggggtggccgggcacagtggctcacgcctgtaatcccagcactttgagaggctgaggtggtaggatcacctgaggtcaggagttcaagaccagcctgtccaacatggtgaaacccccatctctactaaaaataccaaaaattagccgagcgtagtgacgggtgcccgtaatcccagctactcaggaggctgagacaggagaatcacctgaaccccagaggcagaggttgcagtgagctgagatcacgccattgtactccagcctgggcaacaagagcaaaactccgtctcaaaaaaaaaaaaaaattacaaatggggcaaacagtctagtgtaatggatcaaattaagattctctgcccagccgggcacagtggcgcatgcctgtaatcccagaactttgggaggccaagacgggatgattgcttgagctcaggagtttgagaccaggctgggcatcatagcaagacctcatctctactaaaattcaaaaacaaaattagccgggcatgatggtgcatgcctgtagtctcagctagttggggagctaaggtgggagaattgcttgagcttgggaagtcgaggctgcagtcagccctgattgtgccagtgcactccggcctgggtgacagagtgagaccctgtctcaaaaaaaaaaagattctgtgtcagagcccagcccaggagtttgaggctgcaatgagccatgatttcccactgcactccagcctgagtgacagagcgagactccatctctttaaaaacaaacaaaaaattatctgaatgatcctgtctctaaaaagaagccacagaaatgtttaaaaacttcatcgacttagcctgagtcataacggttaagaaagcacttaaacagaagcagaggctaattcagtgtcacatgaggaagtagctgtcagatgtcacataattactttcgtaatagctcagattagaatggctaccccattctctagacaaaatcaaattgtcctattgtgactcttctaaaaatgaagatgaagagctatttaatgacacaccttggattaaaacgggaatcacatcttaaagctaaaaatgaacctgcaagccttctaaatgagtcactgagcatcactagtgacaagtctcgggtgagcgtaaatgggtcatgacaagatgggacagcaacaaaatcatggcttaggatcgacaagaagttaaaaaacagctgcatctgttacttaagtttgtaagacagtgccctgagacctctagagaaaagatgtttgtttacataagagaaagaggccagacatggtgtctcacacgtttaatcccagcactttgggaggcaggggcgggtggatcacctgaggtcaggagttcaagactagcctggccaacatggtgaaaccccgtctctactaaaaatacaaaaattagccgggcatggtggcaggcgcctataatcccagctactggggaggctgaggcaggagaatc

SEQ ID NO: 776 - DNA, 120 bp, Artificial
  cDNA Sequence
atggatcggatggccagctccatgaagcaggtgcccaacccactgcccaaggtgctgagccggcgcggggtcggcgctgggctggaggcggcggagcgcgagagcttcgagcggactcag

SEQ ID NO: 777 - DNA, 476 bp, Artificial
  cDNA Sequence
ggtgccggcgtggagacgggtgggaaactgctggtgtccaatctaggttttgaagtatcagacactgatatttgggaactctgcagaatttggaacgctgaagaaggcggctgtgcactacgatggctctggccgcagcttaggatcagcagacatgcgctttgagcggaaggcacacgccctgaaggccatgaagcagtactacggcacccctctggctggccgccctgtgaacattcagcttgtcacatcacagattgatacataacagacacctgcacagagcgtaaacagaggtggcatgactagaaaccgtggcgctggaggttttggtggtaacggaggcacccggggaggcacccggggaggcacccgtggaggcgaccggggaagaggcagaggcgccggcaggaattcaaagcagcagcttttcggcagaggagatggacgcctataatgccagaatggacaccagt

SEQ ID NO: 778 - DNA, 816 bp, Artificial
  cDNA Sequence
ccgcaaggaaagaaggccaaagggaagaaggtggctccggcccctgctggcgtgaagaagcaggaggccaagaaagtggtttatcccgtttgagaaaaggcctaagacttttggcactggacaggacttccaggccaaaacggacctcgcccactttgtgcaatggtcctgctcggtcagggtgcagtggcggacagccatcctctataagtagcagaaactgtctcctgctattaaccagttcacccaggccctggaccgccaaacagctattcagctgcttaagctggcccagaagtacagaccaggggcaaagcaagagaagaagcagagactgttggccctgactgagaagaaagctgccagcaaaggggacgtccccactaagaggccacctgtccttggagcaggaattaacaccgtcaccaccttgatggagaacaagaacgctcagctgggccaggcacagaaggctcagctggtggtgactccacgcaacatgggtcccatcaagctggctgtcttcctgcctgtgcctgtgtgtaaagtggggtccctgactgcatcatcaaggggaaggcaagactgggatgtctagtccccaggaagacctgcaccactgtcgccttcacacaggttaacttggaagacaaaggagcttgggctaagctggtggaagctaccaggaccaattacaacaacaaatgtgatgagatccgccatcactggggaggcagtgtcctgggtcccaagtctgtggctcacattgccaagctcaaaaaggcaaagactaaagaaactaccactaaactgggt

SEQ ID NO: 779 - DNA, 227 bp, Artificial
  cDNA Sequence
ccttatgtgacctggggatttccaaatctgaagtctgtccagaaactcattttgaaacgtagacaagccaaggtcaagaataagaccatccctctgacaacacagtgattgaggagcacctgggaaagcttggtgtcttttgcttggaagacctcattcatgaaattgccttcccaaggaagcatttccaggagatctcatggttcttgtcccctttccacctctca

SEQ ID NO: 780 - DNA, 2250 bp, Artificial
  cDNA Sequence
atgcccttcatgatcaacatgggagactcccacgtggacaccagctccaccgtgtccgaggcggtggccgaagaagtatctcttttcagcatgacggacatgattctgttttcgctcatcgtgggtctcctaacctactggttcctcttcagaaagaaaaaagaagaagtccccgagttcaccaaaattcagacaacctcctctgtcagagagagcagctttgtggaaaagatgaagaaaacgatcttgcaaagcacgttcaattggctgaaccgaattggctgcaactccagccccaacgggctctggggaataggatttcaggcttttcaacagctgctggaggaggagggtggactgacggctgtgacagtgagaagcaagtcccagaggaacttagaagggactcaaagccaggaaggaaagggggcggcctggagggcccccgcctgccaggcctgcccagggaggaacatcatcgtgttctacggctcccagacggggactgcagaggagtttgccaaccgcctgtccaaggacgcccaccgctacgggatgcgaggcatgtcagcggaccctgaggagtatgacctggccgacctgagcagcctgccagagatcgacaacgccctggtggttttctgcatggccacctacggtgagggagaccccaccgacaatgcccaggacttctacgactggctgcaggagacagacgtggatctctctggggtcaagttcgcggtgtttggtcttgggaacaagacctacgagcacttcaatgccatgggcaagtacgtggacaagcggctggagcagctcggcgcccagcgcatctttgagctggggttgggcgacgacgatgggttggaggaggacttcatcacctggcgagagcagttctggccggccgtgtgtgaacactttggggtggaagccactggcgaggagtccattcgccagtacgagcttgtggtccacaccgacatagatgcggccaaggtgtacatgggggagatgggccggctgaagagctacgagaaccagaagccctttgatgccaagaatccgttcctggctgcagtcaccaccaaccggaagctgaaccagggaaccgagcgccacctcatgcacctggaattggacatctcggactccaaaatctatgaatctggggaccacgtggctgtgtacccagccaacgactctgctctcgtcaaccagctgggcaaaatcctgggtgccgacctggacgtcgtcatgtccctgaacaacctggatgagtccaacaagaagcacccattcccgtgccctacgtcctaccgcacggccctcacctactacctggacatcaccaacccgccgcgtaccaacgtgctgtacgagctggcgcagtacgcctcggagccctcggagcaggagctgctgcgcaagatggcctcctcctccggcgagggcaaggagctgtacctgagctgggtggtggaggcccggaggcacatcctggccatcctgcaggactgcccgtccctgcggccccccatcgaccacctgtgtgagctgctgccgcgcctgcaggcccgctactactccatcgcctcatcctccaaggtccaccccaactctgtgcacatctgtgcggtggttgtggagtacgagaccaaggctggccgcatcaacaagggcgtggccaccaactggctgcgggccaaggagcctgccggggagaacggcggccgtgcgctggtgcccatgttcgtgcgcaagtcccagttccgcctgcccttcaaggccaccacgcctgtcatcatggtgggccccggcaccggggtggcacccttcataggcttcatccaggagcgggcctggctgcgacagcagaaggaggtgggggagacgctgctgtactacggctgccgccgctcggatgaggactacctgtaccgggaggagctggcgcagttccacagggacggtgcgctcacccagctcaacgtggccttctcccgggagcagtcccacaaggtctacgtccagcacctgctaaagcaagaccgagagcacctgtggaagttgatcgaaggcggtgcccacatctacgtctgtgatgcacggaacatggccagggatgtgcagaacaccttctacgacatcgtggctgagctcggggccatggagcacgcgcaggcggtggactacatcaagaaactgatgaccaagggccgctactccctggacgtgtggagctag

SEQ ID NO: 781 - DNA, 360 bp, Artificial
  cDNA Sequence
tcccacctttcggcagcctctgcaggcccagctcctgtgtcccgatggcctttttttgcctggctttgcctcaccgcggcctcttgaggcgcagcttttcccttctggcgacatctccaggcccagaacttcctcaaatcggcctcccccggcccagttgctgcctgccggcctcctctccgggcccagctatttgctcatggctgcgcccacaggcccagctcctgcctccaaacagcctcctttgactcggctcctgcccagctcctggcaacctacatcggcccaaagcctgctccagtccagctctccaggcccgcctcttgcctcgcagcggcctttccaggcccagctctcgcc

SEQ ID NO: 782 - DNA, 498 bp, Artificial
  cDNA Sequence
atgctgactcatctgtcccctttcttcctcctcctcttcctcctcctcctcctcctcctagtagaagctgcacccctgcccagggtcacctatcaggtcctgaggaaaaacgtttactctccatctgcatggtacgtgccgtttgtcatcactttgggctccatattgcttctgggtctcctcgtgtacctggtcgtcctattggccaaagccatccacagacactgcccctgcaagactgggaagaacaaggaacctacaaagaaaggaacgaagactgcagagagagacgtcgtggtggaaactatccagatgaacactatctttgatggagaagccatagatccacagggccaagaatttcctcttggtcggcaagatgaacataaggtagagctggcctccagagctctcatcacccccgtgaaatcagctccaaatttagctcctttacactcatccctctgcttacaaaggctcaattatagacgtgaataa

SEQ ID NO: 783 - DNA, 2046 bp, Artificial
  cDNA Sequence
agccggcgccgctgccactcccgggagcatgaaggaccgaacccaggagctccgcacggccaaggacagcgatgatgatgatgatgtcgctgtcaccgtggaccgagaccgcttcatggatgagttctttgagcaggtggaggagattcgaggcttcattgacaagatcgcagagaacgtggaggaggtgaagcggaagcacagtgccatcctggcatcccccaaccccgatgagaagacgaaggaggagctggaagaactcatgtccgacataaagaagacagcaaacaaagttcgttccaagttaaagagcatcgagcagtccatcgagcaagaggaaggcctgaaccgctcctccgctgacctgaggatccggaagacacagcactccacgctgtccagaaagtttgtggaggtcatgtcggagtacaacgccacgcagtccgactaccgcgagcgctgcaaaggccgcatccagaggcagctggagatcaccggcaggaccacgaccagtgaggagctggaggacatgctggagagtgggaaccccgccatctttgcctctgggatcatcatggactccagcatctcgaagcaggctctgagcgagattgagacgcggcacagtgagatcatcaagctggagaacagcatccgtgagctacacgacatgttcatggacatggccatgctcgtggagagccagactatgtggagagggccgtgtctgacaccaagaaggccgtcaagtaccagagcaaggcgcgccggaagaaaatcatgatcatcatctgctgtgtgatcctgggcatcgtcatcgcctccactgttgggggcatcttcgcctagaagccacccaaactgccactccactccaggtgggccactccaaggaggccctggctgctgccacctggctgggctgccctcccaacccccgcctctggctcagagcaccctccctcccggcccccatgctcccttctctgccatgggccctccgtccccgccccgtgtcgtgtgcatgatctctgtgagtgtgcgtctgtacgggaagaggcagagggaggcagccagcggggcgtgatgcagtgtgcacagcgaggagcagacccaggcagggccgccagggtgacacaggccacccttccttgccttcagtaactcggtgggcccaggttctgctcttccctggggaccctaacctcgcctccagctgacctgccctgtcctctccagctgtccccacaagcagagccctgaggggtggggaccagctggccacatggtgctgcttttcaggttaggggagaggtggccctgagggacagcccagctctgagtctcagtcgctgatcactgccagggaggctcaggctgccatggctccaggctccctcccctgcctaggggcaaagtccatcgggtcctgggcctcagcttcccttcccacattcctccggccccaggagcaaccccttgggctaggtctgaccccaggtgtccctctggaaggggctggctggtgccctatttccagccaccccagcagctagggaggcaaagcaggctgcagtcagtccctcaagccagcgttgcatgtttgggatggtggctcctgttgtcttgcgctctgggaagtcagatgtcatttcaggcctgcagtctcatcctgcccttgccatcctcccatcgatgtgccacgtgggtgtcacgtgtcccagatgcagtattcggcagccagccggggagggctacctcctcctcctcaccaccttggggcttctcatgggaaatgtgcccccgccccaggaccctctcccttgtggacaggcagggagatgcatgcgagtgcatgcagcaggggatggggccgtgtccgtgtgccccaccctccctcggctttactcctgcccagtgactgtgaccactgtccgtgttgccttcttgaacagcgattccccccaaccccttcaccaaaggtcttggtacaaccagctgcccattttgtgaaatttttatgtagaataaacatttgtatctgta

SEQ ID NO: 784 - DNA, 725 bp, Artificial
  cDNA Sequence
ggaattcatgtgcatcagtcagacctcctgtgcaaggaaggatgtggttactacggcaaccctgcctggcagggtttctgctccaagtgctggagggaagagtaccacaaagccaggcagaaggagattcaggaggactgggagctggcggagcgactccagtgggaggaagaggcctttgccagcagtcagagcagccaaggggcccaatccctcacattctccaagtttgaaggaaagaaaaccaacgagaagacccacgaggttaccacagtgaagaaatcttcagtgcgtcttccagggtcggatcaaagaaggaaattcaggaagcaaaagccagtccttccataaaccggcgaaccagcattgaaacggatagagtgtctaaggagttcatagaatttctcaagaccttccacaagacaggccaagaaatctataaacagaccaagctgtttttggaagggatgcattacaaaagggtagtcaaggtgatcacaaagtgccatgagtgcttggccattttcactgagggaatgagcttttctgtctgtttggctatttcagtgcctccagaaagggttgagaagataatggatcagattgaaaagtacatcatgactcatctctgtaaatatgcgttctgtccagaaccccatgtggtggcacgatctcggctcactgatgatgagaagaaagatcttgccattcaaaagaggatcagg

SEQ ID NO: 785 - DNA, 526 bp, Artificial
  cDNA Sequence
gcggctccatgcgtgaggctggtgccacgcggtctcccggtgttggcattgtctccaggccttctcctcagttctgcacacagctacaaaacaaaagaacagttgccagcacttggaagaggatgtggatccaaaccaaatggaggacagatactccctctatggacaagatactcatggaagaagtcaagttagaagagcagctgaaggaggctgtggaagaagataagcaagcactggcagatactgagggctcagagcagagcagccaaaaattggtggaggagggaaatatgtatagcattcagggcttctgcaaggactcgttagaggttgcagatgttttggagaaggcaacacagtgtgttccagaagaagaaattaaagacaataaccctcacctgaagaacctctctctgtgagactcacaatgagtgaagtccagattcaggaagtgttcagcaagcactgccaagatgaactctgtcacagcaagttccacccttatgagcgtgagggtcttttt

SEQ ID NO: 786 - DNA, 102 bp, Artificial
  cDNA Sequence
gggagctcatctcggcccagcctctttgaaaggaggaacattcggtgcagccattggaaccttatcctttataaaatgggacagctcacaggattacatttc

SEQ ID NO: 787 - DNA, 511 bp, Artificial
  cDNA Sequence
aggtcagacaagggcagcatgtctgaagactgcgggccaggaacctctggggagctgggtgggctgaggccgatcaaaattgaaccagaggttctggacatcattcaggtcactgtcccagatgccttgccaacctctgaggaaatgacagactcaatgcctgggcacctgccatcggaggattctggttatgggatggagacgctgacaggaaggccctcaaaagggctctggcagctttgccccctacacaggcatgagacacaggggttgagattcctggccctgtggcaccgggtggccttacagcagccatgtctctgcagccaaggccattggcatctcggagcccgtcaaggtgccatactccaagtttctgatgcacccggaggagctgtttgtggtggggctgcctgaaggcatctctctccacaggcccaactgcttcgggatcgccaagctctggaagattctggaggccagcaacagcatccagtttgtcatcaagagg

SEQ ID NO: 788 - DNA, 1056 bp, Artificial
  cDNA Sequence
aatggaaaccagaaatcagatatttatgcccaagcaaagcaggatttcgttcagcactactcccagatcgttagggtgctgactgaggatgagatggggcacccagagacaggagatgctactgcccggctcaaggaggtcctggagtacaatgccattggaggcaagtatcaccgaggtttgatggtgctagtagcgttccgggagctggtggagccgaggaaactggatgctgatagtctccagtgggcaccgactgtgggctggtatgcgcaactgctgcaagctttcttcctggtggcagatgacattatggattcatcccttacctgccagggacagatctcctggtatcagaagctgggcatgggtttggatgccatcaatgatgctatccttctggaagcatgtatctactgcctgctgaagctgtattgccgggagcagccctattacctgaacctgatggagctcttccagcagaattcttatcagactgagattgggcagaccctcgacctcatcacaaccccccagggcaatgtggatcttcgcagatgcaccgaaaaaaggcacaaatctgttgtcaagtacaagacagctttctactccttctaccttcctgtagctgcagccatgtacatgtcaagaatggatgacaagaaggagcacaccagtgccaagaagatcctgctggagattcaagagttctttcagattcaggatgattaccttgacttctctggggaccccagtgtgactggcagagttggcaatgacttccaggacaacaaatgcagctggctggtggttcagtgtctgctacaggccactccagaacagtaccagatcctgaaggaaaattacaggcagaaggaggccgagaaggtggcccgggtgaaggcactatacgaggagctggatctgccagccgtgttcttgcagtatgagaaagacagttacagccacgttatgggtctcatcgaatagtacgcagagcccctgcccccagccatctttctggggcttgtgcacaaaatctacaagtggaaaaag

SEQ ID NO: 789 - DNA, 303 bp, Artificial
  cDNA Sequence
gtgtgtcctcagaggcctggcgccggccgtcgctgtacggtgagccccagggaggcggatctgggccccgagaaggacacccacctggatttgccccataggcccggcccgggcccctcgggagcagaacagccttggtgaggtggacaggaggggacctcgtgagcagacgcgtgcgccagcgacagcagcccgccccggcctctcaggagccgtggggcagaggctgcggagccccaggagggtctatcagccacagtctctgcaagtttccaagagcagcagaaaatgaacacattgcag

SEQ ID NO: 790 - DNA, 381 bp, Artificial
  cDNA Sequence
agcgatgtcaccatttctacctgccacgcatcggtgaaggttgggactcgactggtgtttgatcacgatgggaaaatcatccagaaaaccccctacccccaccccagagggaccacagtcagcgtgaagcagttattttctacactacctgtgcgccataaggaatttcaaaggaatgttaagaaggtacaacgtgcctgcttccccttcgccttctgccgtgattgtcagtttcctgaggcctccccagccatgcttcctgtacagcctgcagaactgactcctagaaggaccccacccccctccccccacccctgctcccaggaggacaacgtgatcactgtattcagctccatcaagaatggtccaggttcttctaga

SEQ ID NO: 791 - DNA, 3161 bp, Artificial
  cDNA Sequence
agcgaccgcagccggggggacgcgggaggatggagcaagtggagatcctgaggaaattcatccagagggtccaggccatgaagagtcctgaccacaatggggaggacaacttcgcccgggacttcatgcggttaagaagattgtctaccaaatatagaacagaaaagatatatcccacagccactggagaaaaagaagaaaatgttaaaaagaacagatacaaggacatactgccatttgatcacagccgagttaaattgacattaaagactccttcacaagattcagactatatcaatgcaaattttataaagggcgtctatgggccaaaagcatatgtagcaactcaaggacctttagcaaatacagtaatagatttttggaggatgatatgggagtataatgttgtgatcattgtaatggcctgccgagaatttgagatgggaaggaaaaaatgtgagcgctattggcctttgtatggagaagaccccataacgtttgcaccatttaaaatttcttgtgaggatgaacaagcaagaacagactacttcatcaggacactcttacttgaatttcaaaatgaatctcgtaggctgtatcagtttcattatgtgaactggccagaccatgatgttccttcatcatttgattctattctggacatgataagcttaatgaggaaatatcaagaacatgaagatgttcctatttgtattcattgcagtgcaggctgtggaagaacaggtgccatttgtgccatagattatacgtggaatttactaaaagctgggaaaataccagaggaatttaatgtatttaatttaatacaagaaatgagaacacaaaggcattctgcagtacaaacaaaggagcaatatgaacttgttcatagagctattgcccaactgtttgaaaaacagctacaactatatgaaattcatggagctcagaaaattgctgatggagtgaatgaaattaacactgaaaacatggtcagctccatagagcctgaaaaacaagattctcctcctccaaaaccaccaaggacccgcagttgccttgttgaaggggatgctaaagaagaaatactgcagccaccggaacctcatccagtgccacccatcttgacaccttctcccccttcagcttttccaacagtcactactgtgtggcaggacaatgatagataccatccaaagccagtgttgcatatggtttcatcagaacaacattcagcagacctcaacagaaactatagtaaatcaacagaacttccagggaaaaatgaatcaacaattgaacagatagataaaaaattggaacgaaatttaagttttgagattaagaaggtccctctccaagagggaccaaaaagttttgatgggaacacacttttgaataggggacatgcaattaaaattaaatctgcttcaccttgtatagctgataaaatctctaagccacaggaattaagttcagatctaaatgtcggtgatacttcccagaattcttgtgtggactgcagtgtaacacaatcaaacaaagtttcagttactccaccagaagaatcccagaattcagacacacctccaaggccagaccgcttgcctcttgatgagaaaggacatgtaacgtggtcatttcatggacctgaaaatgccatacccatacctgatttatctgaaggcaattcctcagatatcaactatcaaactaggaaaactgtgagtttaacaccaagtcctacaacacaagttgaaacacctgatcttgtggatcatgataacacttcaccactcttcagaacacccctcagttttactaatccacttcactctgatgactcagactcagatgaaagaaactctgatggtgctgtgacccagaataaaactaatatttcaacagcaagtgccacagtttctgctgccactagtactgaaagcatttctactaggaaagtattgccaatgtccattgctagacataatatagcaggaacaacacattcaggtgctgaaaaagatgttgatgttagtgaagattcacctcctcccctacctgaaagaactcctgaatcgtttgtgttagcaagtgaacataatacacctgtaagatcggaatggagtgaacttcaaagtcaggaacgatctgaacaaaaaaagtctgaaggcttgataacctctgaaaatgagaaatgtgatcatccagcgggaggtattcactatgaaatgtgcatagaatgtccacctactttcagtgacaagagagaacaaatatcagaaaatccaacagaagccacagatattggttttggtaatcgatgtggaaaacccaaaggaccaagagatccaccttcagaatggacatgattcagggagctagaagacactttaagttatactggaaaattcaggtgccactgaaagccagatttatagtattccatctttaatatgtgggactaacagcagtgtagattgttaccttaatattttttgctgggaccatctacctgccttatactacacttaggaaaaagtattacatatggtttattttgaaacttcaagtattattgccttaatgtctcttaaccctgttacacgctgcttgtagacatgttaatatagtaatacctttatgatatattgagtttaaggactactctttttctgttttatcatgtatgcattattttgtatatgtacagggcaagtaggtatataatttgataaagttgcaattgaaatattattaacagaagatgtaagaaatttctgcatggtctaaatctttgtgtactttatttgtaaattatttgccctggagttttagaaaatagtttctgaattttaaacttgctggattcatgcagccagctttgcaggttatcagagatcaaagattgtaataataattttgtaaattgtaagcaaaaagttatttttatattatatacagtctaattgttcatcctaattgttcctgttttcatctagtcagagattcagtaagtgccttggaacaatattgaattctcttagcttgtgtgtgtttctttaatatttgaactcaagtgggattagaagactatcaaaatacatgtatgtttcaggatatttgacctgtcattaaaaaaaacaaacagttttacagtg

SEQ ID NO: 792 - DNA, 1496 bp, Artificial
  cDNA Sequence
tctccggcggctgcggcggctggagcaggcgagcggcggcggccgatagcgagtgtcagggccggccggggcggcgcttctcggcctgtcgctggtcggcctcctactgtacctcgtgcctgctgcggctgcgctggcctggctggccgtggggactaccgcggcctggtggggactgagccgcgagccccgaggttcgcgccccttgtcctccttcgttcagaaggcgcgacatcggcgaacactgttcgcttcgcctccggccaagtcgacagccaacggaaacctcctagagccgcggaccctgctcgaaggacctgaccctgccgaactgctcctcatgggcagttacctgggcaagcccgggccgccgcagcccgcccccgctccggagggccaggacctgcggaataggcctggccgccgcccgcccgcccggcgccgcgctccacaccgccctccccgccgacccatcgcgttcaccacttttacccctctctccccactcctcttctccgaccctccgggaggccttccccacgggatcgtgggactttaccagatcggtttgtaataacacctcgaagacgctatccgatccatcaggcccagtattcctgtccgggggtacttcccacagtgtgctggaatggttatcacaagaaggctgtgctgtcccctcgcaactccaggatggtgtgtagcccagtgactctgaggatcgcccctcctgacagaagattttcgcgttctgcgataccagagcagataatcagctcaacactgtcctcaccatcaagtaatgccccagacccatgtgcaaaggagactgtactgagtgccctcaaagagaagaagaagaaaaggacagtggaggaagaagaccaaatattccttgatggccaggaaaataaaagaagctgtcttgtcgacggtctcactgatgcctcttctgcattcaaagttcctcgacccgggccagatacactccagttcacagtggatgtcttccactttgctaatgactccagaaacatgatatacatcacctgccacctgaaggtcaccctagctgagcaggacccagatgaactcaacaaggcctgttccttcagcaagccttccaacagctggttcccagtggaaggcctggctgacatctgtcaatgctgtaacaaaggtgactgtggcactccaagccattccaggaggcagcctcgtgtcgtgagccagtggtccacgtctgcttccctgtaaccgcaggcatgtgacagaagaagcagatgtcaccgtggggccactgatcttcctggacaggaggggtgaccatgaagtagagcagtgggctttgccttctgacacctcagtggtgctgctgggcgtaggcctggctgtggtggtgtccctgactctgactgctgttatcctggttctcaccaggaggtgtcgcactgcctcccaccctgtgtctgcttccgaataaaagaagaaagcaa

SEQ ID NO: 793 - DNA, 753 bp, Artificial
  cDNA Sequence
atggcttggcaggtgagcctgctggagctggaggactggcttcagtgtcccatctgcctggaggtcttcaaggagtccctaatgctacagtgcggccactcctactgcaagggctgcctggtttccctgtcctaccacctggacaccaaggtgcgctgccccatgtgctggcaggtggtggacggcagcagctccttgcccaacgtctccctggcctgggtgatcgaagccctgaggctccctggggacccggagcccaaggtctgcgtgcaccaccggaacccgctcagccttttctgcgagaaggaccaggagctcatctgtggcctctgcggtctgctgggctcccaccaacaccacccggtcacgcccgtctccaccgtctgcagccgcatgaaggaggagctcgcagccctcttctctgagctgaagcaggagcagaagaaggtggatgagctcatcgccaaactggtgaaaaaccggacccgaatcgtcaatgagtcggatgtcttcagctgggtgatccgccgcgagttccaggagctgcgccacccggtggacgaggagaaggcccgctgcctggaggggatagggggtcacacccgtggcctggtggcctccctggacatgcagctggagcaggcccagggaacccgggagcggctggcccaagccgagtgtgtgctggaacagttcggaaatgaggaccaccatgagttcatctggaagttccactccatggcctccaggtaa

SEQ ID NO: 794 - DNA, 7011 bp, Artificial
  cDNA Sequence
cgcttcctgcgcctcttcaggtcaccgcttgctctagttcccaggctttggcctctagtggatgagaatcaccgagtctgcggggctggacgctgaccgcccgggccagcacctaggcgggcgggagctgtgcggcccagggttcgcgcgggccgggtagaggctcgagccgggacccccgagcgtgaaccccggagccagcggcgctggggccagaggggccaggcgggaggtggtggcggaggcgaaggggcgacgggacctgggcctggcccgtgtgtgtcctcggcggcctggcgccggccgtcgctgtacggtgagccccagggaggcggatctgggccccgagaaggacacccgcctggatttgccccgtaggcccggcccgggcccctcgggagcagaacagccttggtgaggtggacgggaggggacttcgcgagcagacgcgcgcgccagcgacagcagcccgccccggcctctcgggagccgtggggcagaggctgcagagccccaggagggggccagtgtcattcaaagatgtggctgtggatttcacccaggaggagtggtggcaactggaccctgatgagaagataacatacggggatgtgatgttggagaactacagccatctagtttccctggcttatgaggtggcaacatcttgtacttcggagatctgaagccgagcaacttgcccaagtccttcttcttttcccattaacaagatatgatatcaccaagccaaacgtcatcattaagttggagcagggagaggagctgtggataacgggaggtgaatttccatgtcaacatagtccagcccttcacatcctcagccgaagatctcacttcctcccagaggcctttgctgactgacccctcagggattgtgggactttaccaaatcggtttgtaataacacctagaagacgctatccgatccatcaggcccagtattcctgtctgggggtacttcccaccgtgtgctggaatggttatcacaagaaggctgtgctgtcccctcgcaactccaggatggtgtgtagcccagtgactgtgaggatcgcccctcctgacagaagattttcgcgttctgcgataccagagcagataatcagctcaacactgtcctcaccatcaagtaacgccccagacccatgtgcaaaggagacagtactgagtgccctcaaagagaaggagaagaaaaggacagtggaggaagaagaccaaatattccttgatggccaggaaaataaaagaaggcgccatgatagcagtggcagtggacattcagcatttgagcccctggtggccaatggagtccccgcttcttttgtgcctaagcctgggtctctgaagagaggcctcaattctcagagctcagatgaccacttgaataagagatcccgaagctcttccatgagctccttgacaggcgcttacgcaagtggcatccctagctccagccgcaatgccattaccagttcctacagctccactcgaggcatctcacagctctggaagagaaatggccccagttcatcacccttctctagcccagcctcctcccgctcccagacaccggagaggccagcaaagaaaataagagaagaggagctgtgtcatcattccagttcttcaactccattggcagcagacagggagtcccagggagaaaaggctgcagatacaaccccaaggaagaaacaaaactcgaattctcagtctacacctggcagctctgggcagcgtaagcggaaagttcagctgctgccttctcggcgaggggaacagctgaccttgcctccacctccccagcttggctattcgatcactgccgaggacctagacttagagaagaaggcttcattacagtggttcaaccaggccttggaggacaagagcgatgctgcctcgaactctgtcactgagaccccacctatcactcagccttcatttacctttaccctgcctgctgctgcacctgcctccccacccacctccctcctggccccaagcaccaacccactgttagagagcttgaagaagatgcagactcccccgagcctgccaccctgcccagaatctgctggagcagcaaccactgaggccctctcacctccaaagacacccagcctcctacccccgctgggtttatcacagtcagggccgccagggctgctccccagcccctcctttgactccaaacccccgaccactttgctggggctgatccctgctccatccatggtaccagccactgacaccaaggcacctccaacccttcaggcagagacggctaccaaaccccaagccacatctgccccgtcccccgcccccaagcaaagcttcctgtttggaacacagaacacctcaccttccagccctgccgcccctgctgcatcttcagcacctcccatgttcaagcccattttcacggctccacccaagagtgagaaggaaggccccacaccgcctggcccttcagtcacagccacagcgccctccagctcctccctccccacgaccaccagcaccacagccccgaccttccagcctgtctttagcagcatggggccacctgcatctgtgcccttgcctgctcccttcttcaagcagacaactactcccgccactgctcccaccacaactgccccgctcttcactggcctggccagcgccacctctgctgtggctcccatcacctctgccagtccatccacagactctgcttcgaagcctgcgtttggctttggcataaacagtgtgagcagcagcagtgtgagtaccacgaccagcaccgccactgccgcctcacagcctttcctcttcggggcgccccaggcctctgctgccagcttcaccccggccatgggctccatattccagtttggcaaacctcctgccttgcccacaaccaccacagtcaccaccttcagccagtccctgcacactgccgtgccaacggccaccagcagcagcgctgccgactttagtggttttggcagcaccctcgccacctccgccccggccaccagcagccagcccactctgacgttcagtaacacgagcacccccacgttcaacattccctttggctcaagcgccaagtccccgctcccatcatatccgggagccaacccccagcccgcatttggggccgctgaggggcagccaccgggggccgccaagccggcccttgcccccagctttggcagctctttcacttttggaaactctgcagccccggctgctgcacccacacctgcacctccgtccatgatcaaggtcgtgcctgcgtacgtgcctacgcccatccatcctatctttggcggtgccacgcactcggcgtttgggttgaaagccacggcttcggccttcggcgctcccgccagctcacagcccgcctttggcggctccactgctgtcttcttcggtgcagccaccagctccggctttggagccaccacccagaccgccagcagcgggagcagcagctcggtgtttggcagcacaacaccatcacccttcacgtttgggggttcggcagcccccgctggcagtgggagctttgggatcaatgtggccaccccaggctccagcaccaccaccggagctttcagctttggagcaggacagagtgggagcacagccacctccacccccttcgcagggggcttaggtcagaacgccctgggcaccaccggccagagcacaccgtttgccttcaacgtgagcagcacaactgagagcaaacctgtgtttggaggcaccgccacccccacctttggtctgaacacccctgcgcctggagtgggcacatcaggcagcagcctctcctttggggcatcctcagcacccgcccaaggctttgttggtgttgcacctttcggcaacacttttgctcaccagcaagaacacagcccgaggaagggacccaataacctttcaaaacgcaaactgctgcctgcggtgagggcccagggtcttccacggagaggacaggcatcttcctttcccaccaggaaggagtgagcccggagcctctgctatgtgcaaggcggtgtgcaagcaccggctgcagctttttgctctcttctttctctttggggctgggctgggtgtgcgttctggtgctgatgctttggcctgtgaggctgagctagagaaatgtagatgttagatgtgccagtaccatcctgcgcctcccaagcatgcccccactcactcacgtcggcatctcgacccgttcaattacagcaacgaagaagccaccgctaagcgtggtcttgggggaagcccggaggcagtgctcggcacccgggaacgtgctcaggcctcggtggggccgggcaggcagggcgggagctagcctgcaagagaaacagccccaatgctgggtaagagagcagttcaccccatccccccctccacgaccctggcgcacgccctgtacctgaaggcgcccgggttctgctgcagcgcatcttgtaccatgtcttcattctcctcctggcagagggagcacatggagtagacgagccgctgcagggaagggaaagtgagcgcgtggcacagggctcgctgctggaaccctgccagggcatgcagacgcaccgggctaggtgtccctgccccgggctcctccagctgtctgctcggcatacctaaggaaaagcgtgtctcggttacacagcttcacaggctgcctcagtcctgaaatcctcgctcctgaaatcctcgcttcacagaggagaacttttgctccagggtcccaagcccattaaagtgtcagaactaagaccaaaacagatgactccaggtctaagctgctgtggacctctgagtccctcagccacgccttctcaccatctcacccgagccactgcaggaaggatccagcaggacatagtggacctcacgatagcgcggatctaagggggagaccgccaggaagtcctcctcagccagctcacagcaggagacgccagcccaggccagcagcgtggccatggatgccagccgcctggcatccaggtcaaaggcaaagatcttcctagggcagagggcagagcaggggtgagctgagcatgcatggagcagctaagggcctgtcacagctgacacagacaaccagaacatgcaggttaagccaggacacacaatattgaaacagcctatatttaaagggcccagggtcagaggtaactggcctggggtctctgccccaagggctaagggatccacatctcacacctgcagtggggaaagcttagcttggggcaaataccgtgaactactttggtgcagcaggaaagagttaagcgaaagtcatcctttcagccttcattacccactgaaaggcacaaaatcaaaccccatgtcctcctcctcctcctgtggcactcacccttggttcttcagaagagcagccaagtgactggtctttattgcctggggtggcacaggcatccatgacatgggagcctggcgggggtccagcagcatggctgggagacagctggcctggcaggcagaacacaggggccgggtaaacagagaccccaggctaggcccttcccgtgcctacacattcttcccttttctattcctcttgcctaccctgtcctgcagaatgaggtgtccggcccggtacagtgggtgttcatgcagatctgtctgggcgggaaacaccagcagctccggcatcaaggggtccaggagaaaatgcttccccttgagggctcgtaagtcatcgaggctgccagggaagaaccattcattcatcatttcctgaatttctccctgccaggccctatttcaacggtccattcatgcaacaaatgttaccacagctatggagaaatcaacagggtgataagggaatccgggatccgcagttgagggaatgggttgtcaagccagacttatgggtcaggagccccctctactgtttaccagcagtgggagcctgggcaagtgattcaatctcaagccccactggcatctctgtaaaatagtaggtgtgaggattcaatgagccaatatatccaagatacttacgtgccacaatttaataaatgttagctattcctgttgaagcataaccttggagaaaggttactttacaggggggtgaggagtggggaagtgagagctgagctcattcttgatggatgaggagttagtcatgtgaggcgcttaggttaaaactacattcactataactcagtaaagcagtcccgcccactctccgacccatgcagaaataggcctagggagtcacatgtctcagttcagaaatctatcgaagtggcagagctggaattcaaacacaagcagccgttctctgctattccaccctggtgtccaagcaacatggtagggcagaaggaagaggatcttacaaagagtaagggaaagggagaggggcagaggctgcttctcagagccaccaaaggacaaaataagacaggtgtgagcccagtggaggaggcacggggcagagaccagccactgttgctggcacgctggtgcacgtagcactgtggcagatggacctggagaggaagcaggagggacagcacaatggagccaagaaaggacttagcatggccgggcgcggtggttcatgcctgtaatcccagcattttgggaggccaaggtgggcagatcacctgaggtcaggagtttgagaccagcctggccaacatggagaaatcccgtctctactaaaaatacaaaattagccaggcatggtgctgcatgcctgcaatcctgtagggaaaagaaagagagatcagactgttactgtgtctgtgtagaaagggaagacataagaaattccattttgacctgtaccttgaacaattggttggctgagatgctgttaatttgtgactttgccccaaatttgagctcacaaaaacatgtgttgtatggaatcaaggtttaaaggatctagggctgtgcaggacatgccttgttaataaaacgtttacaagc

SEQ ID NO: 795 - DNA, 596 bp, Artificial
  cDNA Sequence
gtggcggcggcggcggacccttggggtctggacgcaacggcggcgggagcatgaacgcccctccagccttcgagtcgttcttgctcttcgagggcgagaagaagatcaccattaacaaggacaccaaggtacccaatgcctgtttattcaccatcaacaaagaagaccacacactgggaaacatcattaaatcacaactcctaaaagacccgcaagtgctatttgctggctacaaagtcccccaccccttggagcacaagatcatcatccgagtgcagaccacgccggactacagcccccaggaagcctttaccaacgccatcaccgacctcatcagtgagctgtccctgctggaggagcgctttcgggtggccataaaagacaagcaggaaggaattgagtaggggccagagggggctctgctcggcctgtgagccccgttcctacctgtgcctgaccctccgctccaggtaccacaccgaggagagcggccggtcccagccatggcccgccttgtggccacccctcaccctgacaccgacgtgtcctgtacatagattaggttttatattcctaataaagtatagcgggagaga

SEQ ID NO: 796 - DNA, 342 bp, Artificial
  cDNA Sequence
atgtcttccccactgcagagagctgtgggagataccaagagggccttgtctgcatcttctagttcctctgccagtctacccttcgatgacagggactcaaaccatccctcagagggtaagaatactgactctttattagctgatgaaggcagtgactttgaagatagcttcaatcgcaatgtgaagaagaaagcagcaaaacgaccaccgaaaacaacaccggtgagtggcaaacaacgaaagaaagggtcccgagtggtacatcgtcatagccggaaacagtcagagccaccagccaatgatcttttcaatgcggtgaaagctgccaaaagtgacatgcag

SEQ ID NO: 797 - DNA, 941 bp, Artificial
  cDNA Sequence
ccgcccccctcccgtccccccgccgcccccgccctcagcgccgccgacaccaagcccggcactacgggcagctgcgcagggagcggtggtccgggcggcctcacatcggcggcgcctgccagcgtggacaagaaggtcatcgcagtgaaggttttgggaacagtaaaatggttcaatgtaaggaacggatatggtttcatcaacaggaatgacaccaaggaagatgtatttgtacaccagactgccataaagaataaccccaggaagtaccttcgcagtgtaggagatgaagagactgtggagtttgatgttgttgaaggagaagagggtgcggaggcagcaaatgttacagatcctggtggtgttcgagttcaaggcggtaaatatgcagcagatcgtaaccattatagacgctatccacgtcataggggtcctccacgcaattaccagcaaaattaccagaacagtgagagtggggaaaagaccgagggatcggagaatgctcccgaaggccaggcccaacaatgccggccctaccgcaggcaaaggttcccaccttactacatgcggagaccctatgggtgtcgaccacagtattccagccctcctgtgcagggagaagtgatggagggtgctgacaaccagggtgcaggagaacaaggtagaccagtgaggcagaatatgtatcggggatatagaccacgattccgcaggggccctccttgccaaagacagcctagagagtacggcaatgaagaagataaaatcaaggagatgagacccagggtcagcagccacctcaacgtcggtaccgcagcaacttcaattaccaacgcagatgcccagaaaaccctaaatcacaagatggcaaagagacaaaatcagccaatccaccagctgagaattcgtctgctcccgaggctgagcagggcggggctgag

SEQ ID NO: 798 - DNA, 573 bp, Artificial
  cDNA Sequence
ctagatctaaagcttaaggactatggagtggatctcattgaagtttcagacaatggatgtggggtagaagaagaaaactttgaaggcttaactctgaaacatcacacatgtaagattcaagagtttgccgacctaactgaggttgaaactttcggctttcagggggaagctctgagctcactgtgtgcactgagcgatgtcaccatttctacctgccacgcatcggcgaaggttgggactcgactggtgtttgatcactatgggaaaatcatccagaaaaccccctacccccaccccagagggatgacagtcagcgtgaagcagttattttctacactacctgtgcgccataaggaatttcaaaggaatattaagaaggtacaacgtgcctgcttccccttcgccttctgccgtgattgtcagtttcctgaggcctccccagccacgcttcctgtacagcctgcagaactgactcctagaaggaccccacccccctccccccacccctgctcctaggaggacaacgtgatcactgtattcagctccatcaagaatggtccaggttcttctaga

SEQ ID NO: 799 - DNA, 604 bp, Artificial
  cDNA Sequence
gcggaggggcaggtcctggtgcttgatggtcgaggccatctcctgggccgcctggcggccatcgtggctaagtaggtactgctgggccggaaggtggaggtcgtacgctgtgagggcatcatcatttctggccatttctacagatacaagttgaagtacctggtcttcctccgcaagcagatgaacaccaacccttcccgaggcccctaccacttccgggcctctagccgcaccttccggctgacctcgaggcatgttgccccacaagacaaagcaaggccgggccgccctggagcgcctcaaggtgtttgacggcatcccaccgccctatgacatgaaaaagcggatggtggttcctgctgccctcaaggtcatgcatctgaagcctacaagaaactttgcctacgtggggcgcctggctcacgaggtttgctgtaagtacctggcagtggcatctaccctgaaggagaagaggaaggagaaagccaagatccactatcggaagaagaaacagctcatgaggctatggaaaccgggtgaaaagaacgtggagaagaaaactgacaaatacacagaagctctcaagacccatggactcctgatc

SEQ ID NO: 800 - DNA, 567 bp, Artificial
  cDNA Sequence
gtgtgtcctcggcggcctggcgccggccgtcgctgtacggtgagccccagggaggcggatctgggccccgagaaggacccccgcctggatttgccccgtaggcccggcccgggcccctcgggagcagaacagctttggtgaggtggacaggaggtgacctcgcgagcagacgcgcgcgccagcgacagcagcccgccccggcctctcgggagccgtggggcagaggctgcggagccccaggagggtctatcagccacagtctctgcaagtttccaagagcagcagaaaatgaacacattgcaggggccagtgtcattcaaagatgtggctgtggatttcacccaggaggagtggcagcaactggaccctgatgagaagatagcatacggggatgtgatgttggagaactacagccatctagtttctgtggggtatgattatcaccaagccaaacatcatcatggagtggaggtgaaggaagtggagcagggagaggagccgtggataatggaaggtgaatttccatgtcaacatagtccaggacctgccaaggcaaggggccctatt

SEQ ID NO: 801 - DNA, 2628 bp, Artificial
  cDNA Sequence
atggcctgggcctgggctcgtgaccttccctggaggccatggtggtggtggtggtggtggcaggtgtgttcccgtctccacccctcagggaagaagcaagttccaggagcctggacttttgccctgcgcactctctgtgtcagatggggagacagccatgaggacagacacttgaagtaccctataactggcaccatgcaagagagacaggcaggaggagactgtgggagctcagaggagacacttgtgctggcctggatcagggagaaaggaggggtgtcgggaggcttcctggaagaagtggcttctggattaattattgaacctgaaagtcactgcgcgctcttctcgcccgaagccgcaggtggctgcgatgggacggaagccatgaatggtgccggccctggccccgccgcagccgccccggtcccagtcccggtcccggtcccggactggcggcagttctgcgagctgcatgcgcaggcggccgccgtggactttgcgcacaagttctgccgtttcctgcgggacaacccagcttacgacacgcccgacgccggcgcctccttctcccgccacttcgccgccaacttcctggacgtcttcggcgaggaggtgcgccgcgtgctggtggctgggccgacgactcggggcgcggccgtgagcgcagaggccatggagccggagctcgcggacacctctgcactcaaggcggcgccctacggccactcgcggagctcggaggacgtgtccacgcacgcggccaccaaggcccgcgttcgcaagggcttctcgctgcgcaacatgagcctgtgcgtggtggacggcgtgcgcgacatgtggcaccggcgcgcctcgcccgagcccgacgcggcagctgccccgcgcaccgccgagccccgcgacaagtggacgcggcgcctgaggctgtcgcggacgctggctgccaaggtggagctggtggacattcaacgcgagggggcgctgcgcttcatggtggccgacgacgcggccgcgggctccgggggctcggctcagtggcagaagtgccgcctgctcctgcgcagggctgtggccgaggaacgcttccgcctggagttcttcgtgccgcccaaagggctggccatcaggtccctggcagtagtgtcacgtcttctccaaggtggcccccctgctttggaaagtgggaatagctgtaacaatagtgcccaccctctgagagcccacagtgtgtccagaccccagcctggtgggcatctgcacagacacactgtcatcctctgggtaccccaccccagcgagtgtctgctgccctcggagaaggggaaggagcagctggtgcccgcccccgccccactccaccgcttagtcccagcagagcccactaattttgctgctggcagagggcagcgttcctgcagggtcactgggcccttcccctcctttgtgtcatgcaaatttgaggtgccagccctggcctccaggcccaaggtcagcatcccactgtcagccatcattgaggtccgcaccaccatgcccctggaaatgccagagaaggataacacattcgtcctcaaggtagagaatggagccgaatacatcttggagaccatcgactctctgcagaagcactcgtgggtagctgacatccagggctgcgtggaccccctctgtgaggcctgctctatggggccagggcctggggacctggaaggaagttggaccaggtcttgtcttcaccccaagagagcctcagagcactgggagttgggcagagatggcgaacagggtgcagagacggatcccgaggctgaacccgagctggagctatccgactacccatggttccacgggacactgtcccgggtcaaggctgctcaactggttctggcaggggggccccggaaccacggcctcttcgtgatccgccaaagtgagactcggcctggggagtacgtgctgaccttcaacttccagggcaaggccaaggcatggccccaccgtgcaggaggtagcacctccaccagggacatttccttggcaagcagccacccttacagttcctccgacaaccagcacctgcgcctgtccctgaacggccacggccagtgtcacgtacagcatctgtggttccagtctgtgcttgacatgctccgccacttccacacacaccccatcccactggagtcagggggctcggccgacatcacccttcgcagctatgtgcgggcccaggaccccccaccatgtggccagcccaggtccccactcacgccctgccgtcgccttgttgcagagccgggccccacgccccctgccgcgcccgcgtccccggcctgctggagcgactcgcccggccagcactacttctccagcctcgccgcggccgcctgcccgcctgcctcgccctccgacgccgccggcgcctcctcgtcttccgcctcgtcgtcctctgccgcgtcggggcccgcccccccgcgccccgtcgagggccagctcagcgcgcggagccgcagcaacagcgccgagcgcctgctggaggccgtggccgccaccgccgccgaggagcccccggaggccgcgcccggccgcgcgcgcgccgtggagaaccagtactccttctactag

SEQ ID NO: 802 - DNA, 2312 bp, Artificial
  cDNA Sequence
cggctggagcgcatctggtcctccgcgcggaaagcgctgcttttgcctggccgccctagccgctggctcatccaagtggccttcgccgctctcttgcgtcccaaccagagcgctggccacctcgccgcccagctcacgccgcgcccgcgctcccaggctccgggttttcttaaatgttttcttggagccttaaagatggagatgacagaaatgactggtgtgtcgctgaaacgtggggcactggttgtcgaagataatgacagtggagtcccagttgaagagacaaaaaaacagaagctgtcggaatgcagtctaaccaaaggtcaagatgggctacagaatgactttctgtccatcagtgaagacgtgcctcggcctcctgacactgtcagtactgggaaaggtggaaagaattctgaggctcagttggaagatgaggaagaagaggaggaagatggactttcagaggagtgcgaggaggaggaatcagagagttttgcagacatgatgaagcatggactcactgaggctgacgtaggcatcaccaagtttgtgagttctcatcaagggttctcgggaatcttaaaagaaagatactccgacttcgttgttcatgaaataggaaaagatggacggatcagccatttgaatgacttgtccattccagtggatgaggaggacccttcagaagacatatttacagttttgacagctgaagaaaagcagcgattggaagagctccagctgttcaaaaataaggaaaccagtgttgccattgaggttatcgaggacaccaaagagaaaagaaccatcatccatcaggctatcaaatctctgtttccaggattagagacaaaaacagaggatagggaggggaagaaatacattgtagcctaccacgcagctgggaaaaaggctttggcaaatccaagaaaacattcttggccaaaatctaggggaagttactgccacttcgtactatataaggaaaacaaagacaccatggatgctattaatgtactctccaaatacttaagagtcaagccaaatatattctcctacatgggaaccaaagataaaagggctataacagttcaagaaattgctgttctcaaaataactgcacaaagacttgcccacctgaataagtgcttgatgaactttaagctagggaatttcagctatcaaaaaaacccactgaaattgggagagcttcaaggaaaccacttcactgttgttctcagaaatataacaggaactgatgaccaagtacagcaagctatgaactctctcaaggagattggatttattaactactatggaatgcaaagatttggaaccacagctgtccctacgtatcaggttggaagagctatactacaaaattcctggacagaagtcatggatttaatattgaaaccccgctctggagctgaaaagggctacttggttaaatgcagagaagaatgggcaaagaccaaagacccaactgctgccctcagaaaactacctgtcaaaaggtgtgtggaagggcagctgcttcgaggactttcaaaatatggaatgaagaatatagtctctgcatttggcataatacccagaaataatcgcttaatgtatattcatagctaccaaagctatgtgtggaataacatggtaagcaagaggatagaagactatggactaaaacctgttccaggggacctcgttctcaaaggagccacagccacctatattgaggaagatgatgttaataattactctatccatgatgtggtaatgcccttgcctggtttcgatgttatctacccaaagcataaaattcaagaagcctacagggaaatgctcacagctgacaatcttgatattgacaacatgagacacaaaattcgagattattccttgtcaggggcctaccgaaagatcattattcgtcctcagaatgttagctgggaagtcgttgcatatgatgatcccaaaattccacttttcaacacagatgtggacaacctagaagggaagacaccaccagtttttgcttctgaaggcaaatacagggctctgaaaatggatttttctctacccccttctacttacgccaccatggccattcgagaagtgctaaaaatggataccagtatcaagaaccagacgcagctgaatacaacctggcttcgctgagcagtaccttgtccacagattagaaaacgtacacaagtgtttgcttcctggctccctgtgcatttttgtcttagttcagactcatatatggatttcaaatctttgtaataaaaattatttgtatttttaag

SEQ ID NO: 803 - DNA, 291 bp, Artificial
  cDNA Sequence
gccaagattgtgccattgcactccagcttgggtgacagagcaagactctgtctccaaaaaaaaaaaaaaaaaaccgggaaaaagcaacaagaaggaagagcaatggcgacactggatcgcaaagtgcccagtccggaggcgtttctgggcaaaccctggtcctcctggatcgacgccgccaaattacactgctccgacaatgtagatttagaagaggctggaaaagagggtggaaaaagcagggaggttatgaggcttaataaagaaggtaagtggagctactggcatttt

SEQ ID NO: 804 - DNA, 342 bp, Artificial
  cDNA Sequence
atgtcttccccactgcagagagctgcgggaggtaccaagagggccttgtctgcatcttctagttcctctgccagtctacccttcgatgacagggactcaaaccatccctcagagggtaagaatactgactctttattagctgatgaaggcaatgactttgaagacagcttgaatcacagtgtgaagaagaaagcagcaaaacgaccaccaaaagcaacaccggtgaatggcaaacatccagagaaagggtcccgagtggtacatcgtcatagccggaaacagtcagagccaccagccaatgatcttttcaatgctgtgaaagctgccaaaagtgacatgcag

SEQ ID NO: 805 - DNA, 1489 bp, Artificial
  cDNA Sequence
attaaggagcggaggcttttggagctgctaaaatgccggattacctcggtgccgatcagcggaagaccaaagaggatgagaaggacgacaagcccatccgagctctggatgagggggatattgccttgttgaaaacttatggtcagagcacttactctaggcagatcaagcaagttgaagatgacattcagcaacttctcaagaaaattaatgagctcactggtattaaagaatctgacactggcctggccccaccagcactctgggatttggctgcagataagcagacactccagagtgaacagcctttacaggttgccaggtgtacaaagataatcaatgctgattcggaggacccaaaatacattatcaacgtaaagcagtttgccaagtttgtggtggaccttagtgatcaggtggcacctactgacattgaagaagggatgagagtgggcgtggatagaaataaatatcaaattcacattccattgcctcctaagattgacccaacagttaccatgatgcaggtggaagagaaacctgatgtcacatacagtgatgttggtggctgtaaggaacagattgagaaactgcgagaagtagttgaaaccccattacttcatccagagaggtttgtgaaccttggcattgagcctcccaagggcgtgctgctctttggtccacccggtacaggcaagacactctgtgcgcgggcagttgctaatcggactgatgcgtgcttcattcgagttattggatctgagcttgtacagaaatacgtcggtgagggggctcgaatggttcgtgaactctttgaaatggccagaacaaaaaaagcctgccttatcttctttgatgaaattgatgctattggaggggctcgttttgatgatggtgctggaggtgacaatgaagtgcagagaacaatgttggaactgatcaatcagcttgatggttttgatcctagaggcaatattaaagtgctgatggccactaacagacctgatactttggatccagcactgatgaggccagggagattggatagaaaaattgaatttagcttgcccgatctagagggtcggacccacatatttaagattcacgctcgttcaatgagtgttgaaagagatatcagatttgaactgttagcacgactgtgtccaaatagcactggtgctgagattagaagcgtctgcacagaggctggtatgtttgccatcagagcacggcgaaaaattgctaccgagaaggatttcttggaagctgtaaataaggtcattaagtcttatgccaaattcagtgctactcctcgttacatgacatacaactgaaccctgaaggctttcaagtgaaaactttaaattggaatcctaaccttatatagacttgttaataaccaattcataaacaaataaatggcttcaaaattgtatgcttttttccatatctcttcttgtaatataataaaaggtgatttctaatgtta

SEQ ID NO: 806 - DNA, 1366 bp, Artificial
  cDNA Sequence
gcaaagagcttgtggagtctggcaggaagagcaacgaaggtgaaggtgaagacattgagctggaatccggacaactatgtccgcaaaaccaagttggacttacagattattccaagaaactgtgatcctaccttacatccttttgaggtcctgcaagaatgtgtaagagttttaaatgctaccaaactggaaggagtatttgcaaaaccatgcctggcttggctggatggtcacgagatggagtgagttgcttggcaaagcatccaaagatcctggctactctcctttctaggggatgtgatggagcagttagaatttggaacctgactcagctgaaatgtatccgtataatacaagcacatgaaggttttgtacagggaatacgtgctcacttttgtgggacttcttttttcactgttggtgatgacaaaactgtgaagcagtggaaaatggatgggccaggctacggagaggaggaagggccattacatacaatattaggaaagacagtgtatactgggattgatcatcactggaaagaagctgtttttgccacatgtggacagcaagtagacatttgggatgaacaaataactaatcctataagttcaatgacctggagatttgacagtataagtagtggtaaatttaatgcaattgagacatttatcttgggaagttgtgcttccgacaggactacagtactgtatgatatgaggcaagctactcctctgaaaaaggttatcttagatatgagaacaaatacagtctgttgaaaccctatggaagctttcatttttatggcagcaaatgatgattataacttatttacttttgatatgcgtgcactcatgtaatggtccatatggatcatgtatctgcagtgcttgatgtggattactctcccactgggaaagagtttgtgtctgctagtttcaataaatctatttgaatctttcctgtagataaaagtcaaagcagggaggtatatcacacaaagtgaaagcaacatgttatgtgtgtaaaatggacttctgacagcaagtatattatgtatggatctgatgaaatgaacagttacctatggaaagctaatgcttctgcaaaatttggtatgcttacatcacaagaaaaagcagccaagtattataaccagaaactgaaggagaaatttcagcgtcatcctcatatacaaccgatagctcgtcattgacatctaccaaattctgtctacagcccaattcaggaacagtgcatcatgaaagaagcttgtcgatgagaggaagtgaatcacgttaaacacagcaagcctggatctgtgccaattgtgtcagagaagaagaaacacatagtggcagttgtaaaa

SEQ ID NO: 807 - DNA, 376 bp, Artificial
  cDNA Sequence
gcctttggtttgcatacagagtctgccctaaattctccaagaattggaagtccactgcgtccaaagaaatatactgaaacaaataatcttcaggcaatgcctagagatgtgtctaccagtttctctgacttggactagagccttggataaaagtaaaaaagagacattgtccatttccagtgaaattgaaggactcaacaccagtatctgatgatgtatcaagtcaactatatcctccagaagaacaggaagaacttgattttttatttgatgaacagacgcaacaaatagaagaaaaagaaacacatttactgattggtctcgtaatgattcagattatgaaattgatgagctgaatttcaacaagatgttgatt

SEQ ID NO: 808 - DNA, 522 bp, Artificial
  cDNA Sequence
gagggaaggagaggttggaatgagggaagcagaggttggaatgatggaagcagaggttggaatgatggaagcagaggctggaatgagggaagcagaggctggaatgagggaagcagagattggaatgatggaagcagaggttggaatgagggaagaagaggttggaatgatggaagcagaggttggaatgatggaagcagaggttggaatgatggaagcagaggttggaatgatggaagcggaagttggactgatggaagcagaggttgtaatgatggaagcagaggttggactgatggaagcagaggttggaatgagggaagcagaggttggaatgatagaagcagaggttggaatgaggtaaggagaggttggaatgagggaaggagaggttggaattgtggaagcagaggttggaatggtagaagcagaggttggaatggtggaggcagaggttggaatgatggaggcagaggttggaatgatggaggcagaggttggaatgatggaggcagatgttgg

SEQ ID NO: 809 - DNA, 282 bp, Artificial
  cDNA Sequence
gaggagaaggtggtgtactcgcggtcgcaactgtcgctggctgacagcaccaaggcgctgggcgacgccttcaagctcttcatgccccgcagcacggagttcatgagctcggacgcggagctctggagcttcctctgcagcctcaagcaccagttctccccgcacatcctgcgcagcaaggacgtctacggctactcctcctgccgggccctggtacccgaccccccggggccccctacagcccgcggccaggcgcgccggccggttccgcgcgcagcggcc

SEQ ID NO: 810 - DNA, 2376 bp, Artificial; identical to SEQ ID NO: 481
  cDNA Sequence

SEQ ID NO: 811 - DNA, 1623 bp, Artificial
  cDNA Sequence
atggaggttatgatctatgttgccatcatgttcatttcccaggatagaatcctaaaagaattactgggtgaacaggaagtttgtgtgtatgttacagcccgaagtgtgcctcttggggacaaatcacatattcagtgttttacattcataaaggatatatatttcctgaagaaagttgtcaatcacagcaagaccttcaccacttctcttgagaatgttgggtcacacatgacaaagggcattacttttctcaacctttattatgtggctgtttacttacctggtcatttcttccacctacttaatgttcaacatccagacctgatctgccacaatctctttctgacaaataatgaaatgattgatatgctacctcattgccctttacagtcattgtcagggtccctggtattggattgttgttctggaaagctctatagagcactgctcagccagtcgtctttattacagcttctgcagaacacttgcttagactgtgagaagatggctgcgttgcactgcgcgctctactgcggtcaaggtgcgcagttcctggaagcccaggaaattcctggaataactcttgtgacagaagacattgcattgcctcttatgaaggtgctcagctttaagggctactgggaaaaactgaactccaacctagaatatgttaagtacgccaagccacacttccactataacaacagtgtggtcaggagagagtggcacaacctgatctctgaagagaaaacaggaaaaagaaggtctgcggcatacgtgaggaatattcttgataatgcagtagccaagattaacacccctcctgcaggaggaagacagccaccagcggctgctcatggggctgaggacactgcaatttggagaaatagtcgtggcagtgctgctgaatttgcagtttttcacatcatgaccaggattctggaagctacaaacagtttgtttttacctctgcctcctgaaactttatacccattgaacagcaattacttatcccctactccccggttcctggcaagcactgttctaccttctgtgtctatgagtttgactactttagatactgcagactgcaaggtgtatgggagcagcagttgtgcctgttttgctcatttttatactcttagccccttgccatttcatactctgcacaccatcctcggggtccagtgtctccctttgcataacctgctgcattgcattgacagtggagtgttgcttctcactgaaacagctgtcataaggctcatgaaactggataatacagagaaaaatgaaaaactgaaattcagtatcattgtgcggcttcctccgcttattgggcagaagatttgtagactttgggatcatcctatgagttctaacatcatttcgcggaaccacgtgacgcgactgcttcagaactataagaaacagcctcggaattctatgattaacaagtcatcgttcagtgtagaatttctgcctctgaactacttcattgaaattctgacagatatagagtcctccaatcaactgtatccttttgaaggacatgacaatgtggatgcagaatttgtagaggaagcagctctgaaacacaccgcgatgcttttaggcttatga

SEQ ID NO: 812 - DNA, 807 bp, Artificial
  cDNA Sequence
atgcccggccatgacaacatcttaataactatgctttatgttttagaaaacgattatgagagcttacatgtattaaatgttgaaagaaatggaaatattatttatacctataaggatgataagggaaatgtcgtctttggattatatgattgtcaaaccagacaaaatgaggacttccctggtagtgcatacaagagtgaacatgacctaaactggttggatacaagagaatactttgctgcaagtttagttcagtctactaaagaaggaaaaaggaacgaacttcaaccatcaaagtgcttgactttgttggttgaaatccaccctgttaacaatgtgaaggttctaaaggctgtggatagctatatttgggttcagtttctctacccacatattgaaagtcatcctcttccagagaaccatctgttactgatttcagaagagaaaattgaacaatttcgtatccatgtcgcccaagaagatggaaatagagtggtgattaaaaattctggccatctcccaagagacagaatagctgaggatttcgtttgggctcagtgggatatgtcagaacagagattatattacattgacctgaagaaatcaaggagtatcttaaaatgtatccagttttatgctgatgagagctataacttaatgtttgaagtacccttggacatatcattaagcaactcaggatttcttgtcaactttggatgtgattatcatcaataccgagataaattttccaaacacctgactctgtgtgtttttaccaaccatacaatttctcgtgaccattactag

SEQ ID NO: 813 - DNA, 3429 bp, Artificial
  cDNA Sequence
taaatggcagccaatggagggtggtgttgcgcggggctgggattagggccggggcgaatggctggcaatcttactgggattacagaacaaagagcctccccgcgctcccgctctccgctcctctccccgcgccgccccgccctccgccgcagcccgcgccgggggtgggggccgccgagcgccagccccccggccggccgattccccccccgcgccccctccccgcgcctccctccccgccctcgccgcgccgccgtcctcgcctccctctgcctctccttcccccattctcccggattaattaaggaggcagcggcaggaggctgagtcctggccgcgggccggggccggggcgccgctggcaggagcgcttggggatcctccaaggcgaccatggccttgctgggtaagcgctgtgacgtccccaccaacggctgcggacccgaccgctggaactccgcgttcacccgcaaagacgagatcatcaccagcctcgtgtctgccttagactccatgtgctcagcgctgtccaaactgaacgccgaggtggcctgtgtcgccgtgcacgatgagagcgcctttgtggtgggcacagagaaggggagaatgttcctgaatgcccggaaggagctacagtcagacttcctcaggttctgccgagggcccccgtggaaggatccggaggcagagcaccccaagaaggtgcagcggggcgagggtggaggccgtagcctccctcggtcctccctggaacatggctcagatgtgtaccttctgcggaagatggtagaggaggtgtttgatgttctttatagcgaggccctgggaagggccagtgtggtgccactgccctatgagaggctgctcagggagccagggctgctggccgtgcaggggctgcccgaaggcctggccttccgaaggccagccgagtatgaccccaaggccctcatggccatcctggaacacagccaccgcatccgcttcaagctcaagaggccacttgaggatggcgggcgggactcgaaggccctggtggagctgaacggtgtctccctgattcccaaggggtcacgggactgtggcctgcatggccaggcccccaaggtgccaccccaggacctgcccccaaccgccacctcctcctccatggccagcttcctgtacagcacggcgctccccaaccacgccatccgagagctcaagcaggaagcaccttcctgcccccttgcccccagcgacctgggcctgagtcggcccatgccagagcccaaggccaccggtgcccaagacttctccgactgttgtggacagaagcccactgggcctggtgggcctctcatccagaacgtccatgcctccaagcgcattctcttctccatcgtccatgacaagtcagagaagtgggacgccttcataaaggaaaccgaggacatcaacacgctccgggagtgtgtgcagatcctgtttaacagcagatatgcggaagccctgggcctggaccacatggtccccgtgccctaccggaagattgcctgtgacccggaggctgtggagatcgtgggcatcccggacaagatccccttcaagcgcccctgcacttatggagtccccaagctgaagcggatcctggaggagcgccatagtatccacttcatcattaagaggatgtttgatgagcgaattttcacagggaacaagtttaccaaagacaccacgaagctggagccagccagcccgccagaggacacctctgcagaggtctctagggccaccgtccttgaccttgctgggaatgctcggtcagacaagggcagcatgtctgaagactgtgggccaggaacctccggggagctgggcgggctgaggccgatcaaaattgagccagaggatctggacatcattcaggtcaccgtcccagacccctcgccaacctctgaggaaatgacagactcgatgcctgggcacctgccatcggaggattctggttatgggatggagatgctgacagacaaaggtctgagtgaggacgcgcggcccgaggagaggcccgtggaggacagccacggtgacgtgatccggcccctgcggaagcaggtggagctgctcttcaacacacgatacgccaaggccattggcatctcggagcccgtcaaggtgccgtactccaagtttctgatgcacccggaggagctgtttgtggtgggactgcctgaaggcatctccctccgcaggcccaactgcttcgggatcgccaagctccggaagattctggaggccagcaacagcatccagtttgtcatcaagaggcccgagctgctcactgagggagtcaaagagcccatcatggatagtcaaggaactgcctcctcacttggcttctctccccctgccctgcccccagagagggattccggggaccctctggtggacgagagcctgaagagacagggctttcaagaaaattatgacgcgaggctctcacggatcgacatcgccaacacactaagggagcaggtccaggaccttttcaataagaaatacggggaagccttgggcatcaagtacccggtccaggtcccctacaagcggatcaagagtaaccccggctccgtgatcatcgaggggctgcccccaggaatcccgttccgaaagccctgtaccttcggctcccagaacctggagaggattcttgctgtggctgacaagatcaagttcacagtcaccaggcctttccaaggactcatcccaaagcctgatgaagatgacgccaacagactcggggagaaggtgatcctgcgggagcaggtgaaggaactcttcaacgagaaatacggtgaggccctgggcctgaaccggccggtgctggtcccttataaactaatccgggacagcccagacgccgtggaggtcacgggtctgcctgatgacatccccttccggaaccccaacacgtacgacatccaccggctggagaagatcctgaaggcccgagagcatgtccgcatggtcatcattaaccagctccaaccctttgcagaaatctgcaatgatgccaaggtgccagccaaagacagcagcattcccaagcgcaagagaaagcgggtctcggaaggaaattccgtctcctcttcctcctcgtcttcctcttcctcgtcctctaacccggattcagtggcatcggccaaccagatctcactcgtgcaatggccaatgtacatggtggactatgccggcctgaacgtgcagctcccgggacctcttaattactagacctcagtactgaatcaggacctcactcagaaagactaaaggaaatgtaatttatgtacaaaatgtatattcggatatgtatcgatgccttttagtttttccaatgatttttacactatattcctgccaccaaggcctttttaaataagtaaaaaa

SEQ ID NO: 814 - DNA, 401 bp, Artificial
  cDNA Sequence
gtggcgacggtggcggacacttggggtctggacgcaacggcggcgggagcatgaacgcccctccagccttcgagtcgttcttgctcttcgagggcgagaagatcaccattaacaaggacaccaaggtacccaatgcctgtttattcaccatgaacaaagaagaccacacactgggaaacatcattaaatcacgtgcctgcttccccttcgccttctgccgtgattgtcagtttcctgaggcctccccagccacgcttcctgtacagcctgcagaactctgccccagagcacatcagctatgtgccccagctctcaaacgacaccttggcggggaggctcaccctgtccaccttcacgctggagcagcctctaggccagttcagcagccacaacatctctga

SEQ ID NO: 815 - DNA, 1857 bp, Artificial
  cDNA Sequence
ggaaggctgataaccatcattttactcgttacttccattttcttctacctcagtttaaaagatgtgataatatgtggtcaagttaatcatgcctggatgttgatgacacaactaaactcactgtggaatgctattgatttttcctcagtgaaaaatgtgattccagataaatatatagtgtctactttgcaaaggtggcgtttaaatgtgctgcgtttgaattttcgtggttgtcttctccgacccaaaactttcagatctgtcagccactgtaggaacttgcaagagttgaatgtctctgactgcccaacattcacagatgaatcaatgagacacatttctgagggctgcccgggggtcctgtgtctcaatctgtctaacacaactatcaccaacaggacgatgcgactcctgccgaggcacttccacaacttacagaatcttagtttggcttattgcagacggttcacagacaaaggcttacagtacctgaacttggggaatggatgccacaagctcatctatctggacctctctggctgcacccagatttcagtccaaggcttcaggtacattgcaaacagctgcactggaattatgcatcttaccattaatgacatgccaactctgacggacaactgtgtaaaagctttagttgaaaaatgctctcgtattacatcgctggttttcactggtgcaccgcatatctccgattgtactttcagagctctttctgcttgtaaactcagaaagatccgatttgaaggaaataaaagggttactgatgcatccttcaaatttatagacaagaattatccaaatctcagtcacatttatatggctgactgcaagggaataacagacagcagcctcagatccctttcacctttgaagcaactgactgtgttgaatttggcaaattgtgtaagaattggtgatatgggactaaagcaatttcttgatggtcctgcaagcatgaggataagagagctaaatttaagcaactgtgtgcggctaagtgatgcctctgttatgaaactatctgagcgctgccctaatttaaactacttgagtttacgaaattgtgaacatttgactgcccaaggaattggatatattgtaaacatcttttccttggtatcaatagatctctctggaacagacatctctaatgagggtttgaatgtgctttccagacataaaaaattgaaggaactttctgtatctgaatgttatagaatcactgatgatggaattcaggcattctgcaaaagctcactgatcttggaacatttggatgtctcttattgctcccagctgtcagatatgattatcaaagcactggccatttactgcattaacctcacatctctcagcattgctggctgtccaaagattactgactcagcaatggagatgttatcggcaaaatgccattacctgcacattttggatatctctggttgtgtcttgcttactgaccaaatccttgaggaccttcagataggctgcaaacaactccggatccttaagatgcaatactgcacaaatatttccaagaaggcagctcaaagaatgtcatctaaagttcagcagcaggaatacaacactaatgaccctccacgttggtttggctatgatagggaaggaaaccctgttacagagcttgacaacataacatcatctaaaggagccttagaattaacagtgaaaaagtcaacatacagcagtgaagaccaagcagcgtgaccttcagcctcaagcaggaagaacaaaaaatcaagaacttggcaagttttctccatttgttgcaagtatgtttactagctgaatctcaataacaatgtaaacaagcaa

SEQ ID NO: 816 - DNA, 1901 bp, Artificial
  cDNA Sequence
cgtgggccgccagactcgggagaggctccgtcttgtgcaagggtcctgtgggctggctgcactggcctctgcggtggtgcctgccagaatgccccacttggaaaacgtggtgctttgtcgcgagtctcaagtgtccatcttgcagtccttgtttggagagagacatcatttcagctttccatccatttttatttatggacatactgctagtggaaagacctatgtaacacaaacgttgttgaaaactttagagctcccacatgtgtttgtgaattgtgttgaatgctttacattgaggctgcttttggaacaaattttaaacaaattgaatcatcttagttcttcagaggatggatgttctactgaaataacctgtgaaacatttaatgactttgttcgcttgtttaaacaagtaaccacagctgaaaatcttaaagatcagactgtatatattgttctagataaagcagagtatctaagagatatggaagcaaatcttttgcctggatttcttagattacaagaattggctgacagaaatgtgactgttctctttctcagtgaaattgtttgggaaaagtttcgtccaaatactggatgctttgagccgtttgtcttatatttccctgattacagcataggcaaccttcaaaagatcctgtcccatgatcatcctccagagtattcagctgatttctatgctgcctacattaacattcttcttggagttttctacactgtttgtcgagatttgaaagagctcagacatctggcagtacttaattttcctaaatattgtgaacccgtggttaaaggagaagcaagtgaacgtgatactcgcaaactgtggagaaatattgaacctcatttgaagaaagctatgcagactgtttatctcagggaaatatcaagttcccagtgggaaaagctacagaaagatgacacagatccggggcaactgaaaggcctctcagcgcatactcatgtggaacttccatattactctaagttcattctaattgctgcataccttgcttcatacaatccagcaagaactgacaagaggttttttcttaagcatcatggaaaaatcaagaaaaccaactttctaaaaaaacacgaaaagacaagcaatcatctccttgggccaaaaccatttccactagacagattattagcaatattatatagtatcgtggacagcagagttgctccaacagcaaatattttttcccagattacctctctagtgacccttcagctgttaaccctggttggccatgacgatcagcttgatggaccaaaatacaaatgcacagtgtctctagacttcatcagagctattgcaaggacggtgaactttgacataataaaatacttgtatgatttcttgtgaaaacaagcttcaaagccatatggacactgtgacaatgactaagccaagctgtgttcatccagctacttagctggccaaggagaggagttctttggctctattggatttgtccaaacaggtgctggcccagcatggaatctgatgaaaatattctgattggtctgggtggatgtgagcagaagactatttaccagggaccctggagtatttggaagcaacgtgttaattataaacagcagggtttgagcacaatctgttctactcttaatgatgttatcttaacactgaaattgcctgaaacccatttacttaggactacattttgctctgtgaactatcccctgcgctttgaacgtgccagcagcccttgtttatatgcccattcttttcacttcctctccacaggagcctctgcagtcgcttgccaaagcagattttcctaaggccactgttttaaaagatcatagttgcaaaatataataaatacaagttctttttaaaatcc

SEQ ID NO: 817 - DNA, 1818 bp, Artificial
  cDNA Sequence
atggggcggggcctctgggaggcgtggcctccggccggctcctctgctgttgccaagggaaactgccgcgaggaggcggaaggagcagaggaccggcagccggcgtcgaggcggggcgcgggaacgacggcggccatggcggcctcggggcccgggtgtcgcagctggtgcttgtgtcccgaggtgccatccgccaccttcttcactgcgctgctctcgctgctggtttccgggcctcgcctgttcctgctgcagcagcccctggcgccctcgggcctcacgctgaagtccgaggcccttcgcaactggcaagtttacaggctggtaacctacatctttgtctacgagaatcccatctccctgctctgcggcgctatcatcatctggcgctttgctggcaatttcgagagaaccgtgggcaccgtccgccactgcttcttcaccgtgatcttcgccatcttctccgctatcatcttcctgtcattcgaggctgtgtcatcactgtcaaagctgggggaagtggaggatgccagaggtttcaccccagtggcctttgccatgctgggagtcaccaccgtccgttctcggatgaggcgggccctggtgtttggcatggttgtgccctcagtcctggttccgtggctcctgctgggtgcctcgtggctcattccccagacctctttcctcagtaatgtctgcgggctgtccatcgggctggcctgtatccacctactgctattccatcgacctctcagagcgagtggcactgaagctcgatcagaccttccccttcagcctgatgaggaggatatccgtgttcaagtacgtctcagggtcttcagccgagaggagggcagcccagagccggaaactgaacccggtgcctggctcctaccccacacagagctgccaccctcacctgtccccaagccaccctgtgtcccagacgcagcacgccagtggtcagaagctggcctcctggccctcctgcacccccgggcacatgcccaccttgcctccgtaccagcctgcctccggcctgtgctatgtgcagaaccactttggtccaaaccccacctcctccagtgtctacccagcttctgcgggcacctccctgggcatccagccccccacgcctgtgaacagccctggcacggtgtattctggggccttgggcacaccaggggctgcaggctccaaggagtcctccagggtccccatgccctgagagaatttctagggaagtcatctcacttggccttctgaaggtcctccctaagagtctcctgacaaaagttacttattgaacacctctatgtgccaggctctgtgttgggtactttgatcaatgcccctgtttcagtctcatctgtactcacggcagccctgtggagtacggtgtactggcccagcttacagatgcagaaagcgagacgttctgccatcagataaagtcacgtggctctttagtaacacggacaaggctcctcgccaaggaactcgtggcagaagagggcagcagttggcagtagctgccgatgtctgtccccagctccaccattcctccctgtggctgtgccgtgctcgtggtttcagtgtccgtgtgtccatgtgtctgcccttcaggagctcgcagctggtgtgcttggcggtcccaggcctgtgtagtgtctctcccctgctgcgggcgcccccaccccgattcctctccccagaagcggtgggatgggcccccatgaactgcagcagcatgctgaggtgtccatgttgtctgcctttgtataaagaaacagcctctgaaaagaaaagaaaaagacg

SEQ ID NO: 818 - DNA, 2574 bp, Artificial
  cDNA Sequence
ggagaagcactacacctaatcctcttacctgctacaggcaatgtggcagagaattctccacctgggacttcagtgcacaagttttctgtgaagttatcagcatcattgtcacctgtgatcccaggatttccccagatagtcaactcaaatcccctcactgaagcttttagggtgaattggctgtcaggcacctactttgagatggggaaaatgacgcacagagagattaactacccaacgtcctctaccatccctccaagaagatcctactctccaaccgaaattgctcacaagagttactcctgcagccttccagacatgaaaatctccatggcagaatctggcccctccttggatagccttgacattctggaggatggcgagtctgggtcaccatttcttgtgactcatttgtactttctgggggttgtcaccactgggatggaacaactagattttgaaacaggaccaaacatatttgatttgcagatttatgtgaaggatgaggttggtgtcacagacctgcaagtcctgactgtccaggtaacagatgtgaacgagccacctcagtttcaaggcaacttggcagaacatctccgtgcagaccagccacatttcaatgctcatagtcacacgtacgtgagggtagtggctactgcattggccaggcacaggcttagatctagcattggttcccccttcctgggcaccttctgtgttgtggtgggcatgcagtatttcctgatttctcccccaaagagcttcagaatgtctgctaatggcaccctcttctccacaacagaattggactttgaagcaggacacagattccatctcatcgtggaggtgagggacagtggaggcctcaaagcctccacagagctccaggtgaacatcgtgaacctcaacgacgaagtccctcgctttaccccgacacgagtgtacacagtcctggaggaactgagtccaggaaccatcgtggccaatatcacagcggaggatcctgatgatgaaggttttcccagccacctcctctacagcattaccactgttagcaaatatttcatgataaatcagactggtacaatccaagtggcccaaaggatagaccgagatgcaggtgaattgagacaaaatcccaccatttccctggaagttctagtgaaggacagaccatatgggggtcaggagaatcgcatccagataaccttcattgtggaagacgtcaacgacaatcctgccacatgccaaaagttcaccttctccagtctccaccctgctctgtgctccaagacgctgacctggatggataccgtattagactgttttcatgctgctgataaagatatacctgtgactgggcgatttacaaaagaaagaggtttaattggacttacagttccacatggctggggaagcctcacaatcatggcagaaggcaaggaggagcaagtcacatcttacatggatggcagcaggcaaagagatagagcttgtgtagggaaactcctccttataaagccatcagatctcatgagacttagtcactatcacgagaacaactcaggaaagacttgcccccatgattccatttcctcctaccaggtccctcccacaacatgtaggaattcattagccctgaaggccaatgtgaaatccgtagctggactaactgcatttattactgaagataatctaaccaaggctcaagttccctctttgggctcttctagcgggaggaactctcagccaccctatgaacgccaagatgtgaggaagggcaacgaaagggacccctcctctgcagttccaggggcggaggtcttcagcctaaagcccagcctcgcgtcccaaggctgcataagggcgaacgtctacgtttatatcctaacaagcccagaaaatgagtttcctctcatttttgataggccatcctatgtatttgatgtgtcagaaagaaggcccttaaagaagttccatttacaaggggcagcaggcaaggtggcacatggagacaccgtaaatccacaccttcctggaaaaacaactcggtgtcatctgcaggttactgtgaacatccttgaagaaaatgatgaaaagccaatttgtactccaaactcttatttcctggccctcccagtggatctgaaagttggcacaaatattcagaatttcaagctgacatgtaccgaccttgattccagccccagatctttccgttattccattggcccaaacgtcaacaatcatttcaccttctctcccaatgctggttccaatgtcacacgcctgctgcttacatctcgctttgactatgctggtgggtttgataagatctgggactacaagctacttgtctacgtaactgatgacaacttgatgtctgacaggaagaaagcggaggctcttgttgagacaggaacagtgacactgagtattaaagtcattccccacccaaccactatcatcaccacgacccccagggagctgatttccatgggcatgctgccagttgctaccttcacaacccctctctgcttgttcagaagagtctttgcaagtcaatatccatga

SEQ ID NO: 819 - DNA, 3713 bp, Artificial
  cDNA Sequence
cagcagccgcagccgcctcgcgcccggtcccgcggtcgcagctccagccgcctcctccgcgcagccgccgcctcagctgctcgctctgtgggtcggtcctctccggcacttgggctccagtcgcgccctccaagcccttcaggccgccccagtgtcctcctccttctccggccagacccagccccgcgaagatggtggaccgcgagcaactggtgcagaaagcccggctggccgagcaggcggagcgctacgacgacatggccgcggccatgaagaacgtgacagagctgaatgagccactgtcgaatgaggaacgaaaccttctgtctgtggcctacaagaacgttgtgggggcacgccgctcttcctggagggtcatcagtagcattgagcagaagacatctgcagacggcaatgagaagaagattgagatggtccgtgcgtaccgggagaagatagagaaggagttggaggctgtgtgccaggatgtgctgagcctgctggataactacctgatcaagaattgcagcgagacccagtacgagagcaaagtgttctacctgaagatgaaaggggactactaccgctacctggctgaagtggccaccggagagaaaagggcgacggtggtggagtcctccgagaaggcctacagcgaagcccacgagatcagcaaagagcacatgcagcccacccaccccatccgattaggcctggctcttaactactccgtcttctactatgagatccagaacgccccagagcaagcgtgccacttggccaagaccgcgttcgacgacgccatcgccgagcttgacaccctcaacgaggactcctacaaggactccacgctcatcatgcagctcctccgcgacaacctcacgctctggacgagcgaccagcaggacgacgatggcggcgaaggcaacaattaaggccccaggggaactggcagcgcacgcggatgctactactgcagtctttatttttttcccatgagttgggggtcgggtgggggagggaaagggagggatgaccttcccagggagaaacccacgacctgtcctgtctttgatcgcctctttgacatttttgccaaaataccactagtggaaagtcaggctagctgtgctggtattggaatagcagcctcacactggcgtctggactgttctgtagattcatgcaagtggagctgtctgtctctaatttaacttattgctagataatagggttttcagatgaaaagaaaacttaaagaggaatggccctcattcagtaagttctgtggttccagtaaggatttttatgtacatacgctctcgtctctcgttttgggtactttctatctcatctgtctcggctctgcatgttttccagggtgtagcctacagacatggaacagtgtaaatcccagactgacagacttagaacctgaggtctcattcatccttatggtttaggccttgccagttttccgaagtctctgattagttgacagtattaacactaaattgcagtttacagtatttctacattacagccatatgtaacatcaagccatcgattgtgtacttttcctttgctagttgtttgggctttaacatccttattcagccttatccaggttggttttgctgttgatcggtctcctaggctaaatgagaatgaaagcgacttcaggtcaggtggctgtgggattttttttttttggtccttctttcctcttaacgtaaatccaccaccaaaattattaatcctcttgagagaaacgtgaaacgccacaaaaatagagaaaattcaggtctgtatgtcatggatcgtgttggtattttcagagaacatcccgcttctgaagctgctgcagctccctcctcagggatcacactgccgtcacccactctgcactggggcgtttcctactgcgcctcgtgctggcggacgcagctgggtgcagaagctgtggggtcggagaggcgtttggagaaggtctgtggtgcagtgtgtgaaaattcaggtgctagaagcctactggtagaaaaacccaaaaggaagagctatatccttaaccattctgtccaatttcgggagccttgtcagtgtgtcagtttttcctccccgaagacactccttccccaagtaattgtaggaagataaaaaaactgttaccagataacaaacactgaactcctatttgaccagaactttttcctctcgagatagttttttctttttaatgaaaaaagcataggaattggagattggcttgtctcacgcagccagtgcacatttggaattgacggaaacaacgttgctatttccacccatttgttttcggcagccttaaggccctcattctcatttcgggtgaatctgtctatctgtgaacgtggcccgcatgtgcattcttttttttatatatataaagtcagtgacgaggaactcccgagacgtgtaatgacaccacacttgttttctttgtttctttgttttatttaggcaagaagaggtgtgagtaattgaggaaaaactgacagatgcttttgctaataccaaaattgagcttacaattaggaactgagtatgtgtaacaggatacaggtgacagtgaagatagaagaaccacgatgaccacagactcaatgtgctctgtaacatcgcacagtttacccagcatgactttccttaggaggccccctcctcacgctagagtaaaagtcccagttaagtgaagcctaccagaagaactagtagaagaagctttgccgcttttgtgcctctcacaggcgcctaaagtcattgccatgggaggaagacgatttggggggggaggggggggggggcagggtaggtggggctttccctaatttatcttcatgtccagtgagcagtgttgcgtttttccttgtagcatttggaaatgatttactggaattacaaaacctatttttcctttaaatttcagctttggctctggctgctttttagaataatgcaagataaaaatcacacctgagggctgaaaacggagagggaatgggagacttgatatttaagcagcttgaatggtttttcttttctttatttttaaagaaatgcacttgcctatgatactgtctctccagtgaaatgattactcctccattactctattgatacaatattgtgcatgctagtgttgtatttctatacagtagcttgaaattgattaacttatactgtaggtgttatgtattcctatgacaaaaaaaattaagtcttcaaattttttaaaggttttttttttttaatttaatttttccttttgggggtaaagtttgctctaccaaatagtgattgtaacaaattgatctgttttggatgttgctatagtgacatgcagttatatattttgtttttaaaagggggggagcaaaagaaacaccagtgttagcttaatcttaatgtctggtgtttgtcatggtgaaattataactattacagtgttggagaacaacaaatatgttctctgaatgagcctttgtgctttttgtcatgttatgcagtgaactatttttaaggtctaatcagtgattatttttccagctccgtgtttctctaaggaattatttcacacacggaccatctttagcagtttcctcagtgatggaatatcatgaatgtgagtcattatgtagctgtcgtacattgagcaaataaacttacagatctga

SEQ ID NO: 820 - DNA, 2806 bp, Artificial
  cDNA Sequence
ttttctggggccgctccagctggtgccggccacctccactcccctttgcttcttgctgtccctaaggtcggatggggacaggctggggccaccagccagctccatggacagggactttgcctctgctcaccttccagctgtggaaagaaaagaagaaacgcctgtgttgatttccatttggaagatccttcctcctcctaaacttccaggggcagacaaagtgattcgatcttggattgactgtagaagaagggacagaaagagcccagaacattcccccagatgttccaactgtgacttctccctggcgccttgatgggagcatctgaaacacccttcaccatctagatgcacaaggaagcagagatgctaattggtccccagctggatgagaagcgctgggggtggaggttgggagatgggagtgctgcccctcccttcctcccccaagccctgtctttccttctcctcctgccactggccagcgccctacagcccactccactgccctttcaagagctgaggctggtggggggccccagccgctgccggggccgcctggaagtcatgcacggtggctcctggggcagcgtctgtgatgacgactgggacgtggtggacgccaacgtagtgtgtcgccagctgggctgtggcctggcactgcccgtgccacggccccttgcctttggccaaggccgaggccccatcctgctggacaacgtggagtgccgcgggcaggaagctgcgctgagcgagtgcggcagccgcggctggggcgtccacaattgctttcactacgaggatgtggctgtcctgtgtgatgaattcttgccaacgcagcccccaacaaggaagatgttaaccagtagagcacctcctacgacactgccgaatggaaaaagtgagggcagcgtacgcctggtagggggcgcgaacctgtgtcagggccgagtggagatcctgcacagtggcctgtggggcaccgtgtgtgacgacgactgggggctgccggatgccgctgtggtctgtcgtcagctgggctgcggggcggccatggccgccaccaccaacgccttcttcggctatggcaccggacacatcctgctggacaacgtgcactgcgaaggcggcgagccccgcctggcagcctgccagagcctgggctggggtgtgcacaactgcggccaccacgaggacgcgggcgcgctctgcgcaggcctgggtcccccaacgctcacagcactgccatcctcagccacaagagaggactgggcttggcagacagatccgtccgctacaggagttggcccccagccttcccgggagacagcactgctcaccaccgccgcctgggccgcggggaagaaaagtggacggctgcgactggtgggcggcccgggtccgtgccgcggccgcgtggaggtgttgcacgccgggggctggggcaccgtgtgcgacgatgactgggactttgcggacgcgcgcgtggcctgccgcgaagcgggctgcgggcctgcgctgggcgctacgggactgggccacttcggctacggccgcggccccgtgctgctggacaacgtgggctgcgccggcaccgaggctcgcctgagcgactgcttccacctgggctggggccagcacaactgcggccaccacgaggacgcgggagcgctctgcgcaggcccagaggagctgggactgcaagtccagcaggatggttctgagaccacgcgggtgcccactcctcggcccagggacgggcatctacgtctggtcaatggagcccaccgatgcgagggacgtgtagagctctacctagggcaacggtggggcactgtctgtgatgatgcttgggacctgcgggcagccggtgtcctgtgccgccagctgggctgtggccaggccctcgcagcccctggcgaggctcactttggcccaggccgaggccccattctcctggacaatgtcaagtgccgtggggaagaaagtgctctgctgctctgctctcatatccgctgggatgcccacaactgtgaccacagcgaggatgccagtgtcctgtgccagccttcatgacccagcccgctctgcagaccacctcttcttctgggagctgtgacctcccttcctcctccaggaagccctcctcttgtgatgactacagttcactttgcccctccttcccttgcctgggagagagcctacctagacagtgcagtcctgcttgggggagcctggctgtacccccgtccacttactgcgtgacctcagcctgtcatcgactgttgtgagcccaattcagtgaaagctcctgtggttttgctcagccaaaaccaaaacgaggggaagaggatgattcctaactcttctgtttggtggggctctttttatagcaccagactctgccttccttgacctagatccaggaggctcaggggctctttaaatggggtatctcctcttcccccaacccatcttgggatccccaagaagagggaaggcaggaggggcctacagctcctaccttgggccctcaggggctgcagaggaacctgggtccctgtcctgccctgctccgcgagggcctggactaactcagatggtgctcggctggacaaggggactgggggaggggccaaagcagggacagtggcccctccctgcagctggaaccagcatctctgatttatgccgtctccaccacagagcctccactttgcaggagtgaagaaccctgggggcctgtagccaccagttcataggtgccaagtcaataaagcattgtcccccgtctcttataactgca

SEQ ID NO: 821 - DNA, 471 bp, Artificial
  cDNA Sequence
atgaacgcccctccagccttcgagtcgttcttgctcttcgagggcgagatcaccattaacaaggacaccaaggtacccaaggcctgcttattcaccatcaacaaagaagaccacacactgggaaacatcattaaacaactcctaaaagacccgcaagtgctatttgctggctacaaagtcccccaccccttggagcacaagatcatcatccgagtgcagaccacgccggactacagcccccaggaagcctttaccaacgccatcaccgacctcatcagtgagctgtccctgctggaggagcgcttccgggtgagggcggggcctggaggggcagacggggtgggctggacactggcccgtgtgcccaggcctgggacagccctggcctgtttcttcggaggtcctcagggagaggcggcggtgatggaagaacagggacttccaccacaggctccaggacatgtggactga

SEQ ID NO: 822 - DNA, 2450 bp, Artificial
  cDNA Sequence
gagagtcggagccacagccagagccctgcccaggccgagccggagctgcagcccgagcgcggtggtgccctcagccccgtcctcttgtcctcctcagcctcgatctgccggaggcgctgggcaatgaccccgggactccaggccagaggggtctgaagctgtttgggaaagcagcgggactccttgggaagatggccatggccccaagcccttccctggtgcaggtgtacaccagccccgcggctgtggccgtgtgggaatggcaggacgggctgggcacctggcacccctacagtgccaccgtctgcagcttcatcgagcagcagtttgtccagcagaagggccaacgttttgggcttgggagcctggcccacagcatccccttgggccaggcagacccctcgctggccccttacattattgacctccccagctggacccagttccgccaggacaccggcaccatgcgggctgtgcggagacacctgttcccccagcactcagcccctggccgaggtgtcgtctgggagtggctgagcgacgatggctcctggactgcctatgaagccagcgtctgtgactatctggagcagcaggtggccaggggcaaccagctcgtggacttggcccccctggggtacaactacactgtcaactacaccacccacacgcagaccaacaagacttccagcttctgccgcagcgtgcggcgccaagcagggccgccttacccggtgaccaccatcatcgctccgccgggccacacaggcgtcgcctgctcttgccaccagtgcctcagtggcagcagaactggccccgtgtcaggccgctaccgccactccatgaccaacctccctgcataccccgtcccccagcaccccccacacaggaccgcttctgtgtttgggacccaccaggcctttgcaccgtacaacaaaccctcactctccggggcccggtctgcgcccaggctgaacaccaccaacgcctggggcgcagctcctccttccctggggagccagcccctctaccgctccagcctctcccacctgggaccgcagcacctgcccccaggatcctccacctccggtgcagtcagtgcctccctccccagcggtccctcaagcagcccagggagcgtccctgccactgtgcccatgcagatgccaaagcccagcagagtccagcaggcgctcgcaggcatgacgagtgttctgatgtcagccattggactccctgtgtgtcttagccgcgcaccccagcccaccagccctcccgcctcccgtctggcttccaaaagtcacggctcagttaagagattgaggaaaatgtccgtgaaaggagcgaccccgaagccagagccagagccagagcaggtcataaaaaactacacggaagagctgaaagtgcccccagatgaggactgcatcatctgcatggagaagctgtccacagcgtctggatacagcgatgtgactgacagcaaggcaatcgggtccctagctgtgggccacctcaccaagtgcagccatgccttccacctgctgtgcctcctggccatgtactgcaacggcaataaggatggaagtctgcagtgtccctcctgcaaaaccatctatggagagaagacggggacccagccccagggaaagatggaggtattacggttccagatgtcgctccccggccacgaggactgcgggaccatcctcatagtttacagcattccccatggtatccagggccctgagcaccccaatcccggaaagccgttcactgccagagggtttccccgccagtgctaccttccagacaacgcccagggccgcaaggtcctagagctcctgaaggtggcctggaagaggcggctcatcttcacagtgggcacgtccagcaccacgggtgagacggacaccgtggtatggaacgagatccaccacaagacagagatggaccgcaacattacgggccacggctatcccgaccccaactacctgcagaacgtgctggctgagctggctgcccagggggtgaccgaggactgcctggagcagcagtgacctcgcaccccagcacgcccgcctctggtggccaccccgctgccccatggctggctgggtggccaggcaggaagtgcccagcccgagaggctgggaggtttgttgagggtgtggggtgtgccccacctgaagccggggctccccctgcctgcctctctctcctcctcccctctgggaattgggcagccctgggcagttgtactcatgggggcttaggatgcagctacctcagtgcgcagggcccgtctgtcctctgggggctgcttcgggcccgcggtgctcggggcctggtgtggggcgagtagagacttccccagcctggacgggcgtgggttctgggtcagcttcttttacctcaattttgtttgcaataaatgctctatagccaaa

SEQ ID NO: 823 - DNA, 1306 bp, Artificial
  cDNA Sequence
ggcgctgggcagtgtggaggtcgttggagtcacttccccgtcaccagctcctgtgcctgccagtcggtgcccctcccgctccagccatgctctccgccctcgcccggcctgccagcgctgctctccgccgcagcttcagcacctcggcccagaacaatgctaaagtagctgtgctaggggcctctggaggcatcgggcagccactttcacttctcctgaagaacagccccttggtgagccgcctgaccctctatgatatcgcgcacacacccggagtggccgcagatctgagccacatcgagaccaaagccgctgtgaaaggctacctcggacctgaacagctgcctgactgcctgaaaggttgtgatgtggtagttattccggctggagtccccagaaagccaggcatgacccgggacgacctgttcaacaccaatgccacgattgtggccaccctgaccgctgcctgtgcccagcactgcccggaagccatgatctgcgtcattgccaatccggttaattccaccatccccatcacagcagaagttttcaagaagcatggagtgtacaaccccaacaaaatcttcggcgtgacgaccctggacatcgtcagagccaacacctttgttgcagagctgaagggtttggatccagctcgagtcaacgtccctgtcattggtggccatgctgggaagaccatcatccccctgatctctcagtgcacccccaaggtggactttccccaggaccagctgacagcactcactgggcggatccaggaggccggcacggaggtggtcaaggctaaagccggagcaggctctgccaccctctccatggcgtatgccggcgcccgctttgtcttctcccttgtggatgcaatgaatggaaaggaaggtgttgtggaatgttccttcgttaagtcacaggaaacggaatgtacctacttctccacaccgctgctgcttgggaaaaagggcatcgagaagaacctgggcatcggcaaagtctcctcttttgaggagaagatgatctcggatgccatccccgagctgaaggcctccatcaagaagggggaagatttcgtgaagaccctgaagtgagccgctgtgacgggtggccagtttccttaatttatgaaggcatcatgtcactgcaaagccgttgcagataaactttgtattttaatttgctttggtgatgattactgtattgacatcatcatgccttccaaattgtgggtggctctgtgggcgcatcaataaaagccgtccttgattttatttttcaaggtcccttctgtaaa

SEQ ID NO: 824 - DNA, 1092 bp, Artificial
  cDNA Sequence
atggacagaacggagactaggttccgtaagaggggacagattaagggaaagatcacgaccagccgtcaacctcacccccagaatgagcagagtccccagcggagcacctcggggtactccctccaggaggtggtggatgatgaagtgttgggatcatcacctggggtagatcccagccccccatgtaggtcccttggctggaaaaggaagaaggagtggtcagatgaatctgaggaggagccggagaaggagctcgcccctgagcctgaggagacctgggtagtggagatgctgtgtgggctcaagatgaagctgaagcaacagcgagtgtcacccatcctccctgagcaccacaaggacttcaacagtcagcttcctggggtagatcccagccccccgcataggtccttttgctggaaaaggaagagggagtggtgggacgaatctgaggagtcgttggaggaggagccacggaaggtgctcgcccctgagcctgaggagatctgggtggtggagatgctgtgtggcctcaagatgaagctgaagcgacggcgagtgtcgctcgtgctccctgagcaccacgaggccttcaacaggctgcttgatcctgtcattaaaagattcctggcctgggacaaagatctgagggtgtcggacaagtatctcctggctatggtcatagcgtatttcagccgggccggcctcccctcctggcaataccaacgcattcatttcttcctggcttacctggccaatgacatggaggaggacgacgaggaccccaaacaaaacatcttctacttcctgtatgggaagacccgctctcgcatacccttggtccgtaaccgtcggttccagttatgccgttgcatgaacccgagggccaggaagaaccgctctcagatagccctgttccagaaacttcggttccagttcttctgttccatgagcggcagggcttgggtttcccgggaggagttggaggagaacaccggacccacgggagatgtggattttcagcaggaactttattccaatgctaatggcagtcaacaggaaagaggagaggaaccatttgtgcagatcatctag

SEQ ID NO: 825 - DNA, 1860 bp, Artificial
  cDNA Sequence
atgtcctccaccgtgaacaacggggcggccagcatgcagtccacacccgacgccgcgaacggcttcccgcagcccagctcctcctcggggacctggccgcgggcggaagaggagctgcgcgccgcggagccgggcctggtgaagcgcgcgcaccgcgagatcctggaccacgagcgcaagcggcgggtggagctcaagtgcatggagctgcaggagatgatggaggagcagtattcggaggaggagattcggcagaaagtggggacattccggcagatgctgatggagaaggagggagtgctcaccagggaggaccggcctgggggccacgtggcggagaccccgcggctgaccgagggcgctgagccgggcctggagtacgcgccctttgacgatgacgacggcccagtggactgtgactgcccggcctcctgctaccgcggccaccgcgggtacaccaagcattggtctagcagctcggcatcgccccctcccaagaaaaagaagaaaaagaaaggcggccaccggagaagctgtgggagctcctcacccctccgcaagaagaagaagagtgtgaagaagcatcgccgagactctgattctgggtcccggaggaagagacggcactctcgaagctccaagtgcaaaagaaaagagaagaacaaagagaagaagctgagccccaagcaccgagacgaagggcgaaagacgggcagccagcggtccagcggaagccggtcgccttccccgtcgggcggcagcggatgggggtcgccccagcggaacggcggcagcgggcagcggagcggagcgcacgggggccgccccggctcggcgcacagcccgcccgatcccccgggacttcggtcaccccgctggccttcagggccctttcgggcaaaaggcagtgacagaggagccagtgcggggcctcctggccttcagatcctggaggaagttctggccaagaagcccagctcgccctcgcccagggtccgtgacaaggcggcggccgccgcacccacgccgcccgcgcgggggaaggagagcccgagcccgcgctcggcgccgtcgtcccaaggtcgcggaggccgcgcggcgggcggggcgggcaggcggcggcggcggcggcgtaggcggcggcgctcgcggtcctcggcgtccgcgccccgccgcaggggtcgccggcgcccccggcccgcgcccccccggggctcgtcgcgctcgctcagcagggcccgctccagcagcgactccggcagcggccgcggcgcccccggccccgggcccgagcccggctctgagcgaggccacggcggacacgggaaagccaaggagcggcccccgcgcgcgcggcccgccagcacctctccgtccccgggcgcgcacggccggcgcggcggcccagaagggaagagctcgtcgcgcagccccggcccgcacccccgctcctggagctccagccgctcgccctccaaatctcgctcgcgctctgcggagaagcggccccacagccccagccgctcgccgtcgcccaagaagcccctcagcgacaaggacggcgagggccgcgcaaggcactctgaggccgaggccacccgcgcccggcgccgctcccgcagctactcgcccatccgcaagcggcgccgggactcgccaagcttcatggagccgcggcgcatcacctgcttgagcagcgactactcgacccggagccacagccgcagccccagccccggccacagccacgggagctacagcagtcgcagccatgggacccgcagccggacacgcagcccctcgaggacccccagtcccagctaccacagccggagcagctctgagagcgggggcttctga

SEQ ID NO: 826 - DNA, 849 bp, Artificial
  cDNA Sequence
atggagtggtgggacgaatctgaggagtcgttggaggaggagccacggaaggtgctcgcccctgagcctgaggagatctgggtggcggagatgctgtgtggcctcaagatgaagctgaagcgacggcgagtgtcgctcgtgctccctgagcaccacgaggccttcaacaggctgcttgaggatcctgtcattaaaagattcctggcctgggacaaagatctgagggtgtcggacaagtatctcctggctatggtcatagcgtatttcagccgggccggcttcccctcctggcaataccaacgcattcatttcttcctggctctctacctggccaatgacatggaggaggacgacgaggactccaaacaaaacatcttccacttcctgtatgggaagaaccgctctcgcatacccttgctccgtaagcgttggttccagttaggccgttccatgaacccgagggccaggaagaaccgctctcgcatacccttgctccgtaagcgtcggttccagttaggccgttccatgaacccgagggccaggaagaaccgctctcgcatacccttgctccgtaagcgtcggttccagttaggccgttccatgaacctgagggccaggaagaaccgctctcagatagtcctgttccagaaacgtcggttccagttcttctgttccatgagcggcagggcttgggtttccccggaggagttggaggagatccaggcttatgacccagagcactggaacaccggacccaggggagatgtggattttcagcaggaactttattccaatgctaatggcagacaccaggaaggaggagaggaaccatttgtgcagatcatctag

SEQ ID NO: 827 - DNA, 6078 bp, Artificial
  cDNA Sequence
cgttggccgggcccgggggaggaggggaatctcccgccatttttcaataatttcctccggtgctgctgaggaggagtcgtgactgccggccgccgggacccgaagcggaggtcggcggggggctgctgggaggcgcggcggtgtgcgcgggagctctgcgccgtggcgttccgctccatgactgtcgcgcggccgcgccggcggtgagggagccggagttcgcgccgccctctcacccctcccttcccccaccccacccccgggcgcctggcgctcgctccgggccgcggggcctagtgctgcgccgcggggccggccccagcagccgccagtccccaccgccgccgccgcgatggcgccgctcctgggccgcaagcccttcccgctggtgaagccgttgcccggagaggagccgctcttcaccatcccgcacactcaggaggccttccgcacccgggaagagtatgaagcccgcttggaaaggtacagtgagcgcatttggacgtgcaagagtactggaagcagtcagctaacacacaaggaagcctgggaggaagaacaggaagttgctgagcttttgaaggaggagtttcctgcctggtatgagaagcttgttctggaaatggttcaccataacacagcctccttagagaagttagtagatactgcttggttggagatcatgaccaaatatgctgtgggagaagagtgtgacttcgaggttgggaaggagaaaatgctcaaggtgaagattgtgaagattcatcctttggagaaagtggatgaagaggccactgagaagaaatctgatggtgcctgtgattctccatcaagtgacaaagagaactccagtcagattgctcaggaccatcagaagaaggagacagttgtgaaagaggatgaaggaaggagagagagtattaatgacagagcacgtagatcgccacgaaaacttcctacttcattaaaaaaaggagaaaggaaatgggctcctccaaaatttctgcctcacaaatatgatgtgaaactacaaaatgaagataagatcatcagtaacgtgccagcagacagcttgattcgtacagagcgcccaccaaataaggagatagttcgatactttatacggcataatgcattacgagctggtactggtgaaaatgcaccttgggtcgtagaagatgaattggtgaagaaatactctctgcccagcaagttcagtgactttttacttgatccatacaagtatatgactctcaacccttctactaagaggaagaatactggatccccagacaggaagccctcaaagaaatccaagacagacaactcttctcttagttcaccactaaatcctaagttatggtgtcacgtacacttgaagaagtcattgagtggctcgccactcaaagtgaagaactcaaagaattccaaatctcctgaagaacatctagaagaaatgatgaagatgatgtcgcccaataagctgcacactaactttcacattcctaaaaaaggcccacctgccaagaaaccagggaagcacagtgacaagcctttgaaggcaaagggcagaagcaaaggcatcctgaatggacagaaatccacagggaattccaaatctcccaaaaaaggactgaagactcctaaaaccaaaatgaagcagatgactttgttggatatggccaaaggcacgcagaagatgacacgagccccacggaattctgggggtacacctaggacctctagtaaacctcataaacatctgcctcctgcagccctacacctcattgcatactacaaagaaaacaaagacagggaggacaagaggagcgccctgtcctgtgttatctccaaaacagctcgtcttctctctagtgaagatagagctcgtctcccagaagaattgcgaagtcttgttcaaaaacgctatgaacttctagagcacaaaaagaggtgggcttctatgtctgaagaacaacggaaagaatatttgaaaaagaaacgggaggagctgaaaaagaagttgaaggaaaaagccaaagaacgaagagagaaagaaatgcttgagagattagaaaaacagaagcggtatgaggaccaagagttaactggcaaaaaccttccagcattcagattggtggatacccctgaagggctgcccaacacgctgtttggggatgtggccatggtggtggaattcttgagctgttattctgggctacttttaccagatgctcagtatcctattactgctgtgtcccttatggaagccttgagtgcagataagggtggctttttataccttaacagggtgttggtcatcctcttacagaccctcctacaagatgagatagcagaagactatggtgaattgggaatgaagctgtcggaaatccccttgactctgcattctgtttcagagctggtgcggctctgcttgcgcagatctgatgttcaggaggaaagcgagggctcagacacagatgacaataaagattcagctgcatttgaggataatgaggtacaagatgagttcctagaaaagctggagacctctgaattttttgagctgacgtcagaggagaagctacagatcttgacagcactgtgccaccggatcctcatgacatactcagtgcaagaccacatggagaccagacagcagatgtctgcagagttgtggaaggaacggcttgctgtgttgaaggaagaaaatgataagaagagagcagagaaacagaaacggaaagaaatggaagccaaaaataaagaaaatggaaaagttgagaatgggttaggcaaaactgataggaaaaaagaaattgtgaagtttgagccccaagtagatacagaagctgaagacatgattagtgctgtgaagagcagaaggttgcttgccattcaagctaagaaggaacgggaaatccaggaaagagaaatgaaagtgaaactggaacgccaagctgaagaagaacgaatacggaagcacaaagcagctgctgagaaagctttccaggaagggattgccaaggccaaactagtcatgcgcaggactcctattggcacagatcgaaaccataatagatactggctcttctcagatgaagttccaggattattcattgaaaaaggctgggtacatgacagcattgactaccgattcaaccatcactgcaaagaccacacagtctctggtgatgaggattactgtcctcgcagtaagaaagcaaacttaggtaaaaatgcaagcatgaacacacaacatggaacagcaacagaagttgctgtagagacaaccacacccaaacaaggacagaacctatggtttttatgtgatagtcaaaaggagctggatgagttgctaaactgtcttcaccctcagggaataagagaaagtcaacttaaagagagactagagaagaggtaccaggacattattcactctattcatctagcacggaagccaaatttgggtctaaaatcttgtgatggcaaccaggagcttttaaacttccttcgtagtgatctcattgaagttgcaacaaggttacaaaaaggaggacttggatatgtggaagaaacatcagaatttgaagcccgggtcatttcattagagaaattgaaggattttggtgagtgtgtgattgcccttcaggccagtgtcataaagaaatttctccaaggcttcatggctcccaagcaaaagagaagaaaactccaaagtgaagattcagcaaaaactgaggaagtggatgaagagaagaaaatggtagaggaagcaaaggttgcatctgcactggagaaatggaagacagcaatccgggaagctcagactttctccaggatgcacgtgctgcttgggatgcttgatgcctgtatcaagtgggatatgtccgcagaaaatgctaggtgcaaagtttgtcgaaagaaaggtgaggatgacaaattgatcttgtgtgatgagtgtaataaagccttccacctgttttgtctgaggccggccctctatgaagtaccagatggtgagtggcagtgcccagcttgccagcccgctactgccaggcgcaactcccgtggcaggaactatactgaagagtctgcttctgaggacagtgaagatgatgagagtgatgaagaggaggaggaggaagaagaggaggaggaggaagaagattatgaggtggctggtttgcgattgagacctcgaaagaccatccggggcaagcacagcgtcatcccccctgcagcaaggtcaggccggcgcccgggtaagaagccacactctaccaggaggtctcagcccaaggcaccacctgtggatgatgctgaggtggatgagctggtgcttcagaccaagcggagctcccggaggcaaagcctggagctgcagaagtgtgaagagatcctccacaagatcgtgaagtaccgcttcagctggcccttcagggagcctgtgaccagagatgaggccgaggactactatgatgtgatcacgcaccccatggactttcagacagtgcagaacaaatgttcctgtgggagctaccgctctgtgcaggagtttcttactgacatgaagcaagtgtttaccaatgctgaggtttacaactgccgtggcagccatgtgctaagctgcatggtgaagacagaacagtgtctagtggctctgttgcataaacaccttcctggccacccatatgtccgcaggaagcgcaagaagtttcctgataggcttgctgaagatgaaggggacagtgagccagaggccgttggacagtccaggggacgaagacagaagaagtagagaggcagggccgtggtgacagtatcagtgagtgccatacagaattgtgtattcaccagcatcatgaaacagttgtggtcttttgagttgatcttggcagagtaaagggacgtgtcctggagccattcctgaatctccccttctttgtgacagctcctcccacccccccaaaaaataaaaaaaccacaaaaaacaaaaaaacaaaactaaggcacttcacttagagactggagtcctgcttataatcatgcatataacctttactttgatggatctggccagaggggtgttggagcccagcccacccacataccagtcaagctcttaggggagcagaagaaaagcaggaagaatttaaatgtttaattttttttttaaattgacttttctagttattaaaagttgcttgtttcagcagtgatattgtataaagaacatcttgtaagatactcctgacatcttgctttagcacatgtacagtacagtttctatgataatgtgtttgctctaacttccctggcttctccttcagcccatccactctcctctagagcagttgggttggaggctcattgaggcaagcagcaacattggagggggagcagggcagtgctgtgtctgctgcctcccatgcccgttctgacctcagccttggaactcctcaagaacctgaagattgagagcggcagagaagctctgagagccccttcccccacaacaaatctagctctagttgttatatttaggcaaaactttgtagtcttctttcccttttatgatggattttgataaaagtacaaaacagggtttttcttttttatcacctttgaatttggaaattttgagcacccaagctcttctgtacctatttaaagtccaccaaggggactgcagctcctagaacatgagaatcaagcctcttaattttaaactgcggaatgtggcctctgcttcctccgtcctcctgcccaaggacgacgaggattgctccagggctgctgggtagtttaccgtcccttctataggcatggagttggcactgacatcacagcttcataaccccaccaccgccagcttcccctgcctcctacatccagtctgttcttgttcatagtgagaatcctgtgttcccacttcagtgacacctgaattgtttgttgttgttttttttttttattgtcttcaaagaggaagggccccattaaagggtgaacttgtaataaattggaatttcaaataaacctcatgtacttgtgtttataaagaagaaacca

SEQ ID NO: 828 - DNA, 1862 bp, Artificial
  cDNA Sequence
gagcactgtggctggcatgccccagtgttttggataccaatgcataggactccatagtaatcgaatttaccagaggcgaacgtcatgagcatagtgatcccattgggggttgatacagcagagacgtcatacttggaaatggctgcaggttcagaaccagaatccgtagaagctagccctgtggtagttgagaaatccaacagttatccccaccagttatataccagcagctcacatcattcacacagttacattggtttgccctatgcggaccataattatggtgctcgtcctcctccgacacctccggcttcccctcctccatcagtccttattagcaaaaatgaagtaggcatatttaccactcctaattttgatgaaacttccagtgctactacaatcagcacatctgaggatggaagttatggtactgatgtaaccaggtgcatatgtggttttacacatgatgatggatacatgatctgttgtgacaaatgcagcgtttggcaacatattgactgcatggggattgataggcagcatattcctgatacatatctatgtgaacgttgtcagcctaggaatttggataaagagagggcagtgctactacaacgccggaaaagggaaaatatgtcagatggtgataccagtgcaactgagagtggtgatgaggttcctgtggaattatatactgcatttcagcatactccaacatcaattactttaactgcttcaagagtttccaaagttaatgataaaagaaggaaaaaaagcggggagaaagaacaacacatttcaaaatgtaaaaaggcatttcgtgaaggatctaggaagtcatcaagagttaagggttcagctccagagattgatccttcatctgatggttcaaattttggatgggagacaaagatcaaagcatggatggatcgatatgaagaagcaaataacaaccagtacagtgagggtgttcagagggaggcacaaagaatagctctgagattaggcaatggaaatgacaaaaaagagatgaataaatccgatttgaataccaacaatttgctcttcaaacctcctgtagagagccatatacaaaagaataagaaaattcttaaatctgcaaaagatttgcctcctgatgcacttatcattgaatacagagggaagtttatgctgagagaacagtttgaagcaaatgggtatttctttaaaagaccatacccttttgtgttattctactctaaatttcatgggctagaaatgtgtgttgatgcaaggacttttgggaatgaggctcgattcatcaggcggtcttgtacacccaatgcagaggtgaggcatgaaattcaagatggaaccatacatctttatatttattctatacacagtattccaaagggaactgaaattactattgcctttgattttgactatggaaattgtaagtacaaggtggactgtgcatgcctcaaagaaaacccagagtgccctgttctaaaacgtagttctgaatccatggaaaatatcaatagtggttatgagaccagacggaaaaaaggaaaaaaagacaaagatatttcaaaagaaaaagatacacaaaatcagaatattactttggattgtgaaggaacgaccaacaaaatgaagagcccagaaactaaacaaagaaagctttctccactgagactatcagtatcaaataatcaggaaccagattttattgatgatatagaagaaaaaactcctattagtaatgaagtagaaatggaatcagaggagcagattgcagaaaggaaaaggaagatgacaagagaagaaagaaaaatggaagcaattttgcaagcttttgccagacttgaaaa

SEQ ID NO: 829 - DNA, 309 bp, Artificial; identical to SEQ ID NO: 411
  cDNA Sequence

SEQ ID NO: 830 - DNA, 360 bp, Artificial; identical to SEQ ID NO: 436
  cDNA Sequence

SEQ ID NO: 831 - DNA, 2070 bp, Artificial
  cDNA Sequence
gcgcgatggcggcggctgccgccgagacccccgaagtccttcgggaatgcggttgcaagggcatccggacctgtctgatctgcgagcggcagcgcggcagtgacccgccctgggagctgcccccagcgaaaacataccgtttcatttactgctccgacaccggctgggccgtgggcacagaggagtctgactttgagggctgggccttccccttcccaggagtgatgctgatcgaggactttgtgacccgggaggaagaagccgagttggtgcggctcatggaccgtgacccctggaagctctcccagtctggacggaggaagcaggactatggccccaaagtcaactttcggaaacagaagctaaagaccgagggcttctgcggcctccccagcttcagccgggaggtggtgcggaggatgggcctctacccggggctggagggcttccggcccgtcgagcagtgcaacctggactactgccccgagcggggctctgccattgacccccacctggacgacgcctggctgtggggggagcggctggtcagcctcaacctcctgtcccccaccgtgctgtccatgtgtcgggaggcgcccgggagcctgctcctctgctcggccccgtcggctgccccggaggccttggtggacagcgtgatagcacccagccggtcggtgctatgccaggaggtggaggtggccatccccttacccgcccgctccctgctggtcctcaccggggcggcacggcaccagtggaagcatgccatccaccgcagacacatcgaggcccgccgcgtctgcgtcactttccgggagctgtcggctgagtttggccctggagggaggcagcaagagctgggccaggaactgctgcggatcgccctctccttccagggaagacccgtgtgaaccgcctccttggctccagacttgactgatcccgggattgaaatgaggagcacagaacagggcctcctgcaactcacggggtttcaagagaagatggctgacccctgatgctgtgagcagtgtgagccctgcccaggagcaggttttgatgggaacgtacctccaggcagcccccttccacctggaccgtggccacacttttttggttatttagtttgtcacagtcttggggacatgggatcatttgagcttaaaaaatactgggggccgggcacagtggctcacacctgtaatcctaacactttgggaggctgaggtgggcggatcacttgatgccaggagttcgagaccagcctggccaacacggtgaaaacccgtctctacaaaaactacaaaaattagccgggtgtggtgactcacagccgtaatcccagctactcgggaggctaaggtgggagaattgcttgaacctgggaggcggaggttgcagtgagccaagatcacgccactgcactccagcctcggtgacagagcaagactgttttgaaaaaaaaaaaaaatgggaacattttaaatgattttcacctttattatgcatctattttcatggggtttcccgatatctcactgtccagtcccttcatttggggaatgtgttggattagggaacagggttgaagatttgaagtttagactaaagagctgggaacagcttcagagtcaggctcagcctgactcatgcttgacacccccacgcccagggagggttgggggatgtgaggagggcagggaaatctgagagcctccttccagccccataacgctgttaacaagtaggaaaaattaaagctcccggccaggcgcggtgactcacacctgtaatccgagtactttgcggggctcaggtgggaggattgcttgaggccagcctgggcaacatagtgagacccccatctctacaaaaaatacaaacattagctgggcgtctgggcatggtggcacacacctgtagtcccagctactcgaaaggctgaggcgggaggatggctttaccaccatgtcaaggctgcagtgagctcatgatcataccactgcacttaacttggcaacagagcaagaccctgtccctaaaataaataaaaggaaaacaaaaaaa

SEQ ID NO: 832 - DNA, 285 bp, Artificial
  cDNA Sequence
atgatgggcctctccttggcctctgctgtgctcctggcctccctcctgagtctccaccttggaactgccacacgtgggagtgacatatccaagacctgctgcttccaatacagccacaagccccttccctggacctgggtgcgaagctatgaattcaccagtaacagctgctcccagcgggctgtgatattcactaccaaaagaggcaagaaagtctgtacccatccaaggaaaaaatgggtgcaaaaatacatttctttactgaaaactccgaaacaattgtga

SEQ ID NO: 833 - DNA, 2193 bp, Artificial
  cDNA Sequence
ttagatccttctgcggatacatgggacctctcctcacctttaatatcattatggataaacaggttttacatttatctgggctttgctgttagcattagcctttggatttgtgtccagattgtcatcgagatgcagggcaggaacttacaggaaaaatctgttccaaaagcagctcaggatttgatgacaaatggttatgtctcccttcgagagaaagacatctttgtgtctggagtgaagattttttatggttctcagactggaacagcaaagttaagaattcttgctgaagcagttacgtccctggatctgcctgtggccattattaatctaaaagaatatgatccagatgatcatctgatagaagaggtgactagtaaaaatgtctgtgtcttcctggttgcgacatacactgacggcctaccaaccgaaagtgcagagtggttctgcaaatggttagaggaagcatccattgattttcgatttggcaaaacttacctgaagggtatgagagatgcggtatttggcctgggaaattctgcctatgctagccacttcaacaaggttggcaaaaatgttgacaagtggctctggatgcttggcgtgcatcgtgtgatgagtcgaggggagggcgactgcgacgtggttaaaagcaagcacggcagcattgaggccaacttcagagcatggaagaccaagttcatctcccagctgcaggcacttcagaaaggggagagaaagaagtcctgtggcggccactgcaagaaaggcaaatgtgaatctcaccaacatggctcagaggagagggaggaaggatctcaagagcaggacgaattgcatcacagagacaccaaggaggaagaacccttcgagagctccagtgaagaagagtttggtggtgaggaccatcagagcctaaattccattgttgatgttgaagatttgggcaaaattatggatcacgtgaagaaagaaaagagagaaaaggaacagcaggaagagaagtctggtttgttcaggaacatggggaggaatgaagatggtgaaagaagagctatgataactcctgctctccgagaagcccttactaaacaaggttatcagttgattgggagccactcaggggtgaagctttgcaggttttttttgttttcgatgctccgagggagaggagcttgttacaaacacacattctatggaattgagagccatcgctgcatggaaaccaccccgagcttggcgtgtgctaataaatgtgtcttctgttggtggcaccacaacaaccctgtgggcactgaatggcggtagaagatggaccagcctgaaatgatcttgaaggaagccattgaaaaccatcagaacatgattaagcagtttaaaggagtaccgggcgtcaaagcagaacgctttgaagaaggaatgacggtaaagcactgtgcattgtccctcgtgggagaaccaataatgtacccagagatcaacaggtttttgaagctactccaccagtgtaaaatctccagcttcctggtcacaaatgcacaatttcctgcggaaatcaggaacctcgagccagttactcagctgtatgtcagtgtggatgccagtaccaaagacagcctgaagaaaatcgaccgcccactcttcaaggatttctggcagcaattccttgacagtttaaaagccttggcagtcaagcaacaacgaactgtctacagactgatgctcgtgaaagcatggaacgtggacgagctccaggcctacgcgcagctcgtgtccctggggaatcctgacttcatcgaagtgaagggcgttacctactgcagagaaagttcagcaagcagtcttaccatggcccatgtgccctggcatgaggaagtggtacagtttgtccgcgagctggtggatctgatccccgaatatgaaattgcatgtgaacacgaacactctaattgcctcctgatagcacacagaaagtttaaaattggtggtgaatggtggacatggatcgattataaccgcttccaggagctcatccaggaatatgaagatagtggtggatcaaaaacgttcagcgcaaaggattatatggccagaactcctcactgggcattatttggtgccaatgaaagaagctttgatcccaaggacacaagacatcagagaaagaacaaatcaaaggctatttctggatgt

SEQ ID NO: 834 - DNA, 396 bp, Artificial
  cDNA Sequence
atgatgatgataaaggctgtgaccatagataaactgcagggaagttctgttactgtatctaccgaagatggtttgctgaaagccaagtatctttatacagaatcatcatttctgtcttctgctgctggggatattacattaggaagtgttcataatataacattacaaagcaagatgggtaacatcacagtatcgtcttctggatgtctaaaagcctcaactaatcagggtgccatagatgtttatgtcagccaactggggaaagtggaattgaaatcccataaagaacgcggctcctcaccagtaacggaacaaagctggatggagaatgactttgacgagttgagagaaggcttcagacaatcaaactactctgagctaaaggaggaagtttga

SEQ ID NO: 835 - DNA, 669 bp, Artificial
  cDNA Sequence
cagtgtaaagaactggccaagtccaaggcagaagtggcctgcatcgcagtgtacgaaacagacgtgtttgtcgtcggaaccgagagaggatgcgcttttgttaatgccaggacggattttcagaaagattttgcaaaatactgtaggcgttttaattttatcctttagggactgtgtgaggtgaaacctccctgccctgtgaacgggatgcaggtccactcgggcgaaacggaaatactcaggaaggcagtggaggactatttctgcttttgtcatggtaaagccttagggacaacagtgatggtgtctgttccctatgagaagatgctgcgagaccagtcggctgtggtagtgcaggggcttccggaaggcgttgcctttcaacaccctgagaattacgaccttgcaaccctgaaatggattttggagaacaaagcagggatttcattcatcataaataggggctggtgtgtgttttttcattcctctacaggtggccctgggatggtaacagatgcggagagatccatagtatcaccaagtgaaagctgcggccccatcaatgtgaaaactgaacccatggaagattctggcatttcactgaaagcagaagctgtctcagtcaagaaagaatcagaagatcctaattactatcaatataatatgcaa

SEQ ID NO: 836 - DNA, 636 bp, Artificial
  cDNA Sequence
agggatgtccttcctgagatccgtgctatctgcattgaggaaattgggtgttggatgcaaagctacagcacgtctttcctcaccgacagctatttaaaatatattggttggactctgcatgataagcaccgagaagtccgcgtgaagtgcgtgaaggctctgaaagggctgtacggtaaccgggacctgaccgcacgcctggagctcttcactggccgcttcaaggactggatggtttccatgatcgtggacagagagtacagtgtggcagtggaggccgtcagattactgatacttatccttaagaacatggaaggggtgctgatggacgtggactgtgagagcgtctaccccattgtgtaggcctctaattgaggcctggcctctgctgtgggtgaatttctgtactggaaacttttctaccctgagtgcgagataagaacgatgggtggaagagagcaacgccagagcccaggcgcccagaggactttcttccagcttctgctgtccttctttgtggagagcaagctccacgaccacgctgcttacttagtagacaacctgtgggactgtgcagggactcagctgaaggactgggagggtctgacaagcctgctgctggagaaggaccagagc

SEQ ID NO: 837 - DNA, 847 bp, Artificial; identical to SEQ ID NO: 477
  cDNA Sequence

SEQ ID NO: 838 - DNA, 1314 bp, Artificial
  cDNA Sequence
gaggcggctgcctgctgctctgcaggtaccatggagctgagctataggctcttcatctgcctcctgctctggggtagtactgagctgtgctacccccaacccctctggctcttgcagggtggagccagccatcctgagacgtccgtacagcccgtactggtggagtgtcaggaggccactctgatggtcatggtcagcaaagacctttttggcaccgggaagctcatcagggctgctgacctcaccttgggcccagaggcctgtgagcctctggtctccatggacacagaagatgtggtcaggtttgaggttggactccacgagtgtggcaacagcatgcaggtaactgacgatgccctggtgtacagcaccttcctgctccatgacccccgccccgtgggaaacctgtccatcgtgaggactaaccgcgcagagattcccatcgagtgccgctaccccaggcagggcaatgtgagcagccaggccatcctgcccacctggttgcccttcaggaccacggtgttctcagaggagaagctgactttctctctgcgtctgatggaggagaactggaacgctgagaagaggtcccccaccttccacctgggagatgcagcccacctccaggcagaaatccacactggcagccacgtgccactgcggttgtttgtggaccactgcgtggccacaccgacaccagaccagaatgcctccccttatcacaccatcgtggacttccatggctgtcttgtcgacggtctcactgatgcctcttctgcattcaaagttcctcgacccgggccagatacactccagttcacagtggatgtcttccactttgctaatgactccagaaacatgatatacatcacctgccacctgaaggtcaccctagctgagcaggacccagatgaactcaacaaggcctgttccttcagcaagccttccaacagctggttcccagtggaaggctcggctgacatctgtcaatgctgtaacaaaggtgactgtggcactccaagccattccaggaggcagcctcatgtcatgagccagtggtccaggtctgcttcccgtaaccgcaggcatgtgacagaagaagcagatgtcaccgtggggccactgatcttcctggacaggaggggtgaccatgaagtagagcagtgggctttgccttctgacacctcagtggtgctgctgggcgtaggcctggctgtggtggtgtccctgactctgactgctgttatcctggttctcaccaggaggtgtcgcactgcctcccaccctgtgtctgcttccgaataaaagaagaaa

SEQ ID NO: 839 - DNA, 2598 bp, Artificial
  cDNA Sequence
atggaccagtaccatctgtggcccattaggaaccaggctgcacagcaggagcccagcctcatcccgctcccagacaccggagaggccagcaaagaaaataaggtattcggcattctcctgcagttttcatttgctacgtggacagaagggggtgaggaagaagaagagatgtgtcatcattccagttcttcaactccattggcagcagacaaggagtcccagggagaaaaggcagatacaaccccaaggaagaaacaaaactcgaattctcagtctacacctggcagctctgggcagcgtaagcggaaagttcagctgctgccttctcggcgaggggaacagctgaccttgcctccacctccccagcttggctattcgatcactgccgaggacctagacttagagaagaaggcttcattacagtggttcaaccaggccttggaggacaagagcgctgcctcgaactctgtcactgagaccccacctatcactcagccttcatttacctttaccctgcctgctgctgcacctgcctccccacccacctccctcctggccccaagcaccaacccactgttagagagcttgaagaagatgcagactcccccgagcctgccaccctgcccacttcgagggctgctggtgttcccggcccaggccttcacggcactgcgcgcgcacacctctttatcagactctgctggagcagcaaccactgaggccctctcacctccaaagacacccaacctcctacccccgctgggtttatcacagtcagggccgccagggctgctccccagcccctcctttgactccaaccccccgaccactttgctggggctgatccctgctccatccatggtaccagccactgacaccaaggcacctccaacccttcaggcagagacgactaccaaaccccaagccacatctgccccgtcccccgcccccaagcaaagcttcctgtttggaacacagaacacctcaccttccagccctgccgcccctgctgcatcttcagcatctcccatgttcaagcccattttcacggctccacccaagagtgagaaggaaggccccacaccgcctggcccttcagtctcagccacagcgccctccagctcctccctccccacgaccaccagcaccacagccccgaccttccagcctgtctttagcagcatggggccacctgcatctgtgcccttgcctgctcccttcttcaagcagacaactactcccgccactgctcccaccacaactgccccgctcttcactggcctggccagcgccacctctgctgtggctcccatcacctctgccagtccatccacagactctgcttcgaagcctgcgtttggctttggcataaacagtgtgagcagcagcagtgtgagtaccacgaccagcaccgccactgccgcctcacagcctttcctcttcggggcgccccaggcctctgctgccagcttcaccccggccatgggctccatattccagtttggcaaacctcctgccttgcccacaaccaccacagtcaccaccttcagccagtccctgcccactgccgtgccaacggccaccagcagcagcgctgccgactttagtggttttggcagcaccctcgccacctccgccccggccaccagcagccagcccactctgacgttcagtaacacgagcacccccacgttcaacattccctttggctcaagcgccaagtccccgctcccatcatatccgggagccaacccccagcccgcatttggggccgctgaggggcagccaccgggggccgccaagccagcccttacccccagctttggcagctctttcacttttggaaactctgcagccccggctgctgcacccacacctgcacctccgtccatgatcaagatcgtgcctgcgcacgtgcctacgcccatccagcctacctttggcggtgccacgcactcggcgtttgggttgaaagccacggcttcggccttcggcgctcccgccagctcacagcccgcctttggcggctccactgctgtcttctccttcggtgcagccaccagctctggctttggagccaccacccagaccgccagcagcgggagcagcagctcggtgtttggcagcacaacaccatcacccttcacgtttgggggttcggcagcccccgctggcagtgggagctttgggatcaacgtggccaccccaggctccagcgccaccaccggagctttcagctttggagcaggacagagtgggagcacagccacctccacccccttcgcagggggcttaggtcagaacgccctgggcaccaccggccagagcacaccgtttgccttcaacgtgggcagcacaactgagagcaaacctgtgtttggaaccgccacccccacctttggtctgaacacccctgcgcctggagtgggcacatcaggcagcagcctctcctttggggcatcctcagcacccgcccaaggctttgttggtgttgcacctttctcggcggccccttcattttccattggtgcgggatccaagaccctaggggctcgacagcgactgcaggcccgaaggcagcacacccgcaaaaagtag

SEQ ID NO: 840 - DNA, 2373 bp, Artificial
  cDNA Sequence
caccaccagccctgaagctgtctgtgaacgaaactctggtggtgaaccctggggagaatgtgacggtgcagtgtctgctgacaggcggtgatcccctcccccagctgcagtggtcccatgggcctggcccactgcccctgggtgctctggcccagggtggcaccctcagcatcccttcagtgcaggcccgggactctggctactacaactgcacagccaccaacaatgtgggcaaccctgccaagaagactgtcaacctgctggtgcgatccatgaagaacgctacattccagatcactcctgacgtgatcaaagagagtgagaacatccagctgggccaggacctgaagctatcgtgccacgtggatgcagtgccccaggagaaggtgacctaccagtggttcaagaatggcaagccggcacgcatgtccaagcggctgctggtgacccgcaatgatcctgagctgcccgcagtcaccagcagcctagagctcattgacctgcacttcagtgactatggcacctacctgtgcatggcttctttcccaggggcacccgtgcccgacctcagcgtcgaggtcaacatctcctctgagacaggtgtgccgcccaccatcagtgtgcccaagggtagggccgtggtgaccgtgcgcgagggatcgcctgccgagctgcaatgcgaggtgcggggcaagccgcggccgccagtgctctggtcccgcgtggacaaggaggctgcactgctgccctcggggctgcccctggaggagactccggacgggaagctgcggctggagcgagtgagccgagacatgagcgggacctaccgctgccagacggcccgctataatggcttcaacgtgcgcccccgtgaggcccaggtgcagctgaacgtgcagtgccccagtcccgccggaggtggagcccagttcccaggacgtgcgccaggcgctgggccggcccgtgctcctgcgctgctcgctgctgcgaggcagcccccagcgcatcgcctcggctgtgtggcgtttcaaagggcagctgctgccgccgccgcctgttgttcccgccgccgccgaggcgccggatcacgcggagctgcgcctcgacgccgtaactcgcgacagcagcggcagctacgagtgcagcgtctccaacgatgtgggctcggctgcctgcctcttccaggtctccggctgtccaagaactactcctacgtgctgcagtggactcagagggagcccgacgctgtcgaccctgtgctcaactacagactcagcatccgccagttgaaccagcacaatgcggtggtcaaggccatcccggtccggcgtgtggagaaggggcagctgctggagtacatcctgaccgatctccgtgtgccccacagctatgaggtccgcctcacaccctataccaccttcggggctggtgacatggcctcccgcatcatccactacacagagcccatcaactctccgaacctttcagacaacacctgccactttgaggatgagaagatctgtggctatacccaggacctgacagacaactttgactggacgcggcagaatgccctcacccagaaccccaaacgctcccccaacactggtccccccaccgacataagtggcacccctgagggctactacatgttcatcgagacatcgaggcctcgggagctgggggaccgtgcaaggttagtgagtcccctctacaatgccagcgccaagttctactgtgtctccttcttctaccacatgtacgggaaacacatcggctccctcaacctcctggtgcggtcccggaacaaaggggctctggacacgcacgcctggtctctcagtggcaataagggcaatgtgtggcagcaggcccatgtgcccatcagccccagtgggcccttccagattatttttgagggggttcgaggcccgggctacctgggggatattgccatagatgacgtcacactgaagaagggggagtgtccccggaagcagacggatcccaataaagtggtggtgatgccgggcagtggagccccctgccagtccagcccacagctgtgggggcccatggccatcttcctcttggcgttgcagagatgatgagagctgtgtggccacccccccaaccttgcccccggcacaccaaagtgtccacattgtaccaaagactgacccccgccagctggggtgcccaggggcagggccggcccgccagggagggggcctgcattggctgcaaggatgagcagagaacaaggacagaggccaggcactgaggccctggagacagctgttccacttgcacacacgcacacactcatgctcacacacacagagatatattaaagcacaagtttctatctga

SEQ ID NO: 841 - DNA, 969 bp, Artificial
  cDNA Sequence
atggggggaagcgcgttaaaccagggagtcctggaaggggacgacgcccccggccagtccctgtacgagcggttaagtcagaggatgctggacatctcgggggaccggggcgtgctgaaggacgtcatccgagaaggagctggagacctagtggcgcctgatgcttcggtgctaaaatactcgggatacctggaacacatggacagacccttcgattctaattactttaggaaaactcctcggctaatgaaacttggagagattacactgtggggcatggagctgggccttctgagcatgcggagaggagagctggccaggtttctgttcaaaccgaactacgcctatggaacgctgggctgccctcccttgatccccccaaacaccactgtcctgtttgagattgagctgcttgacttcctggactgtgctgagtcagacaagttttgtgctctctcagctgagcagcaagaccaatttccacttcagaaggtcctgaaagtggcagctacggaacgggagtttggcaactaccttttccgccagaatcgtttctatgatgccaaagtgagatataaaagggccctgttgcttctgcgccggcgatcagcaccccctgaagagcagcacctggtggaggccgccaagcttcctgttctcctgaacctgtcctttacatacctgaagctagaccgacccaccatagccctgtgctatggagagcaggctttgatcattgaccaaaagaatgccaaggccctcttcaggtgtggacaggacagtctggcggtgttgcccagagtgttaggaggccgccccctctacagctgggtttttgaagtgctcggccgtgcgctgcaccagcagttcccagcaagctgttacagggactatgtggataaagagaaagaaatgtggcaccgcatgttcgcgccctgtggcgatggttctacagcaggagaaagttga

SEQ ID NO: 842 - DNA, 419 bp, Artificial
  cDNA Sequence
ttccccctgtctgaagaaggggagcaggtttctgagtactccggggcgcggtgcctccccctaaacgcgaatggaacttttgggaaatgcccctcccccagccccttgtctggggcaacttccttgtctcttctcccccaccggtgttggggagttccttgtctccactcccaaccacagagccacaagtacattatctatgcccaggcgagtccctatgcccaggctaggagagccgcacttcttcctacagctgacacgtttggtttttggaggggaaaggggagctgtagctgaatcagtaatggaaattgatgaacctgtgatgtgactcctgggagtagtttgcaatcaccattggcccaaaaggagccatctacgtgctcagtggggtctagtaaaggataatattaattctt

SEQ ID NO: 843 - DNA, 1517 bp, Artificial
  cDNA Sequence
gggaagaggaggcgcgagaatggaggtggaggccgtctgtggtggcgcgggcgaggtggaggcccaggactctgaccctgcccctgccttcagcaaggcccccggcagcgccggccactacgaactgccgtgggttgaaaaatataggccagtaaagctgaatgaaattgtcgggaatgaagacaccgtgagcaggctagaggtctttgcaagggaaggaaatgtgcccaacatcatcattgcgggccctccaggaaccggcaagaccacaagcattctgtgcttggcccgggccctgctgggcccagcactcaaagatgccatgttggaactcaatgcttcaaatgacaggggcattgacgttgtgaggaataaaattaaaatgtttgctcaacaaaaagtcactcttcccaaaggccgacataagatcatcattctggatgaagcagacagcatgaccgacggagcccagcaagccttgaggagaaccatggaaatctactctaaaaccactcgcttcgcccttgcttgtaatgcttcggataagatcatcgagcccattcagtcccgctgtgcagtcctccggtacacaaagctgaccgacgcccagatcctcaccaggctgatgaatgttatcgagaaggagagggtaccctacactgatgacggcctagaagccatcatcttcacggcccagggagacatgaggcaggcgctgaacaacctgcagtccaccttctcaggatttggcttcattaacagtgagaacgtgttcaaggtctgtgacgagccccacccactgctggtaaaggagatgatccagcactgtgtgaatgccaacattgacgaagcctacaagattcttgctcacttgtggcatctgggctactcaccagaagatatcattggcaacatctttcgagtgtgtaaaactttccaaatggcagaatacctgaaactggagtttatcaaggaaattggatacactcacatgaaaatagcggaaggagtgaactctcttttgcagatggcaggcctcctggcaaggctgtgtcagaagacaatggccccggtggccagttagagcagagacttcactgactgacttacaggtgccctattctgaggtacaggagccgcggctttctgatgggggaaaatgccgccttaggctggagccaacatgactgtcctttaaactccagtggctggccaggcacggtagctcacgcctgtaatcccaacactttgggaggccgaggcaggtggatcacctgaggtcagaagttcaagaccagcctggccaacatggggaaaccctgtctttactaaaaatataaaaattagctgggtgtggtggcgggcacctgtaatcccagctactcgggaggctgtggcaggagaatcgcttgaacccaggaggtggaggttgcagtgagccaagatcacaccattgcactccagcctgggcgacagagtctccatctggggaaaaaaattaaataaataaactcccg

SEQ ID NO: 844 - DNA, 1165 bp, Artificial
  cDNA Sequence
atggcgcaaccaaagcaagagagggtggcgcgtgccagacaccaacggtcggaaaccgccagacaccaacggtcggaaaccgccagacaccaacgctcggaaaccgccagacaccaacgctcggaaaccgccagacaccaaggctcggaatacacgccagaccacgacggagggcgaccacctcccttctgaccctgctgcgggcgttcggaaaaaaaacgcagtccggtgtgctctgattggtccaggctctttgacgtcacggactcgacctttgacagagccactaggcgaaaaggagagacgggaagtattttttccgccccgcccggaaagggtggagcacaacgtcgaaagcagccaatgggagcccaggaggcggggcgcctgtgggagccgttgagggcactttcccagtccccgaggcggatccggtgttgcatccttggagagagctgagagctcgagtacagaacctgctaaggccatcaaacctattgatcggaagtcagtccatcagatttgctctgggccggtggtactgagtctaagcactgcggtgaagaagatagtaggaaacagtctggatgctggtgccactaatattgatctaaagcttaaggactatggaatggatctcattgaagtttcaggcaatggatgtggggtagaagaagaaaacttcgaaggcttaactctgaaacatcacacatctaagattcaagagtttgccgacctaactcgggttgaaacttttggctttcgggggaaagctctgagctcactttgtgcactgagtgatgtcaccatttctacctgccacgtatcggcgaaggttgggactcgactggtgtttgatcacgatgggaaaatcatccagaaaaccccctacccccaccccagagggaccacagtcagcgtgaagcagttattttctacgctacctgtgcgccataaggaatttcaaaggaatattaagaagaaacgtgcctgcttccccttcgccttctgccgtgattgtcagtttcttgagggctccccagccatgcttcctgtacagcctgcaaaactgactcctagaagtaccccaccccacccctgctccttggaggacaacgtgatcactgtattcagctctgtcaagaatggtccaggttcttctaga

SEQ ID NO: 845 - DNA, 482 bp, Artificial
  cDNA Sequence
caggcctacactttgtgcatccaaagtcagaagcacacttatgagatcaatttagttcagcatgtggaagaatggcattcagtgagctatgccatcacgtcacataaagaaaatgtaaccatggctgcagagatttcgttgggtcactctaaactgttaccaagatatgtaactgaactgtggatcctttcaacaaatctctatatgaggggctgaatatagagaaccaacgaactaagatcattgtcatcttcctgaaagatgagaagtaacattctttgcctaccatcattggaggcaacgttgatggccttctggttttgataattatagtcattctgtccaagtgtggcattttccccccagccctcttctcgtgttagcaaggtatgtggctttttaaaaagaaaatatcaataattgaacttagcatagggaaggcccagatgaagccagcgaatctgctcacagaaaaaaaataa

SEQ ID NO: 846 - DNA, 3334 bp, Artificial
  cDNA Sequence
gcggccgctgcgactccggagccggcggggggctccggtccttccctgcgccaccgcacaggacatctctctggctggggagcggcggtgagacccgccgagggcgtctgtgtccctcctcccccgcggtcctcggtgcgtccgcacgcccctcctcctcggctccctccttcttctctccgcgcctctccgccccctccccgtctccgcaggccgagtggtgcggcccgcctccagctgaccggcctggaatcccggctccgagccccggactcgcgcccgcccgcgcgcccgctccttccccctccccccgccccgagccccccgacgccgccgccaccgcctcctcagagcggggcccgggcccagccgccgccaccgctgccgccgccgagctccgccgccgccgagcaccatgggagacgctgggagcgagcgcagcaaagcgcccagcctgccgcctcgctgtccctgcggcttctgggggtccagcaagactatgaatctctgttccaaatgctttgctgattttcaaaagaaacagccagacgatgattccgctccaagtacaagtaacagccaatcagatttgttttccgaagagaccaccagtgacaacaacaatacctcgataaccacgccaactcttagtcccagccagcagccgcttccgacagaactgaatgtaacttcaccgagtaaagaggagtgtgggccatgcacagacacagctcatgtctcattaatcacaccaacaaaaagatcctgtggtacagcagattcacagtctgagaatgaggcttcaccagtaaaacggccacgactacttgagaatacggaacggtccgaggaaaccagtcgatctaaacagaagagtcgacgtcggtgcttccagtgccaaaccaaactggagctggtgcagcaggaattgggatcgtgtcgctgcggttatgtgttctgtatgttacatcgcctccccgagcagcacgactgcacattcgaccacatgggccgtggccgggaggaagccatcatgaaaatggtgaagctggaccggaaagtggggcgctcctgccagcgcatcggggaggggtgctcctgaaggccaggcatggccaccacgtgacgctgttcttagttcactaatgttagccttatttaggacaaagtcagccagacaccttgtactgggcacgcgtcagactgcagccagtccgtttcctttctttagccagccatcctggtactgtagtttaggggttgatggtggttgaaattgatttctggctggttactaaggtgcctgctagccattgtataaaattaaaacatgaagaatattttttttttgagcatggctagtggatttaaaacaacacatacctgtcactgctggagtcaaacttataaaaagccttaagtggaaagtgttccagacggagactctgagttaatagaggagtagaagctggtgttaaagttcccacgacgcacatggctttgccagaaactctgtttaatgatcggcctttcacctcttcacttatccttagtcccagtagccaggatacctgatggccacgtgtgccttggccacgggaggctgctgagattggccacgtggctgggctgggtggtggcctcactctcccacagagctggaaatggggggtgggggacagattcttacggaaatttttttacctgacttgctatgaaaaaactcatcacacaagaagagaaacagtaacctcactttgaaaattagctccactcaagactagtccacgaacgagacccgccttttctacacaggatccaaggtcacgagaagcagccagagtgccccgcctccgccggctctggtctgccattcgccagtgcagggatctggcacggaccagatgtggcgaatggcagcacagcgcggtggctgggtctgcacactggcctctgcagccagatttctatattgggagttttttaaaaagacatttcatagccaacaagaatcagtagaagtgctgggagcagcagctggggaagctgccgcccacgggctctgccccttccagctggagccgcccgtgcctccaggggccaagaggatgatgtcgtggcctccattctcgtttctatgcagccccatagtccaaggacacccagtccacatctaccatatagcaagtttagtaagggaaggcagcatacgtcccagggacagtgggtttggatctgtctagaacagcggtttgtggctgtggcccagctccgagagtgatatttgctctggtaggtgagggcctgagggtacatttctccacctgtgccccctcatgttcacagaggatttcagcagctgcaactgcgcacgccaggtggggaagggtgggggtgggcctggttgccccatgttaggaaatcactaccagtcaggtggggctggggctgggtggacaggatcaggattcccttgaaagcccaggcagggtgagcagtcccagtggtcctagtgccgcatcagatccaggtgggtgagggcaggaggcccctgcggaggcagcgtggatctgcccacacataggctactggaatagtttaacccagcaactttcctttttataaaacaacaaatggttcaactctgtctgcaaattaacagctgaacacctgcaactgcaaatgttttttgatccgacgtactgaaataggaagtcatgctcttcccaccctccacccaccagagtggaacccgctgcaaaatccccagccttaattcttgcttcaggacccagaccggtgtcttgctctagggcaacccagggcagaggggccaggtctgcccagcgtttaccactgctgtcaagccacagcccttggccaccatacgggccatcctcagtgaggcagccccccataggcttccgccaagctctggtcccgaagaggctgtgcgagcccttcccggccctccccagggccccccgccccctcctctgcctgctgcgtggaggcagccatgggaaggagcccaggggagctggcctgggggagcgaagcccatgttcgcttcctgacttagagctggggggggtggggggtggggcttgttcccctgcagtatctgttctgtgaagtttgttaaatgtaaggaaagcttaaattcttgtatctttaaaagagaaaatcttatttaacccttttgtgttctagatttacttacacacatagcctagagctcagttttagttttaacattgtgaaaatattaaaagaatcttgtaactttattcttttttctcctgctgaaaaaaaaaattaaaccaatcgtatg

SEQ ID NO: 847 - DNA, 310 bp, Artificial
  cDNA Sequence
tttctttttgtttgccccaggtccagcaagactatgaatctctgttccaaatgctttgctgattttcaaaagaaacagccagacgatgattccgctccaagtacaagtaacagccaatcagatttgttttccgaagagaccaccagtgacaacaacaatacctcgataaccacgccaactcttagtcccagccagcagccgcttccgacagaactgaatgtaacttcaccgagtaaagaggagtgtgggccatgcacagacacagctcatgtctcattaatcacaccaacaaaaagatcctgtggtacag

SEQ ID NO: 848 - DNA, 418 bp, Artificial
  cDNA Sequence
cagacgatgattccgctccaagtacaagtaacagccaatcagatttgttttccgaagagaccaccagtgacaacaacaatacctcgataaccacgccaactcttagtcccagccagcagccgcttccgacagaactgaatgtaacttcaccgagtaaagaggagtatactcactctgttgcccaggctggagtgcggttgtaccatctcagctgactgcaacctctacctcctgggttcaagtgattctcctgcctcagcctcctgagtagctggcattacaggtgcctgccaccatgcctggctaattagtagaaacaggatctcaccatgttggccaagctggtctcgaactcctgacctcaaatgatctaaccaccttggtctcccaaagtactgggattacaggcatgagccac

SEQ ID NO: 849 - DNA, 693 bp, Artificial
  cDNA Sequence
agggatgtccttcctgagatccgtgctatctgcattgaggaaattgggtgttggatgcaaagctacagcacgtctttcctcaccgacagctatttaaaatatattggttggactctgcatgataagcaccgagaagtccgcgtgaagtgcgtgaaggctctgaaagggctgtacggtaaccgggacctgaccgcacgcctggagctcttcactggccgcttcaaggactggatggtttccatgatcgtggacagagagtacagtgtggcagtggaggccgtcagattactgatacttatccttaagaacatggaaggggtgctgatggacgtggactgtgagagcgtctaccccattgtgtaggcctctaattgaggcctggcctctgctgtgggtgaatttctgtactggaaacttttctaccctgagtgcgagataagaacgatgggtggaagagagcaacgccagagcccaggtgcccagaggactttcttccagcttctgctgtccttctttgtggagagcaagctccacgaccacgctgcttacttagtagacaacctgtgggactgtgcagggactcagctgaaggactgggagggtctgacaagcctgctgctggagaaggaccagaacctgggtgatgtgcaggagagcacactgatagaaatccttgtgtccagtgcccagcaa

SEQ ID NO: 850 - DNA, 241 bp, Artificial
  cDNA Sequence
attcacagtctgagaatgaggcttcaccagtaaaacggccacgactacttgagaatacggaacggtccgaggaaaccagtcgatctaaacagaagagtcgacgtcggtgcttccagtgccaaaccaaactggagctggtgcagcaggaattgggatcgtgtcgctgcggtgtttctctggagagagatgtgtggcatttatagtctgatgccccctgaccacgttgccactcggacattct

SEQ ID NO: 851 - DNA, 261 bp, Artificial
  cDNA Sequence
atgttgccattacaggggccagtgtcattcaaagatgtggctgtggatttcacccaggaggagtggcggcaactggaccctgatgagaagataacatacggggatgtgatgttggagaactacagccatctagtttccttggtccttcttcttttcccattaacaagatatgatatcaccaagccaaacgtcatcattaagttggagcagggagaggagctgtggataacgggaggtgaatttccatgtcaacatagtcca

SEQ ID NO: 852 - DNA, 439 bp, Artificial
  cDNA Sequence
tgtgtgtgtgtaagagagcgagcgagagagacgccagccgttgtgatgatgttaacattctctgggtctacaccagtggccctttctgcctgcatttttattacaacatagtcctaacactgcatttcactgtcaggcacctccgtccactccactcctgcgcactcctcccggctgtgtctcctgtcttttttgggtcccttttggaaatgtgggctcctcagagtatttggagccaccttccccccaacacctccacctctaggggcctggtcctttgggagtgggcagggggcctatgaaaagcacctagcacccacggaagacaatgacatcatgtggggccaagtccgatgtcctccatcacacactattgcccagcttccatgggccttgcaagtttaaggggaaaaaaaatgggaagccatttctgagaaaa

SEQ ID NO: 853 - DNA, 2037 bp, Artificial
  cDNA Sequence
gagtcggagccacagccagagccctgcccaggccgagccggagctgcagcccgagcgcggtggtgccctcagccccgtcctcttgtcctcctcagcctcggtgccttggaatttgtgtcgctgagtcagcaagcctttcagatttgcccggtttttgttgtttgtggtttgtatcaagatgggaactcaaacaagtcattcctcctaaggagctggtgtcttcatccagaagggacagtttgtgccagctctccagagagaaaagatctgccggaggcgctgggcaatgaccccgggactccaggccagaggggtctgaagctgtttgggaaagcagcgggactccttgggaagatggccatggccccaagcccttccctggtgcaggtgtacaccagccccgcagctgtggctatggcaggatgggctgggcacctggcacccctacagtgccaccatctgcagcttcatcgagcagcagtttgtccagcagaagggccaacgttttgggcttgggagcctggcccacagcatccccttgggccaggcagacccctcgctggcccgttacattattgacctccccagctggacccagttccgccaggacaccggcaccatgcggactgtgcggagacacctgttcccccagcactcagcccctggccgaggtgtcgtctgggagtggctgagcgacgatggctcctggaccgcctatgaagccggcgtctgtgacgatctggagcagcaggtggccaggggcaaccagctcgtggacttggcccccctggggtacaactacactgtcaactacaccacccacacgcagaccaacaagacttccagcttctgctgcagcgtgcggcgccaagcagggccgccttacccagtgaccaccatcatcgctccgccgggccacacaggcgtcgcctgctcttgccaccagtgcctcagtggcagcagaactggccctgtatcaggccgctaccgccactccatgaccaacctccctgcataccccgccccccagcaccccccccacaggaccgcttctgtgtttgggacccaccaggcctttgcaccatacaacaaaccctcactctccggggcccggtctgcgcccaggctgaacaccacgaacgcctgggacgcagctcctccttccctggggagccagcccctctaccgctccagcctctcccacctgggaccgcagcacctgcccccaggatcctccacctccggtgcagtcagtgcctccctccccagcggtccctcaagcagcccagggagcgtccctgccactgtgcccatgcagatgccaaagcccagcagagtccagcaggcgctcgcaggcatgacgagtgttctgatgtcagccattggactccctgtgtgtcttagccgcgcaccccagcccaccagccctcccgcctcccgtctggcttccaaaagtcacggctcagttaagagattgaggaaaatgtccgtgaaaggagcgaccccgaagccagagccagagccagagcaggtcataaaaaactacacggaagagctgaaagtgcccccagatgaggactgcatcatctgcatggagaagctgtccgcagcgtctggatacagcgatgtgactgacagcaaggcaatcgggcccctggctgtgggctgcctcaccaagtgcagccacgccttccacctgctgtgcctcctggccatgtactgcaacggcaataaggatggaagtctgcagtgtccctcctgcaaaaccatctatgagagaagacggggacccagccccagggaaagatggaggtattacggttccagatgtcgctccccggccacgaggactgcgggaccatcctcatagtttacagcattccccatggcatccagatgaggggccttcttgacaccctatcctggtgtctgttcctcccgcagggccctgagcaccccaatcccggaaagccgttcactgccagagggtttccccgccagtgctaccttccagacaacgcccagggccgcaaggtg

SEQ ID NO: 854 - DNA, 1056 bp, Artificial
  cDNA Sequence
aatggaaaccagaaatcagatatttatgcccaagaaaagcaggatttcgttcagcactactcccagatcgttagggtgctgactgaggatgagatggggcacccagagacaggagatgctactgcccggctcaaggaggtcctggagtacaatgccattggaggcaagtatcaccgaggtttgatggtgctagtagcgttccgggagctggtggagccgaggaaactggatgctgatagtctccagtgggcaccgactgtgggctggtatgcgcaactgctgcaagctttcttcctggtggcagatgacattatggattcatcccttacctgccagggacagatctcctggtatcagaagctgggcatgggtttggatgccatcaatgatgctatccttctggaagcatgtatctactgcctgctgaagctgtattgccgggagcagccctattacctgaacctgatggagctcttccagcagaattcttatcagactgagattgggcagaccctcgacctcatcacaaccccccagggcaatgtggatcttcgcagatgcaccgaaaaaaggcacaaatctgttgtcaagtacaagacagctttctactccttctaccttcctgtagctgcagccatgtacatgtcaagaatggatgacaagaaggagcacaccagtgccaagaagatcctgctggagattcaagagttctttcagattcaggatgattaccttgacttctttggggaccccagtgtgactggcagagttggcaatgacttccaggacaacaaatgcagctggctggtggttcagtgtctgctacaggccactccagaacagtaccagatcctgaaggaaaattacaggcagaaggaggccgagaaggtggcccgggtgaaggcactatacgaggagctggatctgccagccgtgttcttgcagtatgagaaagacagttacagccacgttatgggtctcatcgaatagtacgcagagcccctgcccccagccatctttctggggcttgggcacaaaatctacaagtggaaaaag

SEQ ID NO: 855 - DNA, 112 bp, Artificial
  cDNA Sequence
aggaagaatcgctgcttttctcaagcaaatcggtttcttgatatcttctggttctcactccttgcctgctcctgatgctttgaccccttttattgatcagagtgctctagaa

SEQ ID NO: 856 - DNA, 2661 bp, Artificial
  cDNA Sequence
atgaactccacaaccactactgcagtttctgcctcctccacctcgtcctctgccgtctccacccctcctttaattaagcctgtcctgatgtccaagtcagtgccaccttcaccagagaagatcttaaatggcaaaggaattctgccaaccaccatagacaagaaacaccaaaatggcaccaaaaacagcaacaagccttacaggagactttcaagagaatttgacccaaataaacactgtggagtattggatcccgagacaaagaaaccttgcacaagatccctcacctgcaagacacattcgctaagccatcggagggcagtcccaggccggaaaaagcaatttgacctcctcctggcagaacacaaagcaaagtcccgggaaaaagaagttaaagataaagagcatctcctgacttccacgagggaaatacttccaagccaatccgggccggcacaggattctctgctagggtcttcagggagctctgggccagaaccaaaagttgcatcccctgcaaaatccagaccacccaactctgtacttccttatctcccatcatctgcaaatagcataagcagcagcacatcttcaaatcatagcggccacactccagagcccccactcccaccggttggaggtgacctcgccagccgactgtccagtgatgaaggggagatggacggagccgacgaatccgagaagctagactgtcagttctccacgcaccaccccagacctctggcgttttgctcatttgggagtcgcctcatgggacgagggtactatgtgtttgatagaagatgggatcgttttcgattcgcactaaactccatggtagaaaaacacctgaattcacagatgtggcacagaaacccgagccacagggcatcaggtccctcccccctgttcaggacttgcctaaccaatctgctgtcactgagcaacattggggctgcctgggtgtcaactctggagagcgtagcaccccgctaccctctcaacctcgctgcccaaaccccaggccccggcgggcccgaacctggagggatggcagccgatgggggcgtggaagacattaggaagaaaaggaacggccaagactcttttttctttaacaagcatttaactctgcatcaggagccgccaacacagtattctctttcagccaagatccctcctgcggcagatagccccctgccctcgccagcagcccacatcaccacccccgttccagcatccgttttgcagcctttcagcaaccccagtgctgtgtatcttccttcagctcccatcagctcgaggctcacctcttcttacataatgacatcagccatgctctcaaacgcagctttcgtgacatcgccggacccgagcgccctcatgtcccacaccacagctttccctcatgtggccgcaaccctcagcatcatggactcaaccttcaaggccccatccgccgtgtccccgataccagccgtcatcccttccccatcccacaagccatccaaaaccaaaaccagcaaatcctcaaaagtcaaagacctgtccacccgtagcgacgagtctccaagtaacaaaaaaaggaagccacagtcttcgacttcctcctcctcctcctcctcctcctcttccttgcagacatccctctcgtctccactgtcagggcctcacaaaaagaactgtgttttgaatgccagttctgctttgaactcctatcaggcggcccctccctataacagcctgtctgtgcacaactcaaacaatggggtgagcccactcagtgccaaactggagccctcaggacggacctcgctgcccggcggccccgcggacatagtgagacaggtgggcgcggtgggaggcagcagtgactcctgtcccctctctgtgccctcccttgcgctccacgcaggggacctctctctggcctcacacaatgctgtgtcttctctgcccctctcttttgacaaatcagaaggaaaaaagcgtaagaactcgagttctagtagcaaagcctgtaaaatcactaaaatgcctggtatgaatagcgttcacaaaaagaacccgcccagccttctcgcaccggtgcccgatcccgttaacagcacctcctctcggcagaattctttccttcctaaagaaaaactgcaactgtcaccagctggcaaagaagtgttcaatgccatggtgcagataggagtgtgtatgaacatgtggcatcggcgggcccttcccaggctggctcgtgtgtctgagtggggcttcaatggtgtctttcaggttgggaaaaatagcagcctagctttgtcacaatccagtccttcaagtatatccagcccaggacacagccgacagaggactcccaggaatgtccgcggcattcgtccttgtgttttcctccacagtgaggacctctgtgactgccttacatgcatggatccgtcacctcatttgctattgggtcctttagatccatcatctcttgctattccagctgccctttgctggatatgggaggctagtcaaatgaagcagtgggatatgctgcattttcaaaaagccttcccaggagactacagtgtttgtgctgggtcaagaatcacagtaagtctacaccaagcagaagctgtgtactctcaaactcttgtggactcctga

SEQ ID NO: 857 - DNA, 1293 bp, Artificial
  cDNA Sequence
atggaggatgagaaatcttcaccaaaggacatggatgaaaatgaaagcaaccagtctctgatgacaagcagccaatatcctaaagaagcagtaagaaaacgtcaaaattcagcacggaattccggagcaagtgattcttctaggttttctaggaaaagcttcaaactggattatagactagaagaagatgtaactaaatccaagaaaggaaaagatgggagatttgtgaatccgtggccaacatggaaaaacccctctattccaaatgttctcagatggctgataatggagaaagatcacagcagtgttccaagttctaaagaggaactagacaaagaactcccagtgcttaagccatattttatcactaaccctgaagaagctggagtgagggaagctggcttaagagtcacatggctgggacatgccacggtaatggtggaaatggatgagctcatatttctcacggatcccatctttagctctcgtgcttcaccatcgcagtacatgggtccaaagcgatttcgtcgttccccgtgcacaataagtgaactccctccaatagatgcggtccttatcagtcacaaccactatgaccatctggactacaattctgtcattgctttgaatgagcgatttggtaatgagttgagatggtttgtgcctttgggtctccttgactggatgcaaaaatgtggctgtgagaatgtgattgagttggactggtgggaggagaattgtgtccccggacatgataaggtcacttttgtctttacaccttcccagcactggtgtaaaaggactctaatggatgacaacaaggtgctatggggcagctggtctgtcttggggccttggaatcgattttttttcgcaggagatactggttattgccctgcttttgaagagataggaaaaagatttggaccttttgaccttgcagctattcccatcggagcttatgaaccgtggtttatgaaataccagcatgtagacccagaagaagctgtaaggattcacactgatgtccaaacaaagaaatctatggcaattcactggggaacttttgccttagcaaatgagtggtttgtagtttttcctgaagaggtccttcacatccctccctctgctgcaggtctgctggagtttgctggaggtccactccagaccctgtttgcctgggtatcaacatcggaggctgcagaacagcaaagattactgcctgtttcttcctctgcaagctttgtcccagaagggcacccgtcagatgccagccagaggtctcctgtatga

SEQ ID NO: 858 - DNA, 522 bp, Artificial
  cDNA Sequence
gatggaagcagaggttggaatgatggaagcagaggttggaatgagggaagcagaaattggaatgatggaagcagaggttggattgatggaagcagaggttggaatgatggaagcagaggttggaatgagggaagaagaggttggtttgagggaagcagagattggaatgatggaagcggaggttggaatgatggaagcagaggttggaatgatggaagcagaggttggactgatggaagcagaggttggaatgagggaagcagaggttggaatgagggaagcagagattggaatgatggaagcaggggttggaatgatggaagcagaggttggaatggtggaggcagaggttggaattatagaagcagaggttggactgacagaagcagaggttggaatgagggaagcagaggttggaatgaggtaaggagaggttggaatgagggaaggagaggttggaatgagggaagcagaagtcggaatgagggaagaagaagttggactgatggaagcagaggttgg

SEQ ID NO: 859 - DNA, 839 bp, Artificial
  cDNA Sequence
ctgaagctagtgagtcgcggcgccgcgcacttgtggttgggtcagtgccgcgcgccgctcggtcgttaccgcgaggcgctggtggccttcaggctggacggcgcgggtcagccctggtttgccggcttctgggtctttgaacagccgcgatgtcgatcttcacccccaccaaccagatccgcctaaccaatgtggccgtggtacggatgaagcgcgccaggaagcgcttcgaaatcgcctgctacagaaacaaggtcgtcggctggcggagcggcttggaaaaagaccttgatgaagttctgcagacccactcagtgtttgtaaatgtttcctaaggtcaggttgccaagaaggaagatctcatcagtgcgtttggaacagatgaccaaactgaaatctattttgactaaaggagaagttcaagtatcagataaagacacacacaactggagcagatgtttagggacattgcaattattgtggcagacaaatgtgtgactcctgaaacaaagagaccatacaccgtgatccttattgagagagccatgaaggacatccactatttggtgaaaaccaacaggagtacaaaacagcaggctttggaagtgataaagcagttaaaagagaaaatgaagatagaacgtgctcacatgaggcttcagttcatccttccagtgaatgaaggcaagaagctgaaagaaaagctcaagccactgatcaaggtcatagaaagtaaagattatggccaacagttagaaatcgtaagagtcaaatattttctttgcttcatgttacctaaatattgtattctctagtaataaatttgtagcaaacattca

SEQ ID NO: 860 - DNA, 978 bp, Artificial
  cDNA Sequence
atgctcccggctcaggaggctgccaagctgtaccacaccaactatgtgcggaactcgcgggccatcggcgtgctgtgggccatcttcaccatctgctttgccatcgtcaacgtggtgtgcttcatccagccctactggataggcgacggcgtggacaccccgcaagccggctatttcgggctcttccactactgcatcggcaacggcttctcccgggagctgacctgcaggggcagcttcacggacttctccacgctgccctcgggcgccttcaaagccgcctccttctttatcggcctctccatgatgctcatcattgcctgcatcatttgctttaccctcttcttcttctgcaacacggccactgtgtacaagatatgtgcctggatgcagctcacctccgaggacagttcacgtgacctcacttccacatctccagccaagggttctgggttccacggatgtgggaaggatccattccaggctccctctagcaccaccgccctcccctttccataccactggcagaaccaaaaagagagcagggtggcaaagcagaaatgtgacttccagagtcccagccccagcatcgaaaaagagagtactggaggggtgggtttgaagctaagaaacaatagtttaataacgtgcacaaatgtattattctttaacgtaagactgagtcagaaagatgagcactgtatatgtggatgggtagatgtctacagtgactatgcattgcctactgatgtgatgtctgtttccaggactgattcagtccgagaagagatgggaaagtcagtagatattgaagcctcagaggttccacagaatctagaaaaagcagagcaaaataaacccaaagcaagcagaaggaaagaaataataaagaacagcagttctccattttggctgtacatcaggggagctttaaaaaaataccaatatctggatcccatccccaagaattctgattaa

SEQ ID NO: 861 - DNA, 849 bp, Artificial
  cDNA Sequence
atggagtggtgggacgaatctgaggagtcgttggaggaggagccacggaaggtgctcgcccctgagcctgaggagatctgggtggcggagatgctgtgtggcctcaagatgaagctgaagcgacggcgagtgtcgctcgtgctccctgagcaccacgaggccttcaacaggctgcttgaggatcctgtcattaaaagattcttggcctgggacaaagatctgagggtgtcggacaagtatctcctggctatggtcatagcgtatttcagccgggctggcttcccctcctggcaataccaacgcattcatttcttcctggctctctacctggccaatgacatggaggaggacgacgaggactccaaacaaaacatcttccacttcctgtataggaagaaccgctctcgcatacccttgctccgtaagcgttggttccagttaggccattccatgaacccgagggccaggaagaaccgctctcgcatacccttgctccgtaagcgtcggttccagttataccgttccacgaacccgagggccaggaagaaccgctctcgcatacccttgctccgtaagcgtcggttccagttataccgttccatgaactcgagggccaggaagaaccgctctcagatagtcctgttccagaaacgacggttccacttcttctgttccatgagctgcagggcttgggtttccccagaggagttggaggagatccaggcttatgacccagagcactggaacactggacccaggggagatgtggattttcagcaggaactttattccaatgctaatggcagacaccaggcaggaggagaggaaccatttgtgcagatcatctag

SEQ ID NO: 862 - DNA, 372 bp, Artificial
  cDNA Sequence
atgagacaagaggtagaggggagaggtagaggtagccacgagctgataattacagacaagagatgcggagtatgtgggggctcattatcctgcatagtctatctttgtatatctttgaacttttcaagaataaaaaagcttaaaaagtatacatggcctggtcctaccagagactcacccaatgccagcctccagccagggagagccaagtttgcattttcacacgcatctcacactcctctgcactctcaacttggagcgctccaaacagggaaaccccaagccttgctggcttctgccaaccccctgagcagaagcatgggtccccctgatcaccacctcaccaccctcatcctgatctcactgtacaca

SEQ ID NO: 863 - DNA, 1308 bp, Artificial
  cDNA Sequence
caggtggccgggatgcagtacctgcacggcgtcctgggccccatcatcaacaaggtgtttgaggagaagaagtacgtggagctggaccccagcaaagtggaagttaaggatgtagggtgctccaggctgcaccgcccgcagaccgaggccgaggtgctggagcagagcgcgcagacgctgcgcgcccacctgggggccctgctgagcgcgctcagccgctcggttcgcgcgtgccccgccgtggtgcgcgccaccttccgccagctcttccggcgcgtgcgcgagcgcttccccggcgcccagcacgagaatgtaccgttcatcgccgtcaccagcttcctgtgcctgcgcttcttctcccccgccatcatgtcgcccaagctcttccacctgcgggagcgccacgcggacgcccgcaccagccgcaccctgctcctgttggctaaggcagtccagaacgtgggcaacatggacacgccggcttccagggccaaggaggcttggatggagccgctgcagcccaccgtgcgccagggcgtggcgcagctgaaggacttcatcaccaagctcgtggacatcgaggagaaggacgagctggacctgcagcggacgctgagtttgcaggcgccacctgtgaaggaggggccactcttcatccacaggaccaagggcaagggccccctcatgtcctcctccttcaagaagctctacttctccctcactaccgaggccctcagcttcgcgaagacgcccagctccaaggtggctgtagtcccagcactttgggaggctgaggtgggaggatcactggaggccaggagtttgagaacagcctggccaatgcctccccctccgtgtcccctgcagtgtgtgaatgagcttaaccagtggctgtctgcgctgtggaaggtgagcatcaacaacaccggactgctgggctcctaccaccctggcgtcttccgtggggacaagtggagctgctgccaccaaaaagagaagacaggtcagggctgcgataagacccggtcacgggtgaccctgcaggagtggaatgaccctcttgaccatgaccttgaggcccagctcatctaccggcacctgctgggcgtggaggccatgctgtgggagaggcaccgggagctgagcgggggcgcagaggcaggcacggtgcccacgagccctggcaaagtccctgaggactcattggcccggctgctccgggtgctgcaggacctccgcgaggcccatagctccagcccggccggctccccaccctcagagcccaactgcctcctggagctgcagacg

SEQ ID NO: 864 - DNA, 162 bp, Artificial
  cDNA Sequence
atggaagacagtagcacagacacagaaaaagaagaggaagaggagaaagatgaaaaggatcaagagcccatttatgccatagtgcccacaattaacattcaagatgagcggtttgttgatttatctgaaactccagctttcatttttctgcatgaggtatat

SEQ ID NO: 865 - DNA, 779 bp, Artificial
  cDNA Sequence
aaaggaaaggaggccaaggggaagaagttggctctggcccctgcttttgtgaagaagcaggaggccaagaaagtggtgaatcccctgtttgagaaaaggcctaagaattttggcattggacaggacatccagcccaaaagagacctcacctgctttgtgaaatggccccgctatatcaggttgcaatggcagagatccatactctataagcagctgaaagtgcctcctgcgattaaccagttcacccaggccctggaaggccaaacagctactcagctgcttaagctggcccacaaatacagaccagagacaaagcaagagaagaagcggaggctgttggcccaggcagagttgtgggcaaaggggacctccccattaagagaccacctgtctttcgagcaggagttaacaccatcaccacctttgtggataacaagaaagctctgctggtggtgactgcacacgacatggatcccattgagctgactgttttcctgcctgtcctgtgtcataaaatgggagccacttgctgcattatcaaggggaaggcaagactgggatgtctagttcacaggaagacctacaccactgtcgacttcacacaggttaactcagaagacaaaggagctttggctaagctgatggaagctatcgggaccaattacaatgccagatacgatgagacccactgtcactgggacggcaatgtcctgggtcccaagtctgtggctcacattgccaagctcgaaaaggcaaaggctaaagaacttgccactaaa

SEQ ID NO: 866 - DNA, 677 bp, Artificial
  cDNA Sequence
ttactagaaaaagaaactctgtattacagaaaagcaaatgggtgcaaggtaccgcaaaatcacgacctaccaaatgcagcataggcacagaaaaagaacagtttaaataagcggaaccccttattgatgaagagttagagttaacacagggatttaccaattgaactcagagattttaaccagcttatcaaagctaattaaaatggggttgtgatattgaaaatatagcaagagaagaagagggaaaaagcttacgggaggtccttgaatactcaactgtgttctgggaaaaacgcaatgagctccaggacatagacaagattatggctcagagtgaaagggagagataagaattcagagaataatttgcatcagaaaagcacctgacaaaaagatcagatggtacaaagcatctagcaccttttcttcagctgaggatatcatggtactattataacagagggaaaaactgtactgaggaagaggatcattctgtattttgtgtgcttggattcaacaaggaaaatatttgtgatgaaatgcaatagcccttacaagcggtccctgttctgtctcaatttgactggtttcttaaatccagaagtgcagtggaactccagaggagatataacaccttcataaccttgatttgtaaagaaaacgtagaactagaagaa

SEQ ID NO: 867 - DNA, 319 bp, Artificial
  cDNA Sequence
aaaaggagagaaaaaccattcaataccagaggagtgagcttgagaaaaggtaataaggagtaggacaaacgtaagtcaattccaggattagtgtcagcctgaggctctggggagcggcctccggagatattgaccgagcagggagagcagggattacacaaataaccaattaaagaacatggtggggccggataaagagctcctgtagctccggcctctgtcgccatcagcatcagcctgggagtctccccaggacggcatggcacgtgagcagcactgcagtccttgggtcttcggcgccaacctgcaaccctgatca

SEQ ID NO: 868 - DNA, 560 bp, Artificial
  cDNA Sequence
ccccatccattaaaggcaagagagtgaaaagtgggagagaaagctcccaagttcaacagcagtgacctagggtcatgcagtgaggacttacaaagtccaagaagaaagcatttggagaagtgctacacatgctcaactgaacttcctgtcaaattgttctcactcgtttgggcacaagtctgcttaagccatctctcattaacatttactcttgcccgaagccctctacgcccccaacccctgctaatcttccacaagcaagctgatcacactgggatctccttttcccagacacgtttgattctcactttctcctgaacctagaaatgtgcttcccaccaaagcatgccaggcactaactcgtccctactgaaaggggctgttaaaagctcatcttctttccagatggtagtgaggtgtgaggtgatcctttctctttcttttttttttttttttacttttagctacccctcaattctggtgttcagtaacaatgtattccacttaaaagagagaaatcatattaattattctaagatataaacacttaattttattca

SEQ ID NO: 869 - DNA, 1207 bp, Artificial
  cDNA Sequence
atgaacagacagttggacctaagtgggaaggtaatcatgaaagctcaacttggggaggatattccaaaaattcctattcataatgaagatattaatattacttatgatgaattagtgctaatgatgcaacgagttttcaggggaaaacttctgcgtaatgttgaagtaacaataaagtataaagatgcagatgacgatcttataacaatttttgatagttctgatctttcctttgcaattcagtgtagtaggacactgaaattgacattatttgttaatggccaacgaagaccccttgaatcaagtcaggtgaaatatctctgtcgagaactgacagaactttgaaataaagtgaatcacttattggatagcttggaaccacctggaaaaccaggaccttccactaatattcctgaaaatgttactgtgaatggtagggaagaaaagcctgcttcttcggattcttctggaaaacagtctactcaggttatggcagcaagtatgtcagcttttgacccttttaaaaaaccaagatgaaataaaaaataatgttacgtcggcatttggcttaacagatgatcaggtttcagggcaacccagtgctcctgcagaagactgttcaggaacatctgacagcattgccgcctcctcctcagtagcagctcacccaccaggagttcagccacagcaaccaccatatacagaagctaagatacaagcaggtcagactgaaagtcagctgtatcaatagtaccagcaacaggctagctatggtgcaccgtgtctgcgggctctacctcagcagcctcaacagtatggtattcagtattcaaaaagccagagtcagcagactggactccaaacaacctcagcagttccaaggatatggccagcaaccaactacccaggcaccagctcctgcctttttggtcagcctcaacaactgcctgctcagctgccacacagtaccaggcaagcaattatcctgcacaaatttatactacccaaacttttcagcctactaattatactgtggcccctgcctctcaacctagaatggctccaagccaacctggggcctatagaccaagatcaagttttacttcacttcctgtaagtagcatgacccctcctccaactgggcctaatccttatatgtcctccctttggtcagggctataccaaacctggacctggttatcgataa

SEQ ID NO: 870 - DNA, 384 bp, Artificial
  cDNA Sequence
gcgaggacggcggccacggaagcggccaagggggcggtggcgcagagaggggtgcggagcgggcggaagaggcgtctgtgtcgcagcttggtctcagaggagcatcgctgggaacaacgactatcgtctattccacaagatgagtaacagccaccctcttcgcccctttactgcagtgggggaaattgatcatgtgcacattttgtctgaacatattggtgccttgttgattggggaagaatatggcgacgtcacattcgtggtggaaaagaaacgttttcctgcccacagggtaattttagcagccaggtgccaatattttcgagcattattatatggtggaatgcgagagtctcagcctgaagcagaaattcctctccaaga

SEQ ID NO: 871 - DNA, 5607 bp, Artificial
  cDNA Sequence
aggagcatcgctgggctcgtctcaatttggccctgctgtatttcaagtgctcggtagccacatgtggcaagtggccatcactgtggccattgcagctccaaagggacaggagagttgatggaaattagacactgcattctacagcctcatgagcccaagagagcaaaccttggtttgctgaaaatcagcagataaggcaattgaaagggaagaagaacaacgactatcgtctattccacaagatgagtaacagccaccctcttcgcccctttactgcagtgggggaaattgatcatgtgcacattttgtctgaacatattggtgccttgttgattggggaagaatatggcgacgtcacattcgtggtggaaaagaaacgttttcctgcccacagggtaattttagcagccaggtgccaatattttcgagcattattatatggtggaatgcgagagtctcagcctgaagcagaaattcctctccaagacaccactgcagaagcattcacaatgctactcaaatatatctacactgggcgggcaacgctgacagatgagaaggaggaggtgctgctggactttttgagcctggctcataaatatggatttccagagctagaggattctacctctgagtatctctgcaccatacttaacattcagaatgtctgcatgacttttgatgttgccagtctctactcacttcccaagttaacttgtatgtgctgcatgtttatggataggaatgctcaggaagtcctctcaagtgaaggtttcctctccctttctaagacagcacttttaaacatcgtgttaagagactcatttgcagctcccgaaaaagatattttcctagccttattaaactggtgtaagcacaattcaaaggagaatcatgctgaaatcatgcaggctgtgcgtttacctctcatgagcctcacagagcttctgaatgttgtgaggccttcaggactgctgtctcctgatgccatcctggatgccattaaagtgcgatctgagagccgggatatggacctcaattatagaggcatgctcataccagaagaaaacattgcaactatgaagtatggagcccaagttgtaaagggggagctgaaatcagccttattagatggtgatactcaaaattatgatttggatcatggattttcaaggcacccaattgatgatgactgccgttccggcatcgagattaagctaggtcagccatccattatcaatcacatacggatactcttgtgggaccgagatagccggtcttactcatacttcattgaagtgtcaatggatgaacttgattgggtcagagtgatagatcattcacaatatctgtgtcgttcttggcagaaattatattttccagcccgtgtctgcaggtatattcgaattgttgggactcacaacacagtgaacaagatttttcacattgtggcttttgaatgtatgtttacaaacaaaaccttcactcttgagaaggggctgatagttcccatggagaatgttgcaacaattgctgattgtgccagtgtgattgaaggagtcagtcggagccgaaatgccttgctgaatggggacactaagaattatgactgggattctggctacacatgtcaccagctaggaagtggtgcgattgtggttcagttggcacaaccgtacatgattgggtcaatacggttactactttgggattgtgatgatcgaagctatagctactacgttgaggtttctaccaaccagcaacagtggaccatggttgctgacagaactaaagtctcctgcaagtcctggcagtcagtaacttttgaaaggcagcctgcctccttcatccgtatcgttgggacacacaacacagcaaatgaggtgttccactgtgtccactttgagtgtccagagcagcagagcagccagaaggaggaaaatagtgaggaatcggggacaggggacaccagcctggccggtcagcagctcgactcccatgcgctgcgggcgcctagtggcagctcactaccctccagcccaggctccaactcacgctcccccaaccggcagcaccaataaaggaggcagcgggcctggtgtgacttggtgggctcgggcaacggcaggaaacggtctcctccctgagcaggggtctctgttgactgcccccacctctgcccctttccagggaggagccgacctagctgcaaaagcagacaccgaacaggttttctcccaaggacagaaaggggctgctttgttcttctcaatttatccaaatcaggcaggtctcaagggggagaaaatgggtcttcaatcttcatcaagtccaccattaacaccctacctctctaatctagcccaggcgcagggaacaggaggaagtcatagacaggcctgtgttggaatacaaaaatggcacgcaaacactcaggcggaggagaaagccattgggcctttgctacctggaggcaccctttaggaatgggcctccatagagtgttcattctgctggaatacattgccctggcaactaaatgattttttatttgttttagttattctccactcagtgaatcataggtgttccggatctatttgaaatgctcaaacagcaaatcactagttttaatcccttttgatgctataattttccttccttggttttgaacggttcagcttgcggggacagagacccatcgtgcatgtctcctaaatgagacacggatgcagctcatcctggcacttgggccacagaggaagtgccacaaatgcacacaagcaaatcaacctgtggacactggagttaatagtcactcgtgtggctgagttactcacctgtcattcctgacatggatccagcctttaagcttgggaggctgacaaggaaatagttactatgcccgctgctaattcactgttccgaagtccatgtagataaacatataccgagttctggcgtggccaaacctgccggggactgccgtggcttagctgcccctccagttgtgtttatcgaagcattggagaggcagccacctgcccatcagcgtcaggaacgcagaactgggactccgtgcttcccccacaccacagtactcaactggggactgaaaaatagcagttccaagaagcttttctcctaatcctcatcaaaaggacctcatttgacgatggtggcttgatgtggctccgtctcctacttagtgatttccattccagtgctgcctgccctgggtaactgcgcacaacattgcctgcccctccgctgtccccagagctccggcctctgtcgccatcagcatcagcctgggagtctccccaggacggcatggcacgtgagcagcactgcagtccttgggtcttcggcgccaacctgcaaccctgatcaaaggagggtgagggcgtgggagtttcctttcaggtgtgtcaaagacatatcagctgcgctctagaaagagccaacgggtcagccgcttcctcctagtttaacttgattttgagtgatttgtccatatggaaatagtaggctccagctgcagggctgagctgcttcctatcccctcagctctgatctctgccacttccctgttgtgtgggagagtggaacactcctgggatgccaggcatttcataatgggaggaggctcctgtaaggaacggtgggcgcccgctcacagtggggggccctccagcatggttgctgactctgtcagcccccagccccgggttgccaattagccagagagctcctgcacacacagcacttccttccccagtgtgttttctacccagatggggacaaaggagccagacagtcatatcaagggcagagttcaaacattttgaaatgagccattcacatgcttctttttaaacatgggcatcacctgcccagaggcccttggcctgaagcagcatgctgctgaccttgggaagagagggtgggctggtgggggtgctggaggagctgcccggccctgcatctgcaaccctccagtcccctgcccacagagcacgcagagccctcctgtgctccgggaacgagatagcagcttggcagctcggcctcgcatctgaaaaggaatacgctgcaaagcctcggccctagacccacatctgcagctccctggcctgtggcggttctttccttcggggcatgcccttccagatctctgtccctcctgtcttctagcactttaaagatgccccttatcatcagataaagagaagtatggggacgatggggtggcactaacagtagatgtcattggtgaggactgatggcaaagtctcattccctcacagccgcgctgccagctcgcctccccctcgctttgctgggagcctgccctggactccaaaaggacacgggttcacctcctttcccaggctggaggggtactgcccttccctgaggggccttctgactggggcaggaactcttttcgtgtgtccagctgggcctggaggccaagtcaaggtgtgtcacaccacacaccagggcaaggacctcatctccagggaacagggacaagtgagtggctaccagaaagtccccgggcagcctggagttccccagagcctggctggtcctacagagcacttctcccctgggccaccaggaccaaagcgacctaaacacttgaagctaaaagcaagtgctgatgatgggatgggctggcacgtggctgggagggctcctgggcaccacagagccctcagcccagcagagagtggaggctcagtccgtggggagcgggggttgtgaaggagacatggccaagcccctggtcggggagataagctcccccatgcccaggccagccccaggggcaacaagccaacatggagagaggtggcaggtgaggctgacaggtgggtgcctgtggcctgggcccatgagggcaatggtcctcagtaaccaatggaaaggacacaagggcgccatggtcaccaccacccaggcaaagaaatgggaggtggccagcacccccacccttcacttttcattattattattattattattattattattttttttttttttttttttttttttttttttttttgagagtagaaaggcaacttcattggagcttttggggaaaaaagccttcaaagtcaccttctggcagctctggggagggtcatttggggtggactgagagtgtagggcaggtagggtgtgtgctgggcagcagctgtgtccatgcagccagcacccagcagggcagtctcacaggagccgttgtgagcactttggacttgaagcagctatgaaccaccccccgcccccaccgtctctccctctcacacacacacacacacacacacacacacacacacacacacacacacacccgttttaccattttctcagtgctttttctgctttcattcctttgattttagttagaagcacaagccatgatggatgtgggactcttctcaattgctctttaaattgtcactttttaaatcctattaaatgaagtgtcgattcctgacaaatacattaaaagtgttttattcctagaagagttgggaaaagaaattattttcagcaagagtaggatgtttgttaaactgattccttggc

SEQ ID NO: 872 - DNA, 713 bp, Artificial
  cDNA Sequence
gtatattcgaattgttgggactcacaacacagtgaacaagatttttcacattgtggcttttgaatgtatgtttacaaacaaaaccttcactcttgagaaggggctgatagttcccatggagaatgttgcaacaattgctgattgtgccagtgtgattgaaggagtcagtcggagccgaaatgccttgctgaatggggacactaagaattatgactgggattctggctacacatgtcaccagctaggaagtggtgcgattgtggttcagttggcacaaccgtacatgattgggtcaatacggttactactttgggattgtgatgatcgaagctatagctactacgttgaggtttctaccaaccagcaacagtggaccatggttgctgacagaactaaagtctcctgcaagtcctggcagtcagtaacttttgaaaggcagcctgcctccttcatccgtatcgttgggacacacaacacagcaaatgaggtgttccactgtgtccactttgagtgtccagagcagcagagcagccagaaggaggaaaatagtgaggaatcggggacaggggacaccagcctggccggtcagcagctcgactcccatgcgctgcgggcgcctagtggcagctcactaccctccagcccaggctccaactcacgctcccccaaccggcagcaccaataaaggaggcagcgggcctggtgtgacttgg

SEQ ID NO: 873 - DNA, 1267 bp, Artificial
  cDNA Sequence
agataaggaattgtataggaggaaacttcatagtaaacattgaacctctgtgcttgtctccttgttgaagttgggggttcatgtttattgttccaagggagcctcatcaaaaccacttttaaagcattgagaatccaaataaataccatggatcatacaggattggggataagtcttgaggtctccccgagaaggagaagttctttaatttggtaattttagggtaatggttggatgctctctggattaatggaaaccttcaggggtacttttaggcagagtataacccagtgaagagagcattattatatggtggaatgcgagagtctcagcctgaagcagaaattcctctccaagacaccactgcagaagcattcacaatgctactcaaatatatctacactgggcgggcaacgctgacagatgagaaggaggaggtgctgctggactttttgagcctggctcataaatatggatttccagagctagaggattctacctctgagtatctctgcaccatacttaacattcagaatgtctgcatgacttttgatgttgccagtctctactcacttcccaagttaacttgtatgtgctgcatgtttatggataggaatgctcaggaagtcctctcaagtgaaggtttcctctccctttctaagacagcacttttaaacatcgtgttaagagactcatttgcagctcccgaaaaagatattttcctagccttattaaactggtgtaagcacaattcaaaggagaatcatgctgaaatcatgcaggctgtgcgtttacctctcatgagcctcacagagcttctgaatgttgtgaggccttcaggactgctgtctcctgatgccatcctggatgccattaaagtgcgatctgagagccgggatatggacctcaattatagaggcatgctcataccagaagaaaacattgcaactatgaagtatggagcccaagttgtaaagggggagctgaaatcagccttattagatggtgatactcaaaattatgatttggatcatggattttcaaggcacccaattgatgatgactgccgttccggcatcgagattaagctaggtcagccatccattatcaatcacatacggatactcttgtgggaccgagatagccggtcttactcatacttcattgaagtgtcaatggatgaacttgattgggtcagagtgatagatcattcacaatatctgtgtcgttcttggcagaaattatattttccagcccgtgtctgcag

SEQ ID NO: 874 - DNA, 464 bp, Artificial
  cDNA Sequence
cagccatccattatcaatcacatacggatactcttgtgggaccgagatagccggtcttactcatacttcattgaagtgtcaatggatgaacttgattgggtcagagtgatagatcattcacaatatctgtgtcgttcttggcagaaattatattttccagcccgtgtctgcaggtatattcgaattgttgggactcacaacacagtgaacaagatttttcacattgtggcttttgaatgtatgtttacaaacaaaaccttcactcttgagaaggggctgatagttcccatggagaatgttgcaacaattgctgattgtgccagtgtgattgaaggagtcagtcggagccgaaatgccttgctgaatggggacactaagaattatgactgggattctggctacacatgtcaccagctaggaagtggtgcgattgtggttcagttggcacaaccgtacatgattgg

SEQ ID NO: 875 - DNA, 400 bp, Artificial
  cDNA Sequence
agtggctcagagttagagggtaggtaggtcttgcatttcggcacagtcagcaaggatattcaggaactcccttgctcccataagcttatattgtataatcactgagtaatgtctattaatatggatggaccatggtttatttaatttgtgattttttatattcattcttgttttttttttcagttgacagacctttcagtcctcattccacattgatctgctctacattcaaagactgactttcacaccacgtatacgcgggaatcctcccaagcccctggcaccgcactccaaatgtccatctccaggaacccgcccttcagtgcctggggtcccctaaacaatgtttcagtcctcgggctcggtgggtgcatcctttattggggagcgcgggggctgc

SEQ ID NO: 876 - DNA, 1994 bp, Artificial
  cDNA Sequence
ctagttaaggcggcacagggccgaggcgtagtgtgggtgactcctccgttccttgggtcccgtcgtctgtgatactgcagcgcagccatggcagaaccgcagcccccgtccggcggcctcacggacgaggccgccctcagttgctgctccgacgcggaccccagtaccaaggattttctattgcagcagaccatgctacgagtgaaggatcctaagaagtcactggatttttatactagagttcttggaatgacgctaatccaaaaatgtgattttcccattatgaagttttcactctacttcttggcttatgaggataaaaatgacatccctaaagaaaaagatgaaaaaatagcctgggcgctctccagaaaagctacacttgagctgacacacaattggggcactgaagatgatgagacccagagttaccacaatggcaattcagaccctcgaggattcggtcatattggaattgctgttcctgatgtatacagtgcttgtaaaaggtttgaagaactgggagtcaaatttgtgaagaaacctgatgatggtaaaatgaaaggcctggcatttattcaagatcctgatggctactggattgaaattttgaatcctaacaaaatggcaaccttaatgtagtgctgtgagaattctcctttgagatttcagaagaaaggaaacaatgtgattcaagatatttacataccagaagcatctaggactgatggatcactgtcccgattcaaattattcttcagtccatttccccttcctatttcagctgttccttttcacctaactgttcagtcattctggttttcaagcagtgctttatctcatgtccttgaatatagttgtgtaactttattttttaggtaataattagaacagttcccttcagaggctgcatttgccttcttctgccacctaaatattacttcccttcaaatctgcctttgaatcatcatttttaaaaaaaaattaacatgtttttgttgtagttatcttctggggtttcaattcctcagaaacaacttttttcacaacggaaaggaaagaacactagtgttctttcagtaaagtacaaagtgtttattttacaaaagagtaggtactcttgagagcaattcaaatcatgctgacaaggatactgatagaaaaagtgatttcttcttattataaagtacatttaaagttcaaggactaaccttatttatttgggaaaggggaggaggaaggaaatgatatggtacccagacactgggctaggctgcaactttatctcatttaatactcccagctgtcatgtgagaaagaaagcaggctaggcatgtgaaatcactttcatggattattaatggatttaagagggcatcaatcagctcaactcaagatttcataatcatttttagtatttagattgtgcctcaaagttgtagtacctcacaatacctccactggtttcctgttgtaaaaaccttcagtgagtttgaccattgtgctcttggctcttgggctggagtaccgtggtgagggagtaaacactagaagtctttagtacaaaactgctctagggacacctggtgattcctacacaagtgatgtttatatttctcataaagagtcttccctatcccaaggtcttcatgatgccagtagccatatatgataaattatgttcagtgataacttagttatcagaaatcagctcagtggtcttccccgccatgattcacatttgatgagtttttaaaaatcaaagtgattttgaaaatctctaatggctcagaaaataaaaacatccagtttgtggatgactatatttagatttctctagactctagtggaagacctttggaaaggccatgccaaccgtgcttgtactgctagaagcactttatgtttcctttttgggtgaaatggatttatgtgagtgctttaaacaaatagcaatacttatagactgaaataaaatgaaacttcaaataaga

SEQ ID NO: 877 - DNA, 1939 bp, Artificial
  cDNA Sequence
ggcagtttcatcaatagaatggagatgttcacacctagcccatggagctgttttaagggtttaaatgaaatataaagtacttagcacaataaatgagcattattattattcttattattgttcttgtccagtacctgtatttactgtctctttagtctcgttaaaatcatactttggccatttgtcctttctatagttgaaaacttaatatttttgtagcaggggttaggccaattatgtaaagtagcatataaacgtggtaagatttcaaagatgttacttgcttttcagaatatctattccctaggacattgtagctatgttttccttccttttgtagcaattggggcactgaagatgatgagacccagagttaccacaatggcaattcagaccctcgaggattcggtcatattggaattgctgttcctgatgtatacagtgcttgtaaaaggtttgaagaactgggagtcaaatttgtgaagaaacctgatgatggtaaaatgaaaggcctggcatttattcaagatcctgatggctactggattgaaattttgaatcctaacaaaatggcaaccttaatgtagtgctgtgagaattctcctttgagatttcagaagaaaggaaacaatgtgattcaagatatttacataccagaagcatctaggactgatggatcactgtcccgattcaaattattcttcagtccatttccccttcctatttcagctgttccttttcacctaactgttcagtcattctggttttcaagcagtgctttatctcatgtccttgaatatagttgtgtaactttattttttaggtaataattagaacagttcccttcagaggctgcatttgccttcttctgccacctaaatattacttcccttcaaatctgcctttgaatcatcatttttaaaaaaaaattaacatgtttttgttgtagttatcttctggggtttcaattcctcagaaacaacttttttcacaacggaaaggaaagaacactagtgttctttcagtaaagtacaaagtgtttattttacaaaagagtaggtactcttgagagcaattcaaatcatgctgacaaggatactgatagaaaaagtgatttcttcttattataaagtacatttaaagttcaaggactaaccttatttatttgggaaaggggaggaggaaggaaatgatatggtacccagacactgggctaggctgcaactttatctcatttaatactcccagctgtcatgtgagaaagaaagcaggctaggcatgtgaaatcactttcatggattattaatggatttaagagggcatcaatcagctcaactcaagatttcataatcatttttagtatttagattgtgcctcaaagttgtagtacctcacaatacctccactggtttcctgttgtaaaaaccttcagtgagtttgaccattgtgctcttggctcttgggctggagtaccgtggtgagggagtaaacactagaagtctttagtacaaaactgctctagggacacctggtgattcctacacaagtgatgtttatatttctcataaagagtcttccctatcccaaggtcttcatgatgccagtagccatatatgataaattatgttcagtgataacttagttatcagaaatcagctcagtggtcttccccgccatgattcacatttgatgagtttttaaaaatcaaagtgattttgaaaatctctaatggctcagaaaataaaaacatccagtttgtggatgactatatttagatttctctagactctagtggaagacctttggaaaggccatgccaaccgtgcttgtactgctagaagcactttatgtttcctttttgggtgaaatggatttatgtgagtgctttaaacaaatagcaatacttatagactgaaataaaatgaaacttcaaataaga

SEQ ID NO: 878 - DNA, 753 bp, Artificial
  cDNA Sequence
atatctgaagcatatttgacaacagaaaaagttaatgtaattttcaaaggaaaaacgccaacttttttcaaaaaggaaacagcaactggagagcagatttgcaaaccagaaaagcaactcatgaatacaaattgcctggaaagcatttattacaacagaagctctgcaagatataccggaaattgacagtggcatcgaattcccagcaaggaagttttctaaggacaccaacagacaccagcagaagacagccttgcatttacaacaaaccattgatccacaacaaaccattgatccacactttcaaaatcattgaggtgaagcatagagaactggagtggagacggctctggcaaatccaaacaatatcaaaagcactctcatactgaaaacccacagtgctgaaccacagctgagatgtaaaatatttcacaaaatcttcttcaccctctatagtatttcacctgagagtgcatgatttaagttgcaagcactgtcatagatgatgggattcagagatgaacacatggaaatggactttatgttctctaatgtcacaaagaaagagtgattatgaagaagacccagattcccacctattaatctgagctttgaattctttactttgctgggtccaccggattttttctccactcagcccatcgatgagagtggaggcggcctgcatctttttccggcacgtatcagcgtcattaagcaaatcctgcagccataatgggagaatgtctcaaa

SEQ ID NO: 879 - DNA, 830 bp, Artificial
  cDNA Sequence
tgaagcccatgagccactagaagccacatgttctgccatgtggagaagaatgagagagtacatcctcaaattgaggtgtggcatgatgatttggctgcccagaggagaacctgtctttcccatctaaagtgggaggtcaagccaagtagagggaaacagcaactggagagcagatttgcaaaccagaaaagcaactcatgaatacaaattgcctggaaagcatttattacaacagaagctctgcaagatataccggaaattgacagtggcatcgaattcccagcaaggaagttttctaaggacaccaacagacaccagcagaagacagccttgcatttacaacaaaccattgatccacaacaaaccattgatccacactttcaaaatcattgaggtgaagcatagagaactggagtggagacggctctggcaaatccaaacaatatcaaaagcactctcatactgaaaacccacagtgctgaaccacagctgagatgtaaaatatttcacaaaatcttcttcaccctctatagtatttcacctgagagtgcatgatttaagttgcaagcactgtcatagatgatgggattcagagatgaacacatggaaatggactttatgttctctaatgtcacaaagaaagagtgattatgaagaagacccagattcccacctattaatctgagctttgaattctttactttgctgggtccaccggattttttctccactcagcccatcgatgagagtggaggcggcctgcatctttttccggcacgtatcagcgtcattaagcaaatcctgcagccataatgggagaatgtctcaaa

SEQ ID NO: 880 - DNA, 383 bp, Artificial
  cDNA Sequence
ctttcaagggcctgtgcctgtggtaactgtctatgagccaggtatatctgaagcatatttgacaacagaaaaagttaatgtaattttcaaaggaaaaacgccaacttttttcaaaaaggctggatccagctcttcatgaatgtcctcaatgagaaggggtcggcccaaggaaaggctgtcctccaagtgtgtgcgaaaatatttatggttcagagatgtcacctaaacagaaagaactcattggtctatctgtgttacaaagaatgtgcccattgctaagggaaaccgagagatttgttggacaggtaatcaagaattttaagggcaatagaagaagacttacttaaaaaaattaaagtaacatacaaaaattaatttctaaa

SEQ ID NO: 881 - DNA, 3105 bp, Artificial
  cDNA Sequence
gttccgcaggtggcagcgatggcccagtcctgaactccccgccatggccggcgcccccggcccgctgcgccttgcgctgctgctgctcgggatggtgggcagggccggcccccgcccccagggtgccactgtgtccctctgggagacggtgcagaaatggcgagaataccgacgccagtgccagcgctccctgactgaggatccacctcctgccacagacttgttctgcaaccggaccttcgatgaatacgcctgctggccagatggggagccaggctcgttcgtgaatgtcagctgcccctggtacctgccctgggccagcagtgtgccgcagggccacgtgtaccggttctgcacagctgaaggcctctggctgcagaaggacaactccagcctgccctggagggacttgtcggagtgcgaggagtccaagcgaggggaaagaagctccccggaggagcagctcctgttcctctacatcatctacacggtgggctacgcactctccttctctgctctggttatcgcctctgcgatcctcctcggcttcagacacctgcactgcaccaggaactacatccacctgaacctgtttgcatccttcatcctgcgagcattgtccgtcttcatcaaggacgcagccctgaagtggatgtatagcacagccgcccagcagcaccagtgggatgggctcctctcctaccaggactctctgagctgccgcctggtgtttctgctcatgcagtactgtgtggcggccaattactactggctcttggtggagggcgtgtacctgtacacactgctggccttctcggtcttatctgagcaatggatcttcaggctctacgtgagcataggctggggtgttcccctgctgtttgttgtcccctggggcattgtcaagtacctctatgaggacgagggctgctggaccaggaactccaacatgaactactggctcattatccggctgcccattctctttgccattggggtgaacttcctcatctttgttcgggtcatctgcatcgtggtatccaaactgaaggccaatctcatgtgcaagacagacatcaaatgcagacttgccaagtccacgctgacactcatccccctgctggggactcatgaggtcatctttgcctttgtgatggacgagcacgcccgggggaccctgcgcttcatcaagctgtttacagagctctccttcacctccttccaggggctgatggtggccatattatactgctttgtcaacaatgaggtccagctggaatttcggaagagctgggagcgctggcggcttgagcacttgcacatccagagggacagcagcatgaagcccctcaagtgtcccaccagcagcctgagcagtggagccacggcgggcagcagcatgtacacagccacttgccaggcctcctgcagctgagactccagcgcctgccctccctggggtccttgctgcaggccgggtggccaatccaggtgggagagacactcccagggacaagggaaggaagggacacacacacacacacacacacacacacacacacacacatacatcctgctttccctccccaaacccatcagacaggtaaatgggcagtgcctcctgggaccatggacacattttctcctaggagaagcagcctcctaatttgatcacagtggcgagaggagaggaaaaacgatcgctgtgaaaatgaggaggattgcttcttgtgaaaccacaggcccttggggttcccccagacagagccgcaaatcaaccccagactcaaactcaaggtcaacggcttattagtgaaactggggcttgcaagaggaggtggttctgaaagtggctcttctaacctcagccaaacacagagcgggagtgacgggagcctcctctgcttgcatcacttggggtcaccaccctcccctgtcttctctcaaagggaagctgtttgtgtgtctgggttgcttatttccctcatcttgccccctcatctcactgcccagtttctttttgaggggctttgtttgggccactgccagcagctgtttctggaaatggctgtaggtggtgttgagaaagaatgagcattgagacggtgctcgcttctcctccaggtatttgagttgttttggtgcctgcctctgccatgcccagagaatcagggcaggcttgccaccggggaacccagccctggggtatgagctgccaagtctattttaaagacgctcaagaatcctctggggttcatctagggacacgttaggaatgtccagactgtgggtgtagattacctgccacttccaggagcccagagggccaagagagacattgcctccacctctccttggaaatactttatctgtgaccacacgctgtctcttgagaatttggatacactctctagctttaggggaccatgaagagactctcttagggaaaccaatagtccccatcagcaccatggaggcaggctccccctgcctttgaaattcccccacttgggagcttgtatatacttcactcacttttctttattgctgtgaatagtctgtgtgcacaatgggcaattctgacttctcccatctagtggaaatgagcgaaatcatggttgtagtgatgttgtttgggagagtgcagtagtaattgatttgacccactcacacttggagctaattaaggtttgccctgcctgcagcctcccccacaaataatgaacagcagaaagactggacggggaaacctatcaatcctgcccccagccatggtgaggaagccccaagccatggtgacacacagcagcactgcagatagccagacacatggctatcctagagaggctggcaaggagttcgtggctgcaaaagaagtttctggagcaagagagagctcgctcttgggagtcaggacctccggggagagcagagggttccgacggattcctttatgagtcagtctctctctcccttttaaatggtgggaaccctccccaaaacctttccccagacacattctcctgtgcccctcagagaggcatgtgatgtgcaaggaaaataataggatataaaacacatcaagtagaaaatttcttatacttc

SEQ ID NO: 882 - DNA, 1972 bp, Artificial
  cDNA Sequence
ggccatcaaaataactaaaccatgtcatttggagcaacaaagccactgcggcctccatttgggccaagctctgactgcaatgatgcctctgccccgacccgggcctcgctgtgactgacaatgccgctgcatcttttcagcagtcattgatgaggaagtatctacatcctccttcccactaccagattttgcttggagaaaagcagtttcctgaaataattctgtgacgagcttcttccacattaggacaaaaatgctggaagcggctcagccccagggcagcacatcagagacaccatggaacacagccattcctctgccgtcgtgctgggaccagtctttcctgaccaatatcaccttcttgaaggttcttctctggttggtcctgctgggactgtttgtggaactggaatttggcctggcatattttgtcctgtccttgttctattggatgtacgtcgggacacgaggccctgaagagaagaaagagggagagaagagcgcctactctgtgttcaatccaggctgtgaagccatccagggcaccctgactgcagagcagttggagcgcgagttacagttgagacccctggcagggagataggacccagctgtgctgtcatgcagctaacctctgatgtggtcttcctcaccattggctatggatttgatttcaggtgtataggactaagggcagcttgcgggttagctctgtgactgcatagtttttctaccttctttccctgatcttttgctgccatttgatctttgatagttttggtgaaactctctaaaatacattcactgtgggtccgacgcaatttataaaaattatgtactcaagaagggagacctgtttgtttcatttctcatctgtttgggagatgattttagagcactagaaaggcactggggagattctcagcttaaaacatccagcagtttgaagtatgattaggtacatcagggctgcattgtcaatgttctctttaagtcttttaacatttatagcaattttttttttcccggagagtttaggttgcaagttttgggtttcttgtttgtttttgttttgcttcctgctttaattctttaattttcagtcattactggtattgaaaaataaaatatctttaaaacatctcctcttcagaaataggtccctcttcattgcccatcaccatcttccactctcctattattttgccactactcagtaaaggaaggtaggaagagacaaacgcctaagtgcaggtgtggggagggatttcacaagtggttattaacggccagttcagcaagaagtgttgagtgtgtacaaaggggagggctggaagtgttaactccagacccgttggctgcttgagttgtttcttatattctaaagcagcagtccctaacctttttggcaccagggaccagttttgtggaacacagtttttccatggacggggtggtggtggaggatgaaacttccacctcagatcatcaggcattagagtctcataaggagcacgcaacctagatccctcgcatgcgcagttcacaatacggttctaagggctttagagtaagcagctttttcacctgtgggcctctggtgagaaattctgtaaattgtgataatcaggctggattttaatgctgcttttccagtacaatgttagagtttgggttcattaaaattaggcaaactcccattgggttagggcttctctcattccattttgtggctaaccttactgtgtttcagcccttgctgaaaattcttctgatatgtgttgcccttcctcacagccctttggccattgggagtttggctgtccctcagagccatccggtcaagcagatggtctgttctatctcacagaaaagtcttttcttccatgagttctgtctgaactgaacatgtaaaaagtatgggaaacagatgaatccctattaaacatgaagttttgattgtatttaagat

SEQ ID NO: 883 - DNA, 835 bp, Artificial
  cDNA Sequence
gagtttcgggcggcgcggaaacgggcgggtctggcggcccaaccccctgctgccagtcagggcgcacaaaccccaggagagaaggcggaagcagcagcgactctaaaggcagccccaggctggctaaagcggttcctggtatggaaacctaggcccgcgagtgcccgggcccagcccggcctagttcagttaaaaaacaatgtctaacccatgcaatgaacttttgactgtatgtctcatttccaaaggaatgagatcattgaggtggacccagagaaactgaattcagagaaaaacttccattattgagaacccaaacgctgattgccagacaaaaggatgagaggaaatgctggacctccagtttcttgttaattgctctgtttttccataagggactctgccttaagctcattttcattgacttatcatttctgggtttgctctggtgtgaaaattctcatttaattttttttcttcagattctgcctctagtttagaaaagaaaaagtctaatttacaattcatgtcagacaattttgatggcacactgtggcctgtcagagatttctttagcattctatttttttaaattatttttaatttttgtttttttaattgaaacagctttattgaaataaggtttacatactacagaatttatctcttttaacatacagttcaaagatttttagtaaatttattgagtcatgcaaccatcactgcaactttagaacgtctctatcactccaagaagacccctcttgcacattagcagttactacccatttccaaccccagccccgcacaaatgtcagtctgctttctatctata

SEQ ID NO: 884 - DNA, 2020 bp, Artificial
  cDNA Sequence
cgcaggcgcacggcggccggcgcgggccgagcggaggcaactgctgtgcggcctgcgggcgcgcgctcccttatcggccaacggacgcgaggcgcgcgccatggaacagcggttagctgagtttcgggcggcgcggaaacgggcgggtctggcggcccaaccccctgctgccagtcagggcgcacaaaccccaggagagaaggcggaagcagcagcgactctaaaggcagccccaggctggctaaagcggttcctggtatggaaacctaggcccgcgagtgcccgggcccagcccggcctagttcaggaagcggctcagccccagggcagcacatcagagacaccatggaacacagccattcctctgccgtcgtgctgggaccagtctttcctgaccaatatcaccttcttgaaggttcttctctggttggtcctgctgggactgtttgtggaactggaatttggcctggcatattttgtcctgtccttgttctattggatgtacgtcgggacacgaggccctgaagagaagaaagagggagagaagagcgcctactctgtgttcaatccaggctgtgaagccatccagggcaccctgactgcagagcagttggagcgcgagttacagttgagacccctggcagggagataggacccagctgtgctgtcatgcagctaacctctgatgtggtcttcctcaccattggctatggatttgatttcaggtgtataggactaagggcagcttgcgggttagctctgtgactgcatagtttttctaccttctttccctgatcttttgctgccatttgatctttgatagttttggtgaaactctctaaaatacattcactgtgggtccgacgcaatttataaaaattatgtactcaagaagggagacctgtttgtttcatttctcatctgtttgggagatgattttagagcactagaaaggcactggggagattctcagcttaaaacatccagcagtttgaagtatgattaggtacatcagggctgcattgtcaatgttctctttaagtcttttaacatttatagcaattttttttttcccggagagtttaggttgcaagttttgggtttcttgtttgtttttgttttgcttcctgctttaattctttaattttcagtcattactggtattgaaaaataaaatatctttaaaacatctcctcttcagaaataggtccctcttcattgcccatcaccatcttccactctcctattattttgccactactcagtaaaggaaggtaggaagagacaaacgcctaagtgcaggtgtggggagggatttcacaagtggttattaacggccagttcagcaagaagtgttgagtgtgtacaaaggggagggctggaagtgttaactccagacccgttggctgcttgagttgtttcttatattctaaagcagcagtccctaacctttttggcaccagggaccagttttgtggaacacagtttttccatggacggggtggtggtggaggatgaaacttccacctcagatcatcaggcattagagtctcataaggagcacgcaacctagatccctcgcatgcgcagttcacaatacggttctaagggctttagagtaagcagctttttcacctgtgggcctctggtgagaaattctgtaaattgtgataatcaggctggattttaatgctgcttttccagtacaatgttagagtttgggttcattaaaattaggcaaactcccattgggttagggcttctctcattccattttgtggctaaccttactgtgtttcagcccttgctgaaaattcttctgatatgtgttgcccttcctcacagccctttggccattgggagtttggctgtccctcagagccatccggtcaagcagatggtctgttctatctcacagaaaagtcttttcttccatgagttctgtctgaactgaacatgtaaaaagtatgggaaacagatgaatccctattaaacatgaagttttgattgtatttaagat

SEQ ID NO: 885 - DNA, 383 bp, Artificial
  cDNA Sequence
gacaaggagtggtgctccatcaccaagtcaccttgccaggtcaaggacatgaagatcaaatccctgaaggtctatctcttctctctgtccatcaaggagtttgaggtcactgacttcctcctgggggtgcccctcaaggacaaggttctgaagctcatgtttgtgcaaaagcagcccaaggctggccggcggatcaggttcaaagtgattgtcaccataagggactgcaatgataacgtcagtctgggtgttgagtggcccaaggagttactcattgctgtctgcaggaccaacatcctctccatcatcctggtgtagggtgactaccaggggacaaggtcagcaaaccccacacagtgctctgcatggtgacacaatgctgc

SEQ ID NO: 886 - DNA, 2632 bp, Artificial
  cDNA Sequence
atgaacacgactgctttacatttggcctgtgccaatggccatgtggaagtggtcactctccaggtgaactgaaagtgccagactgacattggtgacaaatgaaacaggatgcctttgatgaaggctgtacattgccaagaagagatttgtgtcatcattctgctagaatgtggcaccaacccagatcttatggatgtctatagcaacaatgcactacactatgctgtgtataatgagaatacactactggcagaaaaactgccctcacaccatgtgaatactgaagtgctgaacaaggatactgaagtgctgaacaaggatgcaaacacaccacttttacttgctatagtttgcaaaacacagcaaaaggtggaattttagtgaagaaacaagcaaatgtacatgctgttgataggttgaaaagaacagctctcatgcctgttgtacattatggcttgtcaggtatagttagcattcttcttcaacaaaatattgtctttactcaagagtatgtatgaacagactgcagattatgctatttctggtggtctgacaagcactcacaacaaattttgcaacattaaaaaaaaaagatacttgaaaatggtcttcaaaatgacaacccagaagaagcatccaagaagaatgcaagtttgaaaacaggaggagcaagtgcaaaagattctgggagttctgaagcatctgcattcagtatttaaaaaaaaactgtgtgttgactcatggcctaaaccagatgatgaagacttgacttttactaccaagcagtgtatccctgagagtgtttcaaagtctttacttggaccttcatataaaaaaggaaaaaatatatagtaaatggaaagggagaagggcctcctgaaaaacatccttccctaaagcctaccatggaaatgaaagattctgttgtgaagaaagcaatagaaaggaagaacgaacaaacatccaaagcagaacaagaagtacaagtgacatcagaggaagaacaggaaaagcttgaaagtgaaaataaacagccacaggttgaagaagctagaaagaagcacgaaagttaaaaaaaaaaagtatcaaaaaaacgtatatgatagtacatctgctgacgatgatgataaattaattcaacaaagaaagagtggaaaaacttaccatcagcgatttcctaggaaggagaacaaagagtatgctaggcctgcaaagaaaatgtcaaatgaaaagaaaaaggtcaaaaagcaaactcatttagagatgaacctgatgacttaactcggccctctgaaacagcttcagaggatcatgagaaaccttaccctcattgtaagaagtttatgatgctcattaagcaatatggaatggattgtaatgattctcgtatcctaatggaagtccagaatgcatttctttcatgtgaaaagtcactggaccttaaaaaaaattatctgtgaacaacttacactagacaataagaaatatgaaaactgagtttagtgtactgaaggagctatccaaaacacaagaaacgaagtcacagttcaatatcaaaaagtagaatggaaacaggaactctacagtttgcagcttagaagaagatgagaagaaatgctaatatgttatatgaaaaaattagggaagagttagaaaggaaagtggagcaacataggaaagaagttgaagtaaaagaacagcttaaactgactatcggatcactagaaatagaattgaaggcttgaagaaatactttaagaaaaaaaaagatctgatgcatgaaaattgcttgttgaagagagatattgcctttattgtgtatgtaagtatacacaataaaaaataggaacctcgaaagggaaaaaggacattgaaattgttaaagaaatgaatgatgaccttcaagagactataaaactgaatggaaaaacattaacaaaaacagtatcccagtatggtcaacagcttaacgacctcaaaactgagaatacaatgctcaagtctaaactggagaaggaaaatcaaaacaaggaaagactggaagctgaagttgagtcattccatgctagactggctgctgctataagtgagtgtgatcaaagtgtgaaaacaaaaagagacctagaacttgctttacagagagcacaagacgtttctttacaagaaagaaaatgagttctgatatttctgaactaaaagataataatgagtttttaactgagcaactttccgaagctcgaattcaataccctaaaaagtaaactccatgacacaagaaattctctcagagaaaaggttttggttttataaagtgtacaaaaggacctaagccaagtaaatcctttggaaagtgggactacgtagaggagagaatatctcaactacaacatgaaaatctgttgcttcaacaactagatggtgctcataagaaaggggataatgaacaaaaggtaattaatatccaaggatgctgtcttgagagtgaaaaggaaggtcttctgctagaagggaaaaataaggaattaatcaatgaatgcaatcatttaaaagactgtttcagtatgaaaaagagaaagcagaaggagaagtaagtatcaaaaaagataaatattttcaaacttccagaaggaaa

SEQ ID NO: 887 - DNA, 3756 bp, Artificial
  cDNA Sequence
agcgacgcgtggagaagcggcccacgtgtctgcccagagtcaagtcctgtgttcttcccgctccttacgcatccgcggtccagggcgccctttcagccccgctggtgttcgcccaccccgggccgcgtgagtggggccccacgcagctccccgcactccgtgggccaacttggccaagcaactctgtccggggagcggtgcttgcggggggtgagtaccgggcactgcgcatgcggagctccaaattcaaacagctgttttcagaggctggagggcgggcggactggtagcagctggggctaggagaggctttctctaggaggcggccgctcgggagccatggtggaccggggccctctgctcacctcggccatcatcttctacctggccatcggggcggcgatcttcgaagtgctggaggagccacactggaaggaggccaagaaaaactactacacacagaagctgcatctgctcaaggagttcccgtgcctgggtcaggagggcctggacaagatcctagaggtggtatctgatgctgcaggacagggtgtggccatcacagggaaccagaccttcaacaactggaactggcccaatgcaatgatttttgcagcgaccgtcattaccaccattggatatggcaatgtggctcccaagacccccgccggtcgcctcttctgtgttttctatggtctcttcggggtgccgctctgcctgacgtggatcagtgccctgggcaagttcttcgggggacgtgccaagagactagggcagttccttaccaagagaggtgtgagtctgcggaaggcgcagatcacgtgcacagtcatcttcatcgtgtggggcgtcctagtccacctggtgatcccacccttcgtattcatggtgactgaggggtggaactacatcgagggcctctactactccttcatcaccatctccaccatcggcttcggtgactttgtggccggtgtgaaccccagcgccaactaccacgccctgtaccgctacttcgtggagctctggatctacttggggctggcctggctgtccctttttgtcaactggaaggtgagcatgtttgtggaagtccacaaagccattaagaagcggcggcggcgacggaaggagtcctttgagagctccccacactcccggaaggccctgcaggtgaaggggagcacagcctccaaggacgtcaacatcttcagctttctttccaagaaggaagagacctacaacgacctcatcaagcagatcgggaagaaggccatgaagacaagcgggggtggggagacgggcccgggcccagggctggggcctcaaggcggtgggctcccagcactgcccccttccctggtgcccctggtagtctactccaagaaccgggtgcccaccttggaagaggtgtcacagacactgaggagcaaaggccacgtatcaaggtccccagatgaggaggctgtggcacgggcccctgaagacagctcccctgcccccgaggtgttcatgaaccagctggaccgcatcagcgaggaatgcgagccatgggacgcccaggactaccacccactcatcttccaggacgccagcatcaccttcgtgaacacggaggctggcctctcagacgaggagacctccaagtcctcgctagaggacaacttggcaggggaggagagcccccagcagggggctgaagccaaggcgcccctgaacatgggcgagttcccctcctcctccgagtccaccttcaccagcactgagtctgagctctctgtgccttacgaacagctgatgaatgagtacaacaaggctaacagccccaagggcacatgaggcagggccggctccccaccccacctttgatggcctcttcccccctcaccctagggtgtcccgagatgaccgggacgcctggcccctggtgggggggcagcctcggaactgggagtggggggccaggggccttcctaaccttccatcatcctcagctagatgtatgcccgggacagggcctctgttctccagctgaaccataccctggctgtgggggcatctgtcctgagcttggctggtgtatctcacaatgcaaagacatgctggctggcgggacaggtgggcaggactgaccctgaggaggccttgcctgcagggtctttgtctcaccatttggtggagtatcacacggttctctgaggtctggggcctcagctgtttaagtttaccggtattactgagctcggcatttggagagggagctctgaagtgtctggggaggtaccgctgtgcgtggggtcaggtgtttccgtaccacagcaggagcagggcccgcccgcatcccagctgtgggcctgccggtcaggtcgggcacctactacaaaccgtagtggggtggaggctgctggaggtgggagtgaggagatgagggcagggtctcaaacagtcctgactcacagggcctggaaacaagtcctatgtgggcctggggcctggggtcctcatcctccttgttggtctactcaggcccagcccagagctgtgttccctgtctcaggtcaagcagtggcagacgcaaggctttctgtgggcccccaagtggtaggagggagagtagcagagcatgggttactggaagccgggactgctagggctggtggccagggagctgcaagagtgaggctcagctctggctggttctgcccttacccctcctgcccgcctgagaactgcacaccctgcccgctggccccaggacctgcactcccaatcctgctgtcttctccttccctgtgccctgaacaaggacctcactgcccgccttcccctcccaccagcccccttgggccaggcagggtgaggccaaattgctcttggcccacaaatgggtgatggtcagatatgtgaatcaagctcctttctctagctagtgtttgatgtgcacgtgtgtgtgcacagtgcgtgtgtgcacacgcacacctgtgcactcgtgtgtgtttaagaaaggaaaggatttgggctggggagcaaaagataatgtgaaactgttggtggactctctggtgaggggtgggcagaacttgctgctactagagttcttgggttctccatgatgttcaccctggggctggcccactgtgtcctgaatgtttttgttattttttgttttattttttaaacaaactgctgtttttatatacctggaatctgttgttggcttcagagccagtggttaaagagcagggtcccaaggattgggagatctagtgtctgccctcctgccctgcaactcaattgggcctttttcggtgacctcatccaaggccatgatgtcaagggccatgtccccaagcagaggtggagaaggggacactgaggtgagcaaaagcaggaaggggcatccactgcgggtgactggaggccgggcaggaagcaagtcatcagagccgctcagctccgttcactctctgccttctgccccactactgtggggcagtggggccagagcccacctccccaacatgtgaagacagtgatgggcacgtgcccacacccccacttctctagccgtttgcagaggccgccacccagcaggggcctgaaaaggagcagcctcgtatttttctgtgaaatgttttaatgaaccatgttgttgctggttgtcctggcatcgcgcacactgtatgtacatactggcaacgatgtcaaatgtaatttattttaacatttttacaataaaacatgaggtggacaggc

SEQ ID NO: 888 - DNA, 426 bp, Artificial
  cDNA Sequence
atggcggtgctgtagccctgggcagatggacccagtggctccttccctagtgcggtgtccggcatgcagcagatgctggagagatggacttcaggatggcactatgccagccacaatgggcactatgctgtgtgccagttcctactgctaagtggagctaagtgtgatgcccagacccatgggggtgccactgctctgcagcaggactgctactgagggcacactgacattgcatggcctctgttttcacatgggtccaagcccagattgatagatgacgatggcaatgaccagcctacataaggctcctgagaacggtcacgtggacatttgctccctcctgttgcaacatagcttagccctgaaggccatctgggatggaaggcatggctagcatgtgacctgctgccctgcaacggtgacctg

SEQ ID NO: 889 - DNA, 1014 bp, Artificial
  cDNA Sequence
ggtcacctgaaggaagaaatcacccagcggcatatacagcaagtagccctaggaatctcggaaaacatggccgtgcctctgatgccagaccagcaggaggagaagctgcgatcacaactggaggaagaaaagagaaggtataaaacaatgttcactcgcctgaaagccctgaaggtggagatcgagcacttgcagctgctcatggacaaagccaaggtgaagctacagaaagagtttgaagtctggtgggcagaggaggccaccaacctgcaggtaaattctccagcagtgaattcactcgatcacacgaagccatttctccagacatctgactcccagcatgaatggtcccaactcctctctaacaaaagttctggaggctgggaagtccaagatcaaggcactggcagattcgatgtctgtgatgtgaatgccaggaaaatcctgccctcgccttgccccagtccacacagccagaaacagagcagcaccagcaccccactggaagacagcatccccaagaggccagtgtcgtccatccctctcaccggagacagccagacggactcggacatcatcgccttcatcaaggccagacagagcattctgcagaagcaatgtttgggaagcaattgaatttccaggaaatatccatccatgaattatgccagcaagaatgaagcacagatgaaggcagcgcccctcacttgctctggcttcagaagtgaactatgggctgctgggagcaactagtgactttgattcccatggaggggactgtgtttctttaaggatgctgacctggaggccaccgagaggctggggctggggctgaccacaacatccttcctgtggttgctggagctgctggcagggccaggcaaggccagagtgctaggggcagggtgaaggcttcagctcactgttgtagtgacgttttgtgtagatctttataagcttttgagaatgtgaaatagcaccatcaaaatataatgtcagaggatgctcacacca

SEQ ID NO: 890 - DNA, 1227 bp, Artificial
  cDNA Sequence
atgcccagtgctgggctctgcagctgctggggtggccgggtgctgcccctgctgctggcctatgtctgctacctgctgctcggtgccactatcttccagctgctagagaggcaggcggaggctcagtccagggaccagtttcagttggagaagctgcgcttcctggagaactacacctgcctggaccagtgggccatggagcagtttgtgcaggtcatcatggaagcctgggtgaaaggtgtgaaccccaaaggcaactctaccaaccccagcaactgggactttggcagcagtttcttctttgcaggcacagtcgtcactaccataggatatgggaacctggcacccagcacagaggcaggtcaggtcttctgtgtcttctatgccctgttgggcatcccgcttaacgtgatcttcctcaaccacctgggcacagggctgcgtgcccatctggccgccattgaaagatgggaggaccgtcccaggcgctcccaggtactgcaagtcctgggcctggctctgttcctgaccctggggacgctggtcattctcatcttcccacccatggtcttcagccatgtggagggctggagcttcagcgagggcttctactttgctttcatcactctcagcaccattggctttggggactatgttgttggcacagaccccagcaagcattatatctcagtgtatcggagcctggcagccatctggatcctcctgggcctggcgtggctggcgctgatcctcccactgggccccctgcttctgcacagatgctgccagctctggctgctcagtctgaggcaaggctgtggagccaaggcggctccaggcaggagacccaggagaggctctacagcagcaagaggagtccaagtcacaccccaggacttccccatatccaagaaaggactgggaagctgaggacccacggactcttcacacagcctagacgcttcctccactccaggtagagggatttcgggggccttctcagaagcaaggagtggacaagcctcttggttaaggctcctcttacctcccaagctcatggacaagtggcaatcagctggggtccctcttttggggtacaaaggaaaggacagaggtgtgggagacccaaggtggtcttgagattgacagacagcaagtccttggagatagcccccgagtccaagaacttaggcaggggccccaagacaataaagttggtctctacta

SEQ ID NO: 891 - DNA, 1527 bp, Artificial
  cDNA Sequence
agcaggcgtttgcgagaggagatacgagctggacgcctggcccttccctcccaccgggtcctagtccaccgctcccggcgccggctccccgcctctcccgctatgtaccgaccgcgagcccgggcggctcccgagggcagggtccggggctgcgcggtgcccagcaccgtgctcctgctgctcgcctacctggcttacctggcgctgggcaccggcgtgttctggacgctggagggccgcgcggcgcaggactccagccgcagcttccagcgcgacaagtgggagctgttgcagaacttcacgtgtctggaccgcccggcgctggactcgctgatccgggatgtcgtccaagcatacaaaaacggagccagcctcctcagcaacaccaccagcatggggcgctgggagctcgtgggctccttcttcttttctgtgtccaccatcaccaccattggctatggcaacctgagccccaacacgatggctgcccgcctcttctgcatcttctttgcccttgtggggatcccactcaacctcgtggtgctcaaccgactggggcatctcatgcagcagggagtaaaccactgggccagcaggctggggggcacctggcaggatcctgacaaggcgcggtggctggcgggctctggcgccctcctctcgggcctcctgctcttcctgctgctgccaccgctgctcttctcccacatggagggctggagctacacagagggcttctacttcgccttcatcaccctcagcaccgtgggcttcggcgactacgtgattggaatgaacccctcccagaggtacccactgtggtacaagaacatggtgtccctgtggatcctctttgggatggcatggctggccttgatcatcaaactcatcctctcccagctggagacgccagggagggtatgttcctgctgccaccacagctctaaggaagacttcaagtcccaaagctggagacagggacctgaccgggagccagagtcccactccccacagcaaggatgctatccagagggacccatgggaatcatacagcatctggaaccttctgctcacgctgcaggctgtggcaaggacagctagttatactccattctttggtcgtcgtcctcggtagcaagacccctgattttaagctttgcacatgtccacccaaactaaagactacattttccatccaccctagaggctgggtgcagctatatgattaattctgcccaatagggtatacagagacatgtcctgggtgacatgggatgtgactttcgggtgtcggggcagcatgcccttctcccccacttccttactttagcgggctgcaatgccgccgatatgatggctgggagctctggcagccatacggcaccatgaagtagcggcaatgtttgagcggcacaataagataggaagagtctggatctctgatgatcacagagccatcctaacaaacggaatatcacccgacctcctttatgtgagagagaaataaacatcttatgtaaaatacca

SEQ ID NO: 892 - DNA, 328 bp, Artificial
  cDNA Sequence
agctggaagagcctggggccacctgtctggtcagagtctctctgctgtgggcctcttggagccagggctggttttgtggtctgactgaagtgacaatgaaattaataggatcctgatgctgtgactgaggccatttccctgtgtctccaaacaggaatgagagaggaaatgtcattaggatgccaggaggcttttgaaatcttcaagagggaccacgctgacagcgttaccatcgatgacaacaaacagattctgaaacagagattttctgaagccaaggccctgggagaaagtataaatgaagcaagaagtaaaattggtaagcaga

SEQ ID NO: 893 - DNA, 1127 bp, Artificial
  cDNA Sequence
gcagaggctgggccacaggcactgctgcccctggggaccttaagtgggatacgagaagtatttgagactctcaccaccaagctcccaccacttctgtaggaggccaaggacagcgtgcttgacctcaagctggcagctgacatcctatctgtgtgccagaaaccgcaggtttacagcattaccaatgtattggaaggcatagggctaatggagaaaaaatatccaagaacagcatcagtggaaaggcatggggcctggctgcaatagggctggagattgcagacaagctgactgagctcaaggcagagatcgaggaaccgcagaagcaagagcaaaaaccggaccagcacaaggtgtgggggaagcagaacatctggaacatcatagctgcttggcctatgtgactcatgaggacatgggtagaggctttgctggagacaccctcctaccatactggccacacagaccctgtctggtagcagcccacaggcacccatcccagaagtccccagtgggcaacagtaagagattcacctgaacagcctgactggccccttcaaggctggtgaacaaggaggcatggagctcaccacctgtggctgtgtctatgccgtcaccctccagagcccacctgctgtctctggccctccatctctgcccaagccttccctgttccatctccaggaaacctcacatgcatgtaggactcagttgaccaccccttacctctgaccctgacagctccggagcccagtggtgagctgagctcactcccactgggccggcagcatgagacactggccccctgcagtcttctttcctgctggatagcagcagctgcagcaatgataccaatgcatcagaacccaaccccgctatctcctttgaacccctcaaggcagaccctacaggcattctggaactccccgaagagctgccactcttggatctcacacaagaacacatgagctcagagctgctggaggcattgatgttctcagaaatattctccctcctcctccatctttctccatctgccaagatcatgagatcatggttacacctacaacctggatgagagtaagggtgtctgtgacctctttgatgtgtctattctcagcctctga

SEQ ID NO: 894 - DNA, 814 bp, Artificial
  cDNA Sequence
tacccaccatttgtatacaggagtacaacagcacagtgtggttgagactacagggcaaacattgtgctaagttagatttcaaagaatttttgatcaggatgcaaaccaagagaccgtttttgaaaacattgccaaaccagttgctgggagtcctacaggaactggatcaacccagcaagtctgcagttcccaaggtcttcaggatgaggcaccagtgcagttatgtagtatttttccgccaaagtgatatgttttaaactgacagattttcattgttccatttgatgctaatattttcttctaacaatagcttttctcttaatgatgccttttacttatgtaaacatgtttttctcataaaaacttaaatagtcattttgctttttattaatggaatcaccaccaagcaatctttataagattgtcatttatatggctacattaaataacacagttctgttttcatacatagaaattctaataatataaaaaattatgtagccaaaaatattgaaacatttatacatgaaaagcttgagtcacagaaacctagggttgaaaggaacttcaaggtctttagccttcctccaagaaatataacttacaaaagtgagcagaagtttttatatattcacttgcccttaggctcttaatttaactccacactgagcattttcgacactgacttgttttgagaaaggttatcataagggagcttttccgtttctgctacctcaaatgcgtgtatcttttttcttagcctttcttcctttactcttctctcagaaatatttctctttactatccttactac

SEQ ID NO: 895 - DNA, 1741 bp, Artificial
  cDNA Sequence
tgttgctaagactgtgggtcgccggaggtggtgggagttagttttggcagcccgggcctgagagaggtcaagggtcattgcagagccagggaggagatggtgaagcagactatccagatattcgcgagggtgaagccccctgtccggaagcaccaacaagggatttattccatagatgaagatgaaaaattaatacctagcttggaaatcatcttaccacgtgatttggcagatgggtttgtgaataataagcgagaaagctacaaatttaaatttcaaagaatttttgatcaggatgcaaaccaagagaccgtttttgaaaacattgccaaaccagttgctgggagtgtcctggcaggttacaatggtaccatctttgcatatgggcaaacaggcagcgggaagacattcactatcacagggggtgcagagcgttacagtgacagaggcattatcccaaggacactgtcatacatttttgaacagttacaaaaggacagcagcaaaatatatacaacacacatttcctatttggaaatctacaatgaatgtggttatgatcttttggatccaagacatgaagcctccagtttggaagatttgccgaaagtgacaatactggaggatcctgatcagaacattcacctgaaaaacttgactctccatcaggcaaccacagaggaagaagctctgaatttgctttttttaggagacaccaaccgaatgattgcagagactcctatgaaccaagcttcaacccgttcccactgcattttcaccattcatttgtcaagcaaggaaccaggatctgcaactgtacgacatgccaaactccatctggttgacctggctggttcagagcgagttgcaaagactggagtagggggccatcttctaacagaggccaagtatatcaacttgtcactacattacttagaacaggttatcattgccctttcagaaaagcaccgttcgcacattccttatagaaactccatgatgaccagtgtcctaagagacagtttgggagggaactgcatgacaactatgattgcaacactctccttggagaaaaggaatcttgatgagtctatatcaacctgcagatttgcacagcgagtggcactcataaagaatgaagctgttcttaatgaagaaattaaccccagattagtgattaaacgcctacaaaaggaaatccaggaactgaaggatgaactggccatggtcactggggagcagaggacagaggcactcacagaagcagagctccttcagctggaaaaactaataacatcctttttggaagaccaggattcagacagtagattagaggttggcgcggatatgcgtaaagttcatcactgttttcatcatttaaagaaactattgaatgacaagaagatccttgaaaacaatacagtctcctctgaaagcaaagaccaagattgtcaagaaccattaaaagaagaagaatatagaaagctacgagatattctgaaacagagagataacgaaatcaatatcctggtcaacatgttaaaaaaagaaaagaagaaagctcaggaggctctccacttggctggcatggatagacgtgaattcagacagtcccagagcccacccttccgcctaggaaacccagaagaaggtcaaagaatgcgactatcctcagctccctcacaggcccaggacttcagcattttggggaaaagatccagtttgctccacaagaaaatag

SEQ ID NO: 896 - DNA, 743 bp, Artificial
  cDNA Sequence
actcctatgaaccaagcttcaacccgttcccactgcattttcaccattcatttgtcaagcaaggaaccaggatctgcaactgtacgacatgccaaactccatctggttgacctggctggttcagagcgagttgcaaagactggagtagggggccatcttctaacagaggccaagtatatcaacttgtcactacattacttagaacaggttatcattgccctttcagaaaagcaccgttcgcacattccttatagaaactccatgatgaccagtgtcctaagagacagtttgggagggaactgcatgacaactatgattgcaacactctccttggagaaaaggaatcttgatgagtctatatcaacctgcagatttgcacagcgagtggcactcataaagaatgaagctgttcttaatgaagaaattaaccccagattaaaagcaccaagctcctctgatggagttctcttctgcagaaaccaatgagtgaggcaggatctgtttcagcaaaggccctggtcaggtatcagcatcacacagtgttcctgctggagagaggagacagcatgcaaagtcaagattcaggtggaactgaactgctagggtggattttgttgctgtccctacccttccagaagccctatagcattacagtgctgaatgagaaagagagttaacaaagttattagccccaagacaaaaactagttcagaatttaaggaaaataaacatattagacattg

SEQ ID NO: 897 - DNA, 518 bp, Artificial
  cDNA Sequence
cattacccatttttgtgtccataaaattgtccataattttaagagctgtatgttctctgtcaccaagttcaccttaatgagaagttgacattttctctgcctctttgccatttgtaggtgattaaacgcctacaaaaggaaatccaggaactgaaggatgaactggccatggtcactggggagcagaggacagaggcactcacagaagcagagctccttcagctggaaaaactaataacatcctttttggaagaccaggattcagacagtagattagaggttggcgcggatatgcgtaaagttcatcactgttttcatcatttaaagaaactattgaatgacaagaagatccttgaaaacaatacagtctcctctgaaagcaaagaccaagattgtcaagaaccattaaaagaagaagaatatagaaagctacgagatattctgaaacagagagataacgaaatcagtatcctttctgaagtgatgaagaaacttcctctatcctggtttgaaagggg

SEQ ID NO: 898 - DNA, 436 bp, Artificial
  cDNA Sequence
gagggagggtgaagtgctgcttagactggtgccaagatgagagtcgggtgcaggggtcaccacatctcccctcgtcactcacaggacattgagccctttggaagagggaacaccctgcatctcaaagttctaaggatggcaaagactatgagctaacattagcagccagcccaccctgccatctttctttctctagagcactgagacccaacatgtgacctggggccagcagcatcacctaggaaattatgagaaatacagactctcagacccacaggatcagaagctgcattttaacaagactcatctttacaagactccaggagcttagggtgcagtgacgaacagtgtttgctgacagcagccctcacccagacaagaaccgaggtctcacaccagccatcatcaagcccagagtagaccccaaaagaggaaa

SEQ ID NO: 899 - DNA, 638 bp, Artificial
  cDNA Sequence
cccaaaagaggaaagtaagacaagaatgagggtcatcatggggagaaggaagtcttggagagaaccctcacttgactttggcagcttctggaagatgttgcagctctgaaggcatgtttagaatatcaggaaaatgcttctccaggatcatgatcagataactctccactctaagcctcctgcaaccctcagccctaccttccactttgggctttgcctcagccagccgctcctggaatttcttcttgaagaagagggcttgcagtcgctgctggtagtggtcaatcctgtagacaaggaggtcaatgtcactcttctctgggatgaacttgaggagctgcaaagagcaggcgcaagtcacacaagcaactggtttcccaaaggatccaaaaaactgagagggaagagatttggggaagatgtcacttttcctcatctgactttgccttggagtcagatgggagaatgactcctggagaacacttagccttttccagctttccccaagaaaggctggcccagggaggcttctataaaccttctccctaactcttccagcctgatttctccttgacccaagaatcgcagcctcctgggggctgttgggaaggggcgtggctgcccgctgggttcagttc

SEQ ID NO: 900 - DNA, 440 bp, Artificial
  cDNA Sequence
ccagccatcatcaagcccagagtagaccccaaaagaggaaagtaagacaagaatgagggtcatcatggggagaaggaagtcttggagagaaccctcacttgactttggcagcttctggaagatgttgcagctctgaaggcatgtttagaatatcaggaaaatgcttctccaggatcatgatcaggaggtcaatgtcactcttctctgggatgaacttgaggagctgcaaagagcaggcgcaagtcacacaagcaactggtttcccaaaggatccaaaaaactgagagggaagagatttggggaagatgtcacttttcctcatctgactttgccttggagtcagatgggagaatgactcctggagaacacttagccttttccagctttccccaagaaaggctggcccagggaggcttctataaaccttctccctaactctt

SEQ ID NO: 901 - DNA, 5424 bp, Artificial
  cDNA Sequence
caagaccaaggtggctgtgctggagatcctgggtgctgtgtgcctcgtgcctggtggccacaagaaggtgctgcaggccatgctgcactaccaggtgtatgcagcagagcgaacccgcttccagaccctgctgaacgagctagaccgaagtctgggccggtaccgggatgaagtgaatctgaaaacagccatcatgtccttcatcaatgctgtcctcaatgctggagctggagaggataatctggagttccgcctacatctacggtatgaattcctgatgctgggtatacagcctgtgattgacaagctccggcaacatgaaaatgccatcctggacaaacatttagacttcttcgagatggtgcggaatgaggatgacctggagctagccaggaggtttgacatggtccacatcgacaccaagagtgcttcccagatgtttgagttgatccacaagaagctgaagtacacggaggcctacccctgcctgctctctgtgctgcaccactgcctgcagatgccctacaaacggaacggtggctacttccagcagtggcagctcctggaccgcatcctccagcagattgtcctccaggatgagcggggtgtggaccctgacctggctcccttggagaacttcaatgtcaagaacatcgtcaacatgctcatcaacgagaatgaagtgaaacagtggcgagaccaggcagagaagttccggaaagaacacatggagcttgtgagccgtctggagaggaaggagcgggaatgcgagacaaagacattggagaaggaagagatgatgcggacgctgaacaaaatgaaggacaagctggcccgggagtcccaggagctgcgccaggctcggggacaagtggcagagctggtagcccagctcagtgaactctcaacaggccctgtatcttccccaccaccccctgggggcccactcaccttgtcttcctcaatgacaaccaatgacctgcctccaccccctcctcctctgccctttgcctgttgtccccctcccccaccaccaccccttcctcccgggggacccccgactcccccaggtgccccaccttgcctcggcatgggcctgcccctccctcaggacccctaccccagcagtgacgtcccactcaggaaaaagcgtgtcccccagccttctcacccactgaagtccttcaactgggtgaagctgaatgaggagcgtgtccctggcaccgtatggaatgagattgatgacatgcaggtatttcggatcctggacctagaggattttgaaaagatgttttcagcctaccagaggcaccaggagctgataactaatccttctcagcagaaagagctgggctccactgaagacatctacctggcttcccgcaaggtcaaagagctgtcggtcattgatggccggagggcccaaaactgcatcatccttctttccaagttgaagctttctaacgaggagatccggcaggccatcttgaagatggatgagcaggaggaccttgctaaggacatgctggagcagctcctcaagttcatcccagagaagagtgacattgacctcctggaggagcacaagcatgaaattgagcggatggcccgtgctgaccgcttcctctatgaaatgagcaggattgaccactaccagcagcgactgcaagccctcttcttcaagaagaaattccaggagcggctggctgaggcaaagcccaaagtggaagccatcctgttggcctcccgggagctggtccgcagcaagcgtcttagacagatgctagaggtcatcctagccataggcaacttcatgaacaaagggcagcgtgggggcgcctacgggttccgggtggccagcctcaacaagatcgctgacaccaagtccagcatcgacagaaacatctctctgctccattacctgatcatgatcctggagaagcattttcctgatattctaaacatgccttcagagctgcaacatcttccagaagctgccaaagtcaacctagcagaactggagaaggaggtgggcaacctcaggaggggcctgagagcggtggaggtggagctggagtatcagaggcgccaggtacgggagcccagtgacaagtttgtccctgtcatgagcgacttcatcacggtgtccagcttcagcttctccgagctggaggaccagctaaatgaggccagggacaagttcgccaaggccttgatgcacttcggggagcatgacagcaagatgcagccagacgaattctttggcatctttgataccttcttgcaggccttctcagaggcccggcaggatctagaggccatgaggaggaggaaggaggaggaggagcggcgggcgcgcatggaagccatgctgaaggagcagagggaacgtgagcggtggcagcggcagcggaaggtcctggctgcaggcagctcgctggaggagggaggagagttcgatgacctggtgtcggccctgcgctctggggaggtcttcgacaaggacttatgcaagctcaagcgcagccgcaagcgatcagggagccaggccctggaagttacccgggagcgggcaataaaccggctaaattattgacctggggaactagccacacaggaggccgggagacagggactggtgagaatggggctgagtggaggaggtggtgatatttaaaccatttggtgcttggtttagagccttgggctgggtcctgggatggggggctgtgtgtggctggaccaggtgtctccccacgcttaccttaaggggctcctcttatctccccttcacatgattccttctgtgccctggccccaggtattattctgaggctgccttggatggcctcaggccaggtaaccccaggctgaaggggccctgctccccatcccctaccatgggcacccatgtgctggcacagaacagttccagatctagactggagaggtccacagccttgtccagagttcctgtgtagcacggggagcaatgatggagggagcccctgagagggaatctggtgagggaatccagactcccttctctcaaggggaggctcaacagaacattgacctgggggcaaactttcctcttgaatgggaacagaggaggcattatatattctagttagatcagctctggtaggttccagagaacagtcaatgttggaaggatgatgcagggaccaaagccatcaggacagagtagcagtgtctgtttcccatgtcacaagtcctctggcctctccctgcatgtcttaagtatctttcccttccttctctaccctcacctccatcctgtctactaatccacagtcctagaagactcaccttgggtttccacagctatggctcactaccaggtgcttgatgaatctggcgaggggctcaagacagacctcatgcatcaccacacctcatgccttttgggcatctcccatgtccccatctcctggacacctggccattgttgtgaagccagacagtgacctcaaatgttgccttggagtcccctacagcccctcagcagagggcagcacttgaatgcttagctccatcccatagttctctacttcatataaattgctcaggccctcccaccccttctctaacactagcttcaaggcagaagccacagcagcctctgtccagcctgcaggtggccacttggaaccatgtgtccactggcgttggggagttggttcctgagaggtctgagggccagagctgccctctacattaacatgctgtctctaagggtggcccctcctctcaggcgttcagatggtgcgaacagcagagcaggcaagggaaactggggagatggggatggaggaggaaggctgatatcctctggggagcacatcacctgaaggtgccaaggaggaaggctgagaggggggccaccccatttctggtacccaatttggttcttcagcccaacttgcaaggggttccttctggtcctcccatccactgccaccttccattttgtccatctcatgctggccttggtggatgggatggctgtatctagacaaaatttttctaaaactccatcaaggctcttattcaataccacgttccgagttggcctttcatcttctttgagactggccctgcctaacctctaccatcaatgagctcttggcccttctgcccttccctgtgtttctcactttccaacctaatccctggctcagggttattgccagtggagactggtgagctgggcctactctcagctgcctatcttctgcctttcacttgcatccaactcctggggctgggaccgtagtagctgcgggggggaagaaacacagggtcggtgagcccagcatgtgcgttggtttgagggggcgggcggtgtgtgtgtgttctggtgggagggatctgagcaagtgcaagcctggctgacacaggtgtgaagaggccatcctggaacccaggtgagggcaagatgaaggcttccaggcagaacagctgcagagagtttggctatatgcatctgcagccccaagagctcccactgcaagacaagtgttggggaagatgggaggttgtgggtgaggcctctaaaggtcctctcccaaactgaccaggctgatgtcaacctaaccccctcaggggcagggaacaggggagggctccacaagcgtgtctggcattcccacccaccatggaagactggatacgcacctggaaacaaaaggactatggaagctgttcaagatacatttgatcttcagaaaagcagaatttggttcaactgttgacagaggacacaaatacgttgttccagagctcagccttctcactctaaaagaaagatatttttctatttattttctacatctggccagtggctctggtgctagatgccactgtagccagatctccaacagtgccttggaccatggactcatactcaactgagtaagaaggggctggtgcccagtcggggtggctgagctggtccttaataggttgtttcttggtcttgctttcttcatgccctccccactgctcctgccacctttagataagtttctctagctaattttgtggccaatgtaaaattcgtcatcaacctaacaaacacaaccttctcagcagcatttctcccctgtgatggaaataaagtgtttagggcagtgggaggagaaaattctccaggtgaatggggaagggtctgttccagcctctccctactcccatcccatttccaccaactggggaactgtgactatctatctcccccgacttctaccagggatgccttcacgccaaggctgttctcaccagctgcctcagatgacaaatgaggctaatggacataatctacagtgtcctttttcacttgcaccttttttataagaatatattgtaatactaaaaaatattaaattcataccatcccta

SEQ ID NO: 902 - DNA, 578 bp, Artificial
  cDNA Sequence
cagatgccctacaaacggaacggtggctacttccagcagtggcagctcctggaccgcatcctccagcagattgtcctccaggatgagcggggtgtggaccctgacctggctcccttggagaacttcaatgtcaagaacatcgtcaacatgctcatcaacgagaatgaagtgaaacagtggcgagaccaggcagagaagttccggaaagaacacatggagcttgtgagccgtctggagaggaaggagcgggaatgcgagacaaagacattggagaaggaagagatgatgcggacgctgaacaaaatgaaggacaagctggcccgggagtcccaggagctgcgccaggctcggggacaagtggcagagctggtagcccagctcagtgaactctcagtatgcaagcatctccccctttacatagttgagccaagaccctgggcttcaggactgggtgggcagagcaggtgtcggagaggccaaggaccccagcatgagggagaagggagatggagaccttgggccaggatagaagagacccttgaggctgtacaggtggcatctttgtgttagaaaaataa

SEQ ID NO: 903 - DNA, 294 bp, Artificial
  cDNA Sequence
aggaggtggctcttgcggggcgggtaagaggaggattagggaacccacacctcaactgtccacttgacttgttggttgcagaaagagctgggctccactgaagacatctacctggcttcccgcaaggtcaaagagctgtcggtcattgatggccggagggcccaaaactgcatcatccttctttccaagttgaagctttctaacgaggagatccggcaggccatcttgaagatggatgagcaggaggaccttgctaaggacatgctggagcagctcctcaagttcatcccagag

SEQ ID NO: 904 - DNA, 772 bp, Artificial
  cDNA Sequence
atcacaatgaggacctagggcatctgtctgctgacgccccctggcctgcagtgaccatggccccccgcaagaggagccaccatggcctgggcttcctgtgctgcttcgggggcagtgacatccccgaaatcaacctccgggacaaccaccctctgcagttcatggagttctccagccccatcccgaacgcagaggagctcaacatccgctttgcagagctggtggatgaattggatctcactgacaaaaaccgagaggctatgtttgcactgccccctgagaagaaatggcagatctactgcagcaagaagaaggtgccctctctgacccctctggccacatctcagggttcatggcatggggtggctcttgctgccttggcatgctcatgcattcacctgatgtttattacatgccagccctgttctaggtgttggaggaacaacagtgaataaaatagaaaaaggaaattctgctgtcctggagcttacactcaaagaaataggattctctttttcaaaaacgcttaaagcaggacctgctgcatcccaggactggggcttgctgggagacagacaaagaagcagagtctggactctctcgtgcctgctcccaggcatggagggtgggcatcatggaccatacctggagcagctttgctataagaaatcagtttggggggcagggatgtcctcttttggatctttagtctccactctgtcccaggctagggctcacacatctgtccatgttctcctcagcatatcctccc

SEQ ID NO: 905 - DNA, 6094 bp, Artificial
  cDNA Sequence
atcacaatgaggacctagggcatctgtctgctgacgccccctggcctgcagtgaccatggccccccgcaagaggagccaccatggcctgggcttcctgtgctgcttcgggggcagtgacatccccgaaatcaacctccgggacaaccaccctctgcagttcatggagttctccagccccatcccgaacgcagaggagctcaacatccgctttgcagagctggtggatgaattggatctcactgacaaaaaccgagaggctatgtttgcactgccccctgagaagaaatggcagatctactgcagcaagaagaaggagcaggaggaccccaacaagctggcaaccagctggcctgactattacatcgaccgcatcaattccatggctgcgatgcagagtctgtacgcgtttgatgaggaggagacggagatgaggaaccaagtcgtggaagacctgaagacagccctccggacacagcctatgaggtttgtgacccgcttcattgagctggagggcttgacctgtctgctaaatttcctccggagcatggaccacgccacctgtgagagccgcatccacacctcactcattggctgcatcaaagcattgatgaacaactcccaggggcgggcacatgtgctggcacagcctgaggccattagtaccatagcccagagcctacgcacagagaacagcaagaccaaggtggctgtgctggagatcctgggtgctgtgtgcctcgtgcctggtggccacaagaaggtgctgcaggccatgctgcactaccaggtgtatgcagcagagcgaacccgcttccagaccctgctgaacgagctagaccgaagtctgggccggtaccgggatgaagtgaatctgaaaacagccatcatgtccttcatcaatgctgtcctcaatgctggagctggagaggataatctggagttccgcctacatctacggtatgaattcctgatgctgggtatacagcctgtgattgacaagctccggcaacatgaaaatgccatcctggacaaacatttagacttcttcgagatggtgcggaatgaggatgacctggagctagccaggaggtttgacatggtccacatcgacaccaagagtgcttcccagatgtttgagttgatccacaagaagctgaagtacacggaggcctacccctgcctgctctctgtgctgcaccactgcctgcagatgccctacaaacggaacggtggctacttccagcagtggcagctcctggaccgcatcctccagcagattgtcctccaggatgagcggggtgtggaccctgacctggctcccttggagaacttcaatgtcaagaacatcgtcaacatgctcatcaacgagaatgaagtgaaacagtggcgagaccaggcagagaagttccggaaagaacacatggagcttgtgagccgtctggagaggaaggagcgggaatgcgagacaaagacattggagaaggaagagatgatgcggacgctgaacaaaatgaaggacaagctggcccgggagtcccaggagctgcgccaggctcggggacaagtggcagagctggtagcccagctcagtgaactctcaacaggccctgtatcttccccaccaccccctgggggcccactcaccttgtcttcctcaatgacaaccaatgacctgcctccaccccctcctcctctgccctttgcctgttgtccccctcccccaccaccaccccttcctcccgggggacccccgactcccccaggtgccccaccttgcctcggcatgggcctgcccctccctcaggacccctaccccagcagtgacgtcccactcaggaaaaagcgtgtcccccagccttctcacccactgaagtccttcaactgggtgaagctgaatgaggagcgtgtccctggcaccgtatggaatgagattgatgacatgcaggtatttcggatcctggacctagaggattttgaaaagatgttttcagcctaccagaggcaccagaaagagctgggctccactgaagacatctacctggcttcccgcaaggtcaaagagctgtcggtcattgatggccggagggcccaaaactgcatcatccttctttccaagttgaagctttctaacgaggagatccggcaggccatcttgaagatggatgagcaggaggaccttgctaaggacatgctggagcagctcctcaagttcatcccagagaagagtgacattgacctcctggaggagcacaagcatgaaattgagcggatggcccgtgctgaccgcttcctctatgaaatgagcaggattgaccactaccagcagcgactgcaagccctcttcttcaagaagaaattccaggagcggctggctgaggcaaagcccaaagtggaagccatcctgttggcctcccgggagctggtccgcagcaagcgtcttagacagatgctagaggtcatcctagccataggcaacttcatgaacaaagggcagcgtgggggcgcctacgggttccgggtggccagcctcaacaagatcgctgacaccaagtccagcatcgacagaaacatctctctgctccattacctgatcatgatcctggagaagcattttcctgatattctaaacatgccttcagagctgcaacatcttccagaagctgccaaagtcaacctagcagaactggagaaggaggtgggcaacctcaggaggggcctgagagcggtggaggtggagctggagtatcagaggcgccaggtacgggagcccagtgacaagtttgtccctgtcatgagcgacttcatcacggtgtccagcttcagcttctccgagctggaggaccagctaaatgaggccagggacaagttcgccaaggccttgatgcacttcggggagcatgacagcaagatgcagccagacgaattctttggcatctttgataccttcttgcaggccttctcagaggcccggcaggatctagaggccatgaggaggaggaaggaggaggaggagcggcgggcgcgcatggaagccatgctgaaggagcagagggaacgtgagcggtggcagcggcagcggaaggtcctggctgcaggcagctcgctggaggagggaggagagttcgatgacctggtgtcggccctgcgctctggggaggtcttcgacaaggacttatgcaagctcaagcgcagccgcaagcgatcagggagccaggccctggaagttacccgggagcgggcaataaaccggctaaattattgacctggggaactagccacacaggaggccgggagacagggactggtgagaatggggctgagtggaggaggtggtgatatttaaaccatttggtgcttggtttagagccttgggctgggtcctgggatggggggctgtgtgtggctggaccaggtgtctccccacgcttaccttaaggggctcctcttatctccccttcacatgattccttctgtgccctggccccaggtattattctgaggctgccttggatggcctcaggccaggtaaccccaggctgaaggggccctgctccccatcccctaccatgggcacccatgtgctggcacagaacagttccagatctagactggagaggtccacagccttgtccagagttcctgtgtagcacggggagcaatgatggagggagcccctgagagggaatctggtgagggaatccagactcccttctctcaaggggaggctcaacagaacattgacctgggggcaaactttcctcttgaatgggaacagaggaggcattatatattctagttagatcagctctggtaggttccagagaacagtcaatgttggaaggatgatgcagggaccaaagccatcaggacagagtagcagtgtctgtttcccatgtcacaagtcctctggcctctccctgcatgtcttaagtatctttcccttccttctctaccctcacctccatcctgtctactaatccacagtcctagaagactcaccttgggtttccacagctatggctcactaccaggtgcttgatgaatctggcgaggggctcaagacagacctcatgcatcaccacacctcatgccttttgggcatctcccatgtccccatctcctggacacctggccattgttgtgaagccagacagtgacctcaaatgttgccttggagtcccctacagcccctcagcagagggcagcacttgaatgcttagctccatcccatagttctctacttcatataaattgctcaggccctcccaccccttctctaacactagcttcaaggcagaagccacagcagcctctgtccagcctgcaggtggccacttggaaccatgtgtccactggcgttggggagttggttcctgagaggtctgagggccagagctgccctctacattaacatgctgtctctaagggtggcccctcctctcaggcgttcagatggtgcgaacagcagagcaggcaagggaaactggggagatggggatggaggaggaaggctgatatcctctggggagcacatcacctgaaggtgccaaggaggaaggctgagaggggggccaccccatttctggtacccaatttggttcttcagcccaacttgcaaggggttccttctggtcctcccatccactgccaccttccattttgtccatctcatgctggccttggtggatgggatggctgtatctagacaaaatttttctaaaactccatcaaggctcttattcaataccacgttccgagttggcctttcatcttctttgagactggccctgcctaacctctaccatcaatgagctcttggcccttctgcccttccctgtgtttctcactttccaacctaatccctggctcagggttattgccagtggagactggtgagctgggcctactctcagctgcctatcttctgcctttcacttgcatccaactcctggggctgggaccgtagtagctgcgggggggaagaaacacagggtcggtgagcccagcatgtgcgttggtttgagggggcgggcggtgtgtgtgtgttctggtgggagggatctgagcaagtgcaagcctggctgacacaggtgtgaagaggccatcctggaacccaggtgagggcaagatgaaggcttccaggcagaacagctgcagagagtttggctatatgcatctgcagccccaagagctcccactgcaagacaagtgttggggaagatgggaggttgtgggtgaggcctctaaaggtcctctcccaaactgaccaggctgatgtcaacctaaccccctcaggggcagggaacaggggagggctccacaagcgtgtctggcattcccacccaccatggaagactggatacgcacctggaaacaaaaggactatggaagctgttcaagatacatttgatcttcagaaaagcagaatttggttcaactgttgacagaggacacaaatacgttgttccagagctcagccttctcactctaaaagaaagatatttttctatttattttctacatctggccagtggctctggtgctagatgccactgtagccagatctccaacagtgccttggaccatggactcatactcaactgagtaagaaggggctggtgcccagtcggggtggctgagctggtccttaataggttgtttcttggtcttgctttcttcatgccctccccactgctcctgccacctttagataagtttctctagctaattttgtggccaatgtaaaattcgtcatcaacctaacaaacacaaccttctcagcagcatttctcccctgtgatggaaataaagtgtttagggcagtgggaggagaaaattctccaggtgaatggggaagggtctgttccagcctctccctactcccatcccatttccaccaactggggaactgtgactatctatctcccccgacttctaccagggatgccttcacgccaaggctgttctcaccagctgcctcagatgacaaatgaggctaatggacataatctacagtgtcctttttcacttgcaccttttttataagaatatattgtaatactaaaaaatattaaattcataccatccctaccc

SEQ ID NO: 906 - DNA, 702 bp, Artificial
  cDNA Sequence
atcacaatgaggacctagggcatctgtctgctgacgccccctggcctgcagtgaccatggccccccgcaagaggagccaccatggcctgggcttcctgtgctgcttcgggggcagtgacatccccgaaatcaacctccgggacaaccaccctctgcagttcatggagttctccagccccatcccgaacgcagaggagctcaacatccgctttgcagagctggtggatgaattggatctcactgacaaaaaccgagaggctatgtttgcactgccccctgagaagaaatggcagatctactgcagcaagaagaagccctgttctaggtgttggaggaacaacagtgaataaaatagaaaaaggaaattctgctgtcctggagcttacactcaaagaaataggattctctttttcaaaaacgcttaaagcaggacctgctgcatcccaggactggggcttgctgggagacagacaaagaagcagagtctggactctctcgtgcctgctcccaggcatggagggagcaggaggaccccaacaagctggcaaccagctggcctgactattacatcgaccgcatcaattccatggctgcgatgcagagtctgtacgcgtttgatgaggaggagacggagatgaggaaccaagtcgtggaagacctgaagacagccctccggacacagcctatgaggtttgtgacccg

SEQ ID NO: 907 - DNA, 420 bp, Artificial
  cDNA Sequence
atgttgaagcgaggacgtggtgggtcctctggtgtgaaattccagatttccttgggtcttctggtaggagtgtgatcagttgtgctgacaacacaggagccaaaaacctgtatgtcatctccgtgaaaggggatcaagggatggctgaacagacttcccactgctggtgtgggtgacacggtgatggccacagtcaagaaaggcaaaccagagctcagaaaaaaggtacatccagcagtggttattcgacaacgaaagtcataccgcagaaaagatggcgtgtttctttattttgaagataatgcaggggtcacagtgaacaataaaggcgagatgaaaggttctgccattacaggaccagtagcaaaggagtgtgcagacttgtggccctggattgcgtccagtgctggcagcattgca

SEQ ID NO: 908 - DNA, 1099 bp, Artificial
  cDNA Sequence
atgagggaaattgtgcatatccaggccagtcactgtggcaaccagatcagtgtcaaattcttggaagtgatccatgatgaacatggcattgaccccaccatcacctaccatggtgacagtgacctgcagctggactgcatctccatgtactacgacgaagccacaggtggcaaacatgttcttcataccatcctggtagatctagaacctgggaccatggactctgtttgctgaggtccttttggccagatctttagatgagacaactttgtttctggtcagtctggggctggcaacaactgggccaaaggccactacacagaaggggctgagctggttgattctgtcctggatgtgtatggaaggagacagagaactgtgactgcctgcaggtcttctaggtgacccactcactgggcagaggcacaggctctggaatgggcactctcattagcaagatctgagaagagtaccctgattgcattgtgaacatcttcagtgtagtgccttcacccaaagtgacaccaaggtcgagccctacagtgccaccctctctgtccatcagttggtagagaacactgatgagacgtattccattgacaatgaagccctgtataacatctgctcccacactctgaagcggaccacaccaacctacagggatatgaaccccctcgtctcagcaaccatgaacagtgtcatcacctgcctctgtttccctggccagctcaatgccgacctccacaagttggcagtcaacatggtccccttcccacatctccatttctttatgcctggctcttcccctctcaccagccatggaagccagcagtatcaagctcacagtgtctgaattcacccagcatgtcttcaatgccaagaacatgatggctgcctgtgaaccccgccatggcttatacttcaccttggctgctgtcttcactggtcagatatccatgaaggacgtcaatgacaaaatgttaaatatgcaaaacaaaaacagcagctactttgtggaatggatctccaacaacgtcaagaacagtctgacatcccatctcatggcctgaaaatgtcattcactggtattgtcaacatg

SEQ ID NO: 909 - DNA, 988 bp, Artificial
  cDNA Sequence
tccaatttcacctggctcctggggctgtcacttccctttgcttcatgtttataaaatgagaggactgggccagcccatcataagatgggggagggcacagaaacttgtcttgaggagactctaaggggaggaggtgtccaggcggaggcagttcctgcgggagcatgcggcccccttctccgccttcctcacagacagcttcggccggcagcacagctacctgcggatctccctcacagagaagtgcaacctcagatgtcagtactgcatgcccgaggagggggtcccgctgacccccaaagccaacctgctgaccacagaggagatcctgaccctcgcccggctctttgtgaaggaaggcatcgacaagatccggctcacaggtggagagccgcttatccggccggacgtggtggacattgtggcccagctccagcggctggaagggctgagaaccataggtgttaccaccaatggcatcaacctggcccggctactgccccagcttcagaaggctggtctcagtgccatcaacatcagcctggacaccctggtgcctgccaagtttgagttcattgtccgcaggaaaggcttccacaaggtcatggagggcatccacaaggccatcgagctgggctacaaccctgtgaaggtgaactgtgtggtgatgcgaggccttaacgaggatgaactcctggactttgcggccttgactgagggcctccccctggatgtgcgcttcatagagtatatgccctttgatggcaacaagtggaacttcaagaagatggtcagctataaggagatgctagacactgtccggcagcagtggccagagctggagaaggtgccagaggaggaatccagcacagccaaggcctttaaaatccctggcttccaaggccagatcagcttcatcacatccatgtctgagcatttctgtgggacctgcaaccgcctgcgaatcacagctgatgggaacctcaag

SEQ ID NO: 910 - DNA, 2339 bp, Artificial
  cDNA Sequence
gcctttaaaatccctggcttccaaggccagatcagcttcatcacatccatgtctgagcatttctgtgggacctgcaaccgcctgcgaatcacagctgatgggaacctcaaggtctgcctctttggaaactctgaggtatccctgcgggatcacctgcgagctggggcctctgagcaggagctgctgagaatcattggggctgctgtgggcaggaagaagcggcagcatgcaggcatgttcagtatttcccagatgaagaaccggcccatgatcctcatcgagttatttttgatgttccccaattccccaccagccaatccaagcattttctcctgggacccgctccatgttcagggtctaagacccagaatgagtttctccagccaggtggccactttatggaaaggatgcagggtcccccagacccctcctctagcccagcagcggctggggtctggctcctttcagagacactacacttcccgtgcagactcagatgccaactcaaagtgccttagcccaggttcctgggcttctgctgccccctcaggaccccagctaacctcagaacaactaactcatgtggactcggaaggacgggcagctatggtagatgtgggcaggaagccagacacagagcgggtggctgtggcttcagccgtggtcctcctgggaccggtagccttcaagcttgtccagcagaaccagctcaagaaaggagatgccctagtggtggcccagctggctggagtccaggcagccaaggtgaccagccagctgatccctctgtgccaccacgtggccctgagccacatccaggtgcagctggagctggacagcacacgccatgccgtgaagatccaggcatcttgccgggctcggggccccaccggggtggagatggaggccctgacctctgctgcagtggccgccctcaccctgtatgacatgtgcaaggctgtcagcagggacatcgtgttggaggagatcaagctcattagcaagactggtggtcagcggggggacttccatcgggcttagcacctgcccttctcacccatggcccacccaggcctggagctgggatgcaatgtaggctgagggaaagacgtcaggttcctttaatcacagtcactgtttgtttaccttgagcagtaaacccgaagtcagcctgctctactactaacaaacaggcctgctgctagatgatctctaatgaccaatggggcttcctttctatagggaggataccagcaggcccttaagccttccaggacactaaggtcgtgggagcgggactgcaacaagcaatgccagataactgagaaatcatgttctttgtggactatttcagacaaccaggttccgacagtccagcccagaacttttccttctcattttgggttttctcttctcctgctttcctggggagagattaagcgctcattaagcagaggagcccactttgaggagagcaaagcacaagcttgcctgaagaatggatcccaacttctccccggcagctctgcctccctaagtctgtgaagccgcagccctgccctgtcctgtcctgtcctgacttcatctctccttctgcccaagtctgtgtcccatcagacttgcagcctttcagcttaacagttgcccggtcctgctggccccttttcctctggcccccctcttctgaaacaggatgtgcacacatgggccatagccctaaggactcctgccagaccacacagcccacacctggccctgttcacggctgttccacccacccctctttattctggagcatatcagggaaagaaaagttgatgatagattgccttcaccctcacagcgcacaaataaagctacgatgccaactttgcagatgcaagaatgaagacactgtgtgggtagggcactgagctgctgcagtttcacagggaaggctgcacctatcaatcaatcaatcaatcctatcccaagacacagttccctgagggaagaagaggagggacctggaaaggcctaagggtgtactctctgtatagccccgctatgggaaaataaagtggagtagggggcatagaaatgcaccatctaagggaaatcttttgtcaggtggtggccaggggtgttcaaagctcattgcttgcattaccagctattagagagatcagagagggcaattaattagaggctcctggttctcacatcccaaacacacacagttctggcctgctgggctctctaacttggatgtctttgagtcctcagtggtgccccctgcctgcctcccctctgccctatgccaaggtgtgctggcaaatattaaacaaccagctctctgg

SEQ ID NO: 911 - DNA, 869 bp, Artificial
  cDNA Sequence
gcaacaagtggaacttcaagaagatggtcagctataaggagatgctagacactgtccggcagcagtggccagagctggagaaggtgccagaggaggaatccagcacagccaaggcctttaaaatccctggcttccaaggccagatcagcttcatcacatccatcttaacagttgcccggtcctgctggccccttttcctctggcccccctcttctgaaacaggatgtgcacacatgggccatagccctaaggactcctgccagaccacacagcccacacctggccctgttcacggctgttccacccacccctctttattctggagcatatcagggaaagaaaagttgatgatagattgccttcaccctcacagcgcacaaataaagctacgatgccaactttgcagatgcaagaatgaagacactgtgtgggtagggcactgagctgctgcagtttcacagggaaggctgcacctatcaatcaatcaatcaatcctatcccaagacacagttccctgagggaagaagaggagggacctggaaaggcctaagggtgtactctctgtatagccccgctatgggaaaataaagtggagtagggggcatagaaatgcaccatctaagggaaatcttttgtcaggtggtggccaggggtgttcaaagctcattgcttgcattaccagctattagagagatcagagagggcaattaattagaggctcctggttctcacatcccaaacacacacagttctggcctgctgggctctctaacttggatgtctttgagtcctcagtggtgccccctgcctgcctcccctctgccctatgccaaggtgtgctggcaaatattaaacaaccagctctctgg

SEQ ID NO: 912 - DNA, 1060 bp, Artificial
  cDNA Sequence
gcaacaagtggaacttcaagaagatggtcagctataaggagatgctagacactgtccggcagcagtggccagagctggagaaggtgccagaggaggaatccagcacagccaaggcctttaaaatccctggcttccaaggccagatcagcttcatcacatccatgtctgagcatttctgtgggacctgcaaccgcctgcgaatcacagctgatgggaacctcaaggtctgcctctttggaaactctgaggtatccctgcgggatcacctgcgagctggggcctctgagcaggagctgctgacttcatctctccttctgcccaagtctgtgtcccatcagacttgcagcctttcagcttaacagttgcccggtcctgctggccccttttcctctggcccccctcttctgaaacaggatgtgcacacatgggccatagccctaaggactcctgccagaccacacagcccacacctggccctgttcacggctgttccacccacccctctttattctggagcatatcagggaaagaaaagttgatgatagattgccttcaccctcacagcgcacaaataaagctacgatgccaactttgcagatgcaagaatgaagacactgtgtgggtagggcactgagctgctgcagtttcacagggaaggctgcacctatcaatcaatcaatcaatcctatcccaagacacagttccctgagggaagaagaggagggacctggaaaggcctaagggtgtactctctgtatagccccgctatgggaaaataaagtggagtagggggcatagaaatgcaccatctaagggaaatcttttgtcaggtggtggccaggggtgttcaaagctcattgcttgcattaccagctattagagagatcagagagggcaattaattagaggctcctggttctcacatcccaaacacacacagttctggcctgctgggctctctaacttggatgtctttgagtcctcagtggtgccccctgcctgcctcccctctgccctatgccaaggtgtgctggcaaatattaaacaaccagctctctgg

SEQ ID NO: 913 - DNA, 3319 bp, Artificial
  cDNA Sequence
ctgcccctccccgcccttgctgggatgaccccgggggcgagtgcccggccagtgtgctcccgaagcgggctgcggttccgctcgtatcaggcttcatggcggcgcggccactgtcccggatgctgcggcggcttctgaggtccagcgcccggagctgcagctcaggggctccggtgacccagccctgccccggggagtccgcgcgagctgcctcggaggaggtgtccaggcggaggcagttcctgcgggagcatgcggcccccttctccgccttcctcacagacagcttcggccggcagcacagctacctgcggatctccctcacagagaagtgcaacctcagatgtcagtactgcatgcccgaggagggggtcccgctgacccccaaagccaacctgctgaccacagaggagatcctgaccctcgcccggctctttgtgaaggaaggcatcgacaagatccggctcacaggtggagagccgcttatccggccggacgtggtggacattgtggcccagctccagcggctggaagggctgagaaccataggtgttaccaccaatggcatcaacctggcccggctactgccccagcttcagaaggctggtctcagtgccatcaacatcagcctggacaccctggtgcctgccaagtttgagttcattgtccgcaggaaaggcttccacaaggtcatggagggcatccacaaggccatcgagctgggctacaaccctgtgaaggtgaactgtgtggtgatgcgaggccttaacgaggatgaactcctggactttgcggccttgactgagggcctccccctggatgtgcgcttcatagagtatatgccctttgatggcaacaagtggaacttcaagaagatggtcagctataaggagatgctagacactgtccggcagcagtggccagagctggagaaggtgccagaggaggaatccagcacagccaaggcctttaaaatccctggcttccaaggccagatcagcttcatcacatccatgtctgagcatttctgtgggacctgcaaccgcctgcgaatcacagctgatgggaacctcaaggtctgcctctttggaaactctgaggtatccctgcgggatcacctgcgagctggggcctctgagcaggagctgctgagaatcattggggctgctgtgggcaggaagaagcggcagcatgcaggcatgttcagtatttcccagatgaagaaccggcccatgatcctcatcggtgggtgacccatcaagttatttttgatgttccccaattccccaccagccaatccaagcattttctcctgggacccgctccatgttcagggtctaagacccagaatgagtttctccagccaggtggccactttatggaaaggatgcagggtcccccagacccctcctctagcccagcagcggctggggtctggctcctttcagagacactacacttcccgtgcagactcagatgccaactcaaagtgccttagcccaggttcctgggcttctgctgccccctcaggaccccagctaacctcagaacaactaactcatgtggactcggaaggacgggcagctatggtagatgtgggcaggaagccagacacagagcgggtggctgtggcttcagccgtggtcctcctgggaccggtagccttcaagcttgtccagcagaaccagctcaagaaaggagatgccctagtggtggcccagctggctggagtccaggcagccaaggtgaccagccagctgatccctctgtgccaccacgtggccctgagccacatccaggtgcagctggagctggacagcacacgccatgccgtgaagatccaggcatcttgccgggctcggggccccaccggggtggagatggaggccctgacctctgctgcagtggccgccctcaccctgtatgacatgtgcaaggctgtcagcagggacatcgtgttggaggagatcaagctcattagcaagactggtggtcagcggggggacttccatcgggcttagcacctgcccttctcacccatggcccacccaggcctggagctgggatgcaatgtaggctgagggaaagacgtcaggttcctttaatcacagtcactgtttgtttaccttgagcagtaaacccgaagtcagcctgctctactactaacaaacaggcctgctgctagatgatctctaatgaccaatggggcttcctttctatagggaggataccagcaggcccttaagccttccaggacactaaggtcgtgggagcgggactgcaacaagcaatgccagataactgagaaatcatgttctttgtggactatttcagacaaccaggttccgacagtccagcccagaacttttccttctcattttgggttttctcttctcctgctttcctggggagagattaagcgctcattaagcagaggagcccactttgaggagagcaaagcacaagcttgcctgaagaatggatcccaacttctccccggcagctctgcctccctaagtctgtgaagccgcagccctgccctgtcctgtcctgtcctgacttcatctctccttctgcccaagtctgtgtcccatcagacttgcagcctttcagcttaacagttgcccggtcctgctggccccttttcctctggcccccctcttctgaaacaggatgtgcacacatgggccatagccctaaggactcctgccagaccacacagcccacacctggccctgttcacggctgttccacccacccctctttattctggagcatatcagggaaagaaaagttgatgatagattgccttcaccctcacagcgcacaaataaagctacgatgccaactttgcagatgcaagaatgaagacactgtgtgggtagggcactgagctgctgcagtttcacagggaaggctgcacctatcaatcaatcaatcaatcctatcccaagacacagttccctgagggaagaagaggagggacctggaaaggcctaagggtgtactctctgtatagccccgctatgggaaaataaagtggagtagggggcatagaaatgcaccatctaagggaaatcttttgtcaggtggtggccaggggtgttcaaagctcattgcttgcattaccagctattagagagatcagagagggcaattaattagaggctcctggttctcacatcccaaacacacacagttctggcctgctgggctctctaacttggatgtctttgagtcctcagtggtgccccctgcctgcctcccctctgccctatgccaaggtgtgctggcaaatattaaacaaccagctctctgg

SEQ ID NO: 914 - DNA, 3362 bp, Artificial
  cDNA Sequence
gccagaaatcttcccagtagagatcaccatccgcccccgacccccaagctgaatacttaaggggtgggtccttcccatcaagctgatttctcaacgagagggacaatcccagcttccccaacattgcagagcccaaacatgtggaagagttggaagctccgcacagatgtcagagtaagggagggggcaggcggttctccttgtgcctcttcccagcccggtagcaggggcccatgcttcctccctggtctgtcctcgcaggaggtgtccaggcggaggcagttcctgcgggagcatgcggcccccttctccgccttcctcacagacagcttcggccggcagcacagctacctgcggatctccctcacagagaagtgcaacctcagatgtcagtactgcatgcccgaggagggggtcccgctgacccccaaagccaacctgctgaccacagaggagatcctgaccctcgcccggctctttgtgaaggaaggcatcgacaagatccggctcacaggtggagagccgcttatccggccggacgtggtggacattgtggcccagctccagcggctggaagggctgagaaccataggtgttaccaccaatggcatcaacctggcccggctactgccccagcttcagaaggctggtctcagtgccatcaacatcagcctggacaccctggtgcctgccaagtttgagttcattgtccgcaggaaaggcttccacaaggtcatggagggcatccacaaggccatcgagctgggctacaaccctgtgaaggtgaactgtgtggtgatgcgaggccttaacgaggatgaactcctggactttgcggccttgactgagggcctccccctggatgtgcgcttcatagagtatatgccctttgatggcaacaagtggaacttcaagaagatggtcagctataaggagatgctagacactgtccggcagcagtggccagagctggagaaggtgccagaggaggaatccagcacagccaaggcctttaaaatccctggcttccaaggccagatcagcttcatcacatccatgtctgagcatttctgtgggacctgcaaccgcctgcgaatcacagctgatgggaacctcaaggtctgcctctttggaaactctgaggtatccctgcgggatcacctgcgagctggggcctctgagcaggagctgctgagaatcattggggctgctgtgggcaggaagaagcggcagcatgcaggcatgttcagtatttcccagatgaagaaccggcccatgatcctcatcggtgggtgacccatcaagttatttttgatgttccccaattccccaccagccaatccaagcattttctcctgggacccgctccatgttcagggtctaagacccagaatgagtttctccagccaggtggccactttatggaaaggatgcagggtcccccagacccctcctctagcccagcagcggctggggtctggctcctttcagagacactacacttcccgtgcagactcagatgccaactcaaagtgccttagcccaggttcctgggcttctgctgccccctcaggaccccagctaacctcagaacaactaactcatgtggactcggaaggacgggcagctatggtagatgtgggcaggaagccagacacagagcgggtggctgtggcttcagccgtggtcctcctgggaccggtagccttcaagcttgtccagcagaaccagctcaagaaaggagatgccctagtggtggcccagctggctggagtccaggcagccaaggtgaccagccagctgatccctctgtgccaccacgtggccctgagccacatccaggtgcagctggagctggacagcacacgccatgccgtgaagatccaggcatcttgccgggctcggggccccaccggggtggagatggaggccctgacctctgctgcagtggccgccctcaccctgtatgacatgtgcaaggctgtcagcagggacatcgtgttggaggagatcaagctcattagcaagactggtggtcagcggggggacttccatcgggcttagcacctgcccttctcacccatggcccacccaggcctggagctgggatgcaatgtaggctgagggaaagacgtcaggttcctttaatcacagtcactgtttgtttaccttgagcagtaaacccgaagtcagcctgctctactactaacaaacaggcctgctgctagatgatctctaatgaccaatggggcttcctttctatagggaggataccagcaggcccttaagccttccaggacactaaggtcgtgggagcgggactgcaacaagcaatgccagataactgagaaatcatgttctttgtggactatttcagacaaccaggttccgacagtccagcccagaacttttccttctcattttgggttttctcttctcctgctttcctggggagagattaagcgctcattaagcagaggagcccactttgaggagagcaaagcacaagcttgcctgaagaatggatcccaacttctccccggcagctctgcctccctaagtctgtgaagccgcagccctgccctgtcctgtcctgtcctgacttcatctctccttctgcccaagtctgtgtcccatcagacttgcagcctttcagcttaacagttgcccggtcctgctggccccttttcctctggcccccctcttctgaaacaggatgtgcacacatgggccatagccctaaggactcctgccagaccacacagcccacacctggccctgttcacggctgttccacccacccctctttattctggagcatatcagggaaagaaaagttgatgatagattgccttcaccctcacagcgcacaaataaagctacgatgccaactttgcagatgcaagaatgaagacactgtgtgggtagggcactgagctgctgcagtttcacagggaaggctgcacctatcaatcaatcaatcaatcctatcccaagacacagttccctgagggaagaagaggagggacctggaaaggcctaagggtgtactctctgtatagccccgctatgggaaaataaagtggagtagggggcatagaaatgcaccatctaagggaaatcttttgtcaggtggtggccaggggtgttcaaagctcattgcttgcattaccagctattagagagatcagagagggcaattaattagaggctcctggttctcacatcccaaacacacacagttctggcctgctgggctctctaacttggatgtctttgagtcctcagtggtgccccctgcctgcctcccctctgccctatgccaaggtgtgctggcaaatattaaacaaccagctctctgg

SEQ ID NO: 915 - DNA, 3114 bp, Artificial
  cDNA Sequence
cttgctgggatgaccccgggggcgagtgcccggccagtgtgctcccgaagcgggctgcggttccgctcgtatcaggcttcatggcggcgcggccactgtcccggatgctgcggcggcttctgaggtccagcgcccggagctgcagctcaggggctccggtgacccagccctgccccggggagtccgcgcgagctgcctcggaggtcagtactgcatgcccgaggagggggtcccgctgacccccaaagccaacctgctgaccacagaggagatcctgaccctcgcccggctctttgtgaaggaaggcatcgacaagatccggctcacaggtggagagccgcttatccggccggacgtggtggacattgtggcccagctccagcggctggaagggctgagaaccataggtgttaccaccaatggcatcaacctggcccggctactgccccagcttcagaaggctggtctcagtgccatcaacatcagcctggacaccctggtgcctgccaagtttgagttcattgtccgcaggaaaggcttccacaaggtcatggagggcatccacaaggccatcgagctgggctacaaccctgtgaaggtgaactgtgtggtgatgcgaggccttaacgaggatgaactcctggactttgcggccttgactgagggcctccccctggatgtgcgcttcatagagtatatgccctttgatggcaacaagtggaacttcaagaagatggtcagctataaggagatgctagacactgtccggcagcagtggccagagctggagaaggtgccagaggaggaatccagcacagccaaggcctttaaaatccctggcttccaaggccagatcagcttcatcacatccatgtctgagcatttctgtgggacctgcaaccgcctgcgaatcacagctgatgggaacctcaaggtctgcctctttggaaactctgaggtatccctgcgggatcacctgcgagctggggcctctgagcaggagctgctgagaatcattggggctgctgtgggcaggaagaagcggcagcatgcagagttatttttgatgttccccaattccccaccagccaatccaagcattttctcctgggacccgctccatgttcagggtctaagacccagaatgagtttctccagccaggtggccactttatggaaaggatgcagggtcccccagacccctcctctagcccagcagcggctggggtctggctcctttcagagacactacacttcccgtgcagactcagatgccaactcaaagtgccttagcccaggttcctgggcttctgctgccccctcaggaccccagctaacctcagaacaactaactcatgtggactcggaaggacgggcagctatggtagatgtgggcaggaagccagacacagagcgggtggctgtggcttcagccgtggtcctcctgggaccggtagccttcaagcttgtccagcagaaccagctcaagaaaggagatgccctagtggtggcccagctggctggagtccaggcagccaaggtgaccagccagctgatccctctgtgccaccacgtggccctgagccacatccaggtgcagctggagctggacagcacacgccatgccgtgaagatccaggcatcttgccgggctcggggccccaccggggtggagatggaggccctgacctctgctgcagtggccgccctcaccctgtatgacatgtgcaaggctgtcagcagggacatcgtgttggaggagatcaagctcattagcaagactggtggtcagcggggggacttccatcgggcttagcacctgcccttctcacccatggcccacccaggcctggagctgggatgcaatgtaggctgagggaaagacgtcaggttcctttaatcacagtcactgtttgtttaccttgagcagtaaacccgaagtcagcctgctctactactaacaaacaggcctgctgctagatgatctctaatgaccaatggggcttcctttctatagggaggataccagcaggcccttaagccttccaggacactaaggtcgtgggagcgggactgcaacaagcaatgccagataactgagaaatcatgttctttgtggactatttcagacaaccaggttccgacagtccagcccagaacttttccttctcattttgggttttctcttctcctgctttcctggggagagattaagcgctcattaagcagaggagcccactttgaggagagcaaagcacaagcttgcctgaagaatggatcccaacttctccccggcagctctgcctccctaagtctgtgaagccgcagccctgccctgtcctgtcctgtcctgacttcatctctccttctgcccaagtctgtgtcccatcagacttgcagcctttcagcttaacagttgcccggtcctgctggccccttttcctctggcccccctcttctgaaacaggatgtgcacacatgggccatagccctaaggactcctgccagaccacacagcccacacctggccctgttcacggctgttccacccacccctctttattctggagcatatcagggaaagaaaagttgatgatagattgccttcaccctcacagcgcacaaataaagctacgatgccaactttgcagatgcaagaatgaagacactgtgtgggtagggcactgagctgctgcagtttcacagggaaggctgcacctatcaatcaatcaatcaatcctatcccaagacacagttccctgagggaagaagaggagggacctggaaaggcctaagggtgtactctctgtatagccccgctatgggaaaataaagtggagtagggggcatagaaatgcaccatctaagggaaatcttttgtcaggtggtggccaggggtgttcaaagctcattgcttgcattaccagctattagagagatcagagagggcaattaattagaggctcctggttctcacatcccaaacacacacagttctggcctgctgggctctctaacttggatgtctttgagtcctcagtggtgccccctgcctgcctcccctctgccctatgccaaggtgtgctggcaaatattaaacaaccagctctctgg

SEQ ID NO: 916 - DNA, 2741 bp, Artificial
  cDNA Sequence
tcctcacagacagcttcggccggcagcacagctacctgcggatctccctcacagagaagtgcaacctcagatgtgagtactgcatgcccgaggagggggtcccgctgacccccaaagccaacctgctgaccacagaggagatcctgaccctcgcccggctctttgtgaaggaaggcatcgacaagatccggctcacaggtggagagccgcttatccggccggacgtggtggacattgtggcccagctccagcggctggaagggctgagaaccataggtgttaccaccaatggcatcaacctggcccggctactgccccagcttcagaaggctggtctcagtgccatcaacatcagcctggacaccctggtgcctgccaagtttgagttcattgtccgcaggaaaggcttccacaaggtcatggagggcatccacaaggccatcgagctgggctacaaccctgtgaactgtgtggtgatgcgaggccttaacgaggatgaactcctggactttgcggccttgactgagggcctccccctggatgtgcgcttcatagagtatatgccctttgatggcaacaagtggaacttcaagaagatggtcagctataaggagatgctagacactgtccggcagcagtggccagagctggagaaggtgccagaggaggaatccagcacagccaaggcctttaaaatccctggcttccaaggccagatcagcttcatcacatccatgtctgagcatttctgtgggacctgcaaccgcctgcgaatcacagctgatgggaacctcaaggtctgcctctttggaaactctgaggtatccctgcgggatcacctgcgagctggggcctctgagcaggagctgctgagaatcattggggctgctgtgggcaggaagaagcggcagcatgcaggcatgttcagtatttcccagatgaagaaccggcccatgatcctcatcggtggaacaactaactcatgtggactcggaaggacgggcagctatggtagatgtgggcaggaagccagacacagagcgggtggctgtggcttcagccgtggtcctcctgggaccggtagccttcaagcttgtccagcagaaccagctcaagaaaggagatgccctagtggtggcccagctggctggagtccaggcagccaaggtgaccagccagctgatccctctgtgccaccacgtggccctgagccacatccaggtgcagctggagctggacagcacacgccatgccgtgaagatccaggcatcttgccgggctcggggccccaccggggtggagatggaggccctgacctctgctgcagtggccgccctcaccctgtatgacatgtgcaaggctgtcagcagggacatcgtgttggaggagatcaagctcattagcaagactggtggtcagcggggggacttccatcgggcttagcacctgcccttctcacccatggcccacccaggcctggagctgggatgcaatgtaggctgagggaaagacgtcaggttcctttaatcacagtcactgtttgtttaccttgagcagtaaacccgaagtcagcctgctctactactaacaaacaggcctgctgctagatgatctctaatgaccaatggggcttcctttctatagggaggataccagcaggcccttaagccttccaggacactaaggtcgtgggagcgggactgcaacaagcaatgccagataactgagaaatcatgttctttgtggactatttcagacaaccaggttccgacagtccagcccagaacttttccttctcattttgggttttctcttctcctgctttcctggggagagattaagcgctcattaagcagaggagcccactttgaggagagcaaagcacaagcttgcctgaagaatggatcccaacttctccccggcagctctgcctccctaagtctgtgaagccgcagccctgccctgtcctgtcctgtcctgacttcatctctccttctgcccaagtctgtgtcccatcagacttgcagcctttcagcttaacagttgcccggtcctgctggccccttttcctctggcccccctcttctgaaacaggatgtgcacacatgggccatagccctaaggactcctgccagaccacacagcccacacctggccctgttcacggctgttccacccacccctctttattctggagcatatcagggaaagaaaagttgatgatagattgccttcaccctcacagcgcacaaataaagctacgatgccaactttgcagatgcaagaatgaagacactgtgtgggtagggcactgagctgctgcagtttcacagggaaggctgcacctatcaatcaatcaatcaatcctatcccaagacacagttccctgagggaagaagaggagggacctggaaaggcctaagggtgtactctctgtatagccccgctatgggaaaataaagtggagtagggggcatagaaatgcaccatctaagggaaatcttttgtcaggtggtggccaggggtgttcaaagctcattgcttgcattaccagctattagagagatcagagagggcaattaattagaggctcctggttctcacatcccaaacacacacagttctggcctgctgggctctctaacttggatgtctttgagtcctcagtggtgccccctgcctgcctcccctctgccctatgccaaggtgtgctggcaaatattaaacaaccagctctctgg

SEQ ID NO: 917 - DNA, 539 bp, Artificial
  cDNA Sequence
gtgctaagctgggcccattacgcttggaaaatcctggagcccagaaaggtgaagcaaactgcctgaggtcaagctcataatgtgaagtggagctgcaatgtctactcaagagtgtctgacatctgcactttttactctgccaggtaagaagaccctcaccagatgtggcccctcactcctggacttccaagcctccagaatcatgaactaaatacatttctatttgttataaattactcagcctcaggtattgctagagcagtagaaaacagactgagaaaggctgtgtctccctcctcagactgaaggatctttgtgatcagatgctgtgtctatatcctttgttcatttgtttgatatttgctgaggaccttttaagtgccaggcactattctagattcagaatactatgttgaaaagacagacaaaaccactggtctcatggaacttacaagttagttgcgacaaatgacaataaacaacaaacaattttaggttacaataagtactaagaagcaaataaaagcagcataatcgtc

SEQ ID NO: 918 - DNA, 554 bp, Artificial
  cDNA Sequence
taagaaaactgagacacagaaaagtcacacaagattatcgaggtcaacacagagaacagtggaacctgcacctgaccccaggcaggcggaaccttcatgaccacaccacaccaccacagggaacaggcagggaaaacaatgggtctagcaggacaaaagtgacatttcccagagtttcttgctgtttggatctggctgcagtttcagttttgccaagaagaggcatttccatgagctctggacagtggcagagaggcagaggtgctccactgcagtgtgctggatggtccacgggctcctgccaatgtgaggatttgcagcaactggtatatccatggtcttgtcaccagcttcctgaattcggggcagctggagccacactagtggtccttccttgcaggggcagcagctgtctcctggtctcagaatcacagctgtggggatgcaaccttaagccaaaagcctagcggtgggtggtcctaaacttcttttgtctaggccctctgatccctctgtaagtcgctatttcccttattaaatctctttctgctgga

SEQ ID NO: 919 - DNA, 824 bp, Artificial
  cDNA Sequence
gtcaccatgtgaagaagatccttgcttccccttcaccttctgccatgattttaagtttcttgaggcctccccagccatgtggaactgtaagatgaagtaaacacatggcagcctctctctcccactgacgatacaaccttgatagagggcatggtggagctaattgaatgatccgaacagtaaataccagcaagtagatgggtgaaaacagccaggattccaagtaccacaaaactggtgttgagttgtgcacactttttcctctggaatctcttgagcagaactcagcatgacctgaaacccaggagtgagccgcacagtgccgacaatgagatgcagaagaaaacctctggttctggctgaagcagtggacaaggagactcttgaaactcagagcctgggggcacccctgatagtgttctttactttctctcccttctcacattccagccaccagagaatgcaagagaggagtagcagtggcagtaaatgtggcatcaacaacaacaacaaaaagcagggactaggactctgaggaagggaagcctatattctggcctcagggtgctctttcttcctgcctaggggtcatataccacctgtgggcacctcaggactcctgacaacctcacttttacctgttgcctttttagcccaggatcagtaggtatgggggtgcacatgctcttgaggacacagcagctgtcacatcagggaacccgactccagaaccctctgtaaatatcccatggcttggccctgcccatcaccccacccaggcctcctcaaatgaggagctaaagctggcccatggggccaaagtg

SEQ ID NO: 920 - DNA, 741 bp, Artificial
  cDNA Sequence
ctgccagcaaagccctcttcaacccactggagtcagcaggcccagtgcttcataaaccaagttatgagagcagagctgagaatttctaaggagcctcctttttaaagcctttcacttcacctgctctccaacagctggaacggtcactgcgcaggatcaagctacaatgaagaggagggaggcagtctgcgcgcaccgccattttctaggaactgggaagcccccccaccccttaggaagatccatccctgtggaaccttgcccaggcttaccagcctttgctgaggttgatctattgtccctccttgtccccatcaaaatatccagcactccaccttcagggagtagacttgaccctcaaatagcaagttcagccttcccaggtctaggttccctgggaggtcaagattcgtctggttccttagtacagagggctagctgtgagttggaatccccctatgagctttagaatcagtcaagaggaattgggccccttcccttcatccctcttcttttccctttttgtcccagagctcagctctgactcaaaagtttttccatttaccatcaacatggaaacttggctcctcacgtaggtatattatcccccttttgtacatggtcttgttgatccaaactccctttctgtgaaagaggcctgtggggctcaagaagcctggtcagccagccaggctagtcccacatacctcagaaccagtttaataaaggctctatgtcatt

SEQ ID NO: 921 - DNA, 1015 bp, Artificial
  cDNA Sequence
agttatttcgcaaccttcatctgttcctggaagatacccgtagcctgccttccttcttgacaggctgatttaggggtgctccccaagaagatcaggactgctgaaagaatgaagaagaacttacttggcctaggatgtggctagagaacggagcgcactttcacttacctggcaaggtggttttggaagtttccacggaagccttcccagggccgctgctgcccgtcctcgcctagaagaattccattctcccatcccaggaaggagagtgccctgcgtgccacgaaagagcccaggacccacaggacaaatacgtcactggcagacctgccttcgccagcgccagcccatctctgaaacctccagcatttgtgccccggtccggcccctcccaggcctgactctttccgtgaacggtcactgcgcaggatcaagctacaatgaagaggagggaggcagtctgcgcgcaccgccattttctaggaactgggaagcccccccaccccttaggaagatccatccctgtggaaccttgcccaggcttaccagcctttgctgaggttgatctattgtccctccttgtccccatcaaaatatccagcactccaccttcagggagtagacttgaccctcaaatagcaagttcagccttcccaggtctaggttccctgggaggtcaagattcgtctggttccttagtacagagggctagctgtgagttggaatccccctatgagctttagaatcagtcaagaggaattgggccccttcccttcatccctcttcttttccctttttgtcccagagctcagctctgactcaaaagtttttccatttaccatcaacatggaaacttggctcctcacgtaggtatattatcccccttttgtacatggtcttgttgatccaaactccctttctgtgaaagaggcctgtggggctcaagaagcctggtcagccagccaggctagtcccacatacctcagaaccagtttaataaaggctctatgtcatt

SEQ ID NO: 922 - DNA, 1165 bp, Artificial
  cDNA Sequence
agttatttcgcaaccttcatctgttcctggaagatacccgtagcctgccttccttcttgacaggctgatttaggggtgctccccaagaagatcaggactgctgaaagaatgaagaagaacttacttggcctaggatgtggctagagaacggagcgcactttcacttacctggcaaggtggttttggaagtttccacggaagccttcccagggccgctgctgcccgtcctcgcctaggtgtggagcttcccgaccggctggggagggaatgtcctgcgggagccgccgaggaccctctttagcctcttccctggcttggctgcagctgcagtctggtactcgcccattctgctcttcttcacctccgtattttctctctcacggaagaagaattccattctcccatcccaggaaggagagtgccctgcgtgccacgaaagagcccaggacccacaggacaaatacgtcactggcagacctgccttcgccagcgccagcccatctctgaaacctccagcatttgtgccccggtccggcccctcccaggcctgactctttccgtgaacggtcactgcgcaggatcaagctacaatgaagaggagggaggcagtctgcgcgcaccgccattttctaggaactgggaagcccccccaccccttaggaagatccatccctgtggaaccttgcccaggcttaccagcctttgctgaggttgatctattgtccctccttgtccccatcaaaatatccagcactccaccttcagggagtagacttgaccctcaaatagcaagttcagccttcccaggtctaggttccctgggaggtcaagattcgtctggttccttagtacagagggctagctgtgagttggaatccccctatgagctttagaatcagtcaagaggaattgggccccttcccttcatccctcttcttttccctttttgtcccagagctcagctctgactcaaaagtttttccatttaccatcaacatggaaacttggctcctcacgtaggtatattatcccccttttgtacatggtcttgttgatccaaactccctttctgtgaaagaggcctgtggggctcaagaagcctggtcagccagccaggctagtcccacatacctcagaaccagtttaataaaggctctatgtcatt

SEQ ID NO: 923 - DNA, 917 bp, Artificial
  cDNA Sequence
aattccattccctgcaattggagcctgaataatgagttatttcacaggaagattgatctgggtattagggcatcatttagtttgccattacaacagccaattttggttacatgctcagctgtgaaggggaaatgggccagcctgctggagctttctaaagcatggagctgagaacggtgcagtcttcagggatctggtgagcagacggctacaggatttgtaccccaggattaaagccagaaaccaaaagaccatctgccggtacccacaggagggaggatgcaggtcattttcatgtgcagtgacatcgtaggaacggtcactgcgcaggatcaagctacaatgaagaggagggaggcagtctgcgcgcaccgccattttctaggaactgggaagcccccccaccccttaggaagatccatccctgtggaaccttgcccaggcttaccagcctttgctgaggttgatctattgtccctccttgtccccatcaaaatatccagcactccaccttcagggagtagacttgaccctcaaatagcaagttcagccttcccaggtctaggttccctgggaggtcaagattcgtctggttccttagtacagagggctagctgtgagttggaatccccctatgagctttagaatcagtcaagaggaattgggccccttcccttcatccctcttcttttccctttttgtcccagagctcagctctgactcaaaagtttttccatttaccatcaacatggaaacttggctcctcacgtaggtatattatcccccttttgtacatggtcttgttgatccaaactccctttctgtgaaagaggcctgtggggctcaagaagcctggtcagccagccaggctagtcccacatacctcagaaccagtttaataaaggctctatgtcatt

SEQ ID NO: 924 - DNA, 292 bp, Artificial
  cDNA Sequence
acagccattttcacccaaaggacttccattctgcctctgaaatcctccctcccttcaatcctccttgaagccctcggagatgacctacaccaccctggctctgggtgccggctgggcgcacacatctgaaggctctatggcatctctcatattctaggcggagacatccaagccagtgtattgaaggcagagagaggcacgctggcacgtggctgaatccataccctggaatattttggcttcaagtgccctagattttctaaatgtaaaatattaatctgattatttaaaa

SEQ ID NO: 925 - DNA, 3270 bp, Artificial
  cDNA Sequence
tatgcgcgcgcgcgtggggggcagtgtgcatgcggggagtacgggggagtgtgtttgtgtgtgcgtgtgggtgtgagtgcctggctccctctcgctgagacacacatacactcacacatacacaacccggcaggctcgtctgaacttgaagacaccccacattccaagatgcccgaggttcctgggaatgcctggggttcttcgatccggaaaatcctaccggcatcctcctagggagggattattattattatttttctttaatctggaagagaagagaacaagttgtgcttttccccccttcttcttgctaaatgccatggatataactgaataagcggctcagggctttccccgcgtggacgtccgaggccaccatctgcctgcattcgccggagccgccggagggtttagctcgagtctgtctcgggcggggaaggatgcgtggccgagccggggagcccgggcgccccgcggagccggcctcggtgccacccagccgggggtagatgctgcctcgcccaggcgctgagtgaccagaccatggagaccctgcttggtggcctgctagcgtttggcatggcgtttgccgtggtcgacgcctgccccaagtactgtgtctgccagaatctgtctgagtcactggggaccctgtgcccctccaaggggctgctctttgtaccccctgatattgaccggcggacagtggagctgcgcctgggcggcaacttcatcatccacatcagccgccaggactttgccaacatgacggggctggtggacctgaccctgtccaggaacaccatcagccacatccagcccttttcctttctggacctcgagagcctccgctccctgcatcttgacagcaatcggctgccaagccttggggaggacaccctccggggcctggtcaacctgcagcaccttatcgtgaacaacaaccagctgggcggcatcgcagatgaggcttttgaggacttcctgctgacattggaggatctggacctctcctacaacaacctccatggcctgccgtgggactccgtgcgacgcatggtcaacctccaccagctgagcctggaccacaacctgctggatcacatcgccgagggcacctttgcagacctgcagaaactggcccgcctggatctcacctccaatcggctgcagaagctgccccctgatcccatctttgcccgctcccaggcttcggctttgacagccacaccctttgccccacccttgtcctttagttttgggggtaacccacttcactgcaattgtgagcttctctggctgcggaggctcgagcgggacgatgacctggaaacctgtggctccccagggggcctcaagggtcgctacttctggcatgtgcgtgaggaggagtttgtgtgcgagccgcctctcatcacccagcacacacacaagttgctggttctggagggccaggcggccacactcaagtgcaaagccattggggaccccagcccccttatccactgggtagcccccgatgaccgcctggtagggaactcctcaaggaccgctgtctatgacaatggcaccctggacatcttcatcaccacatctcaggacagtggtgccttcacctgcattgctgccaatgctgccggagaggccacggccatggtggaggtctccatcgtccagctgccacacctcagcaacagcaccagccgcactgcaccccccaagtcccgcctctcagacatcactggctccagcaagaccagccggggaggtggaggcagtgggggcggagagcctcccaaaagccccccggaacgggctgtgcttgtgtctgaagtgaccaccacctcggccctggtcaagtggtctgtcagcaagtcagcaccccgggtgaagatgtaccagctgcagtacaactgctctgacgatgaggtactgatttacaggatgatcccagcctccaacaaggccttcgtggtcaacaacctggtgtcagggactggctacgacttgtgtgtgctggccatgtgggatgacacagccacgacactcacggccaccaacatcgtgggctgcgcccagttcttcaccaaggctgactacccgcagtgccagtccatgcacagccagattctgggcggcaccatgatcctggtcatcgggggcatcatcgtggccacgctgctggtcttcatcgtcatcctcatggtgcgctacaaggtctgcaaccacgaggcccccagcaagatggcagcggccgtgagcaatgtgtactcgcagaccaacggcgcccagccaccgcctccaagcagcgcaccagccggggccccgccgcagggcccgccgaaggtggtggtgcgcaacgagctcctggacttcaccgccagcctggcccgcgccagtgactcctcttcctccagctccctgggcagtggggaggctgcggggctgggacgggccccctggaggatcccaccctccgccccgcgccccaagcccagccttgaccgcctgatgggggccttcgcctccctggacctcaagagtcagagaaaggaggagctgctggactccaggactccagccgggagaggggctgggacgtcggcccggggccaccactcggaccgagagccactgctggggccccctgcggcccgggccaggagcctgctccccttgccgttggagggcaaggccaaacgcagccactccttcgacatgggggactttgctgctgcggcggcgggaggggtcgtgccgggcggctacagtcctcctcggaaggtctcgaacatctggacgaagcgcagcctctctgtcaacggcatgctcttgccctttgaggagagtgacctggtgggggcccgggggacttttggcagctccgaatgggtgatggagagcacggtctaggtgggggtgggcatgctccctttcctgtgcgcagggtgggagaaggggaaagaatctcactggcaagtgtttgtggagtttccatggtgatgtttacatccagggacagtttcgtctccctgtcaatggcctcgtgtccccccctaccccgcaacacccacatcacctccccaccacccggccggggtgtgctcagggaatgtggactcgctcaaatgccggactgagccctgagtgtttggaaaggcgagactccgcctttctaatcacaaatgtagcctacaagcaagcggctttggattgcttatgggtctagtgttgtttttatttcttaatttattttttttccatttccca

SEQ ID NO: 926 - DNA, 421 bp, Artificial
  cDNA Sequence
ctggccctgggaagacccagctttgagcctcaggttgtgtctaatcatctctctgtccttgggccagtcaactcacctgttcgtgctgccacagagacagaggggccacatcagagagaaagactctacagcttgcccagagtcgagcttaaatggagcagcatgatttttgtctgaaaagtctgagatgggaccagtggaaaggtgtgcattttaagaaggatttgcttccccatcttgtgccttctgtgtcttgcagcacgacctggccctccacctaggaatcataccttcatcccccatactcataagcatcctcattcctgtttccttgtggatgtcatggtctgctgtgaagtctgcttggtgacccgtccagacctgacttggtataaatgattttgttgcagagaataacaaa

SEQ ID NO: 927 - DNA, 613 bp, Artificial
  cDNA Sequence
actaacagtgagaagcctcagcacagagttgcacagagagactgcctctgcatttgtgacactgacagcacagacaccataactccagccatgacaggctctgcacacagggacccaggaagtgaagggcactgcagaccatacctctgactgtgacagaccccgaacatccacagagacagtaacatcagcattgacaggctcagcaaacagagaaatagggaggaatgggctctgtcgacatcataacaccaacagacacagggacaagtactgcaaacagtgacacaaacagtactagcctctcccaataataccaagctctgcaaataaaactaaactccacagaatgacaaacagtgccacggtctacaaatggtgacacaggcaatgacaagctttgcaaacagctccaagctctgcaaataatgacacacagggccaagctctgcaaacacgtgtgaggagacagaagcacacagaggagaattcacctgccagggccatagaaatcctgcgctgctgtccagcactgggattcgtgtctgcccaactctcagcaaacaggcatgagggctggaagaggagaaaacacaactggctaggagaaggc

SEQ ID NO: 928 - DNA, 7084 bp, Artificial
  cDNA Sequence
gcggacactcctctcggctcctccccggcagcggcggcggctcggagcgggctccggggctcgggtgcagcggccagcgggcgcctggcggcgaggattacccggggaagtggttgtctcctggctggagccgcgagacgggcgctcagggcgcggggccggcggcggcgaacgagaggacggactctggcggccgggtcgttggccgcggggagcgcgggcaccgggcgagcaggccgcgtcgcgctcaccatggtcagctactgggacaccggggtcctgctgtgcgcgctgctcagctgtctgcttctcacaggatctagttcaggttcaaaattaaaagatcctgaactgagtttaaaaggcacccagcacatcatgcaagcaggccagacactgcatctccaatgcaggggggaagcagcccataaatggtctttgcctgaaatggtgagtaaggaaagcgaaaggctgagcataactaaatctgcctgtggaagaaatggcaaacaattctgcagtactttaaccttgaacacagctcaagcaaaccacactggcttctacagctgcaaatatctagctgtacctacttcaaagaagaaggaaacagaatctgcaatctatatatttattagtgatacaggtagacctttcgtagagatgtacagtgaaatccccgaaattatacacatgactgaaggaagggagctcgtcattccctgccgggttacgtcacctaacatcactgttactttaaaaaagtttccacttgacactttgatccctgatggaaaacgcataatctgggacagtagaaagggcttcatcatatcaaatgcaacgtacaaagaaatagggcttctgacctgtgaagcaacagtcaatgggcatttgtataagacaaactatctcacacatcgacaaaccaatacaatcatagatgtccaaataagcacaccacgcccagtcaaattacttagaggccatactcttgtcctcaattgtactgctaccactcccttgaacacgagagttcaaatgacctggagttaccctgatgaaaaaaataagagagcttccgtaaggcgacgaattgaccaaagcaattcccatgccaacatattctacagtgttcttactattgacaaaatgcagaacaaagacaaaggactttatacttgtcgtgtaaggagtggaccatcattcaaatctgttaacacctcagtgcatatatatgataaagcattcatcactgtgaaacatcgaaaacagcaggtgcttgaaaccgtagctggcaagcggtcttaccggctctctatgaaagtgaaggcatttccctcgccggaagttgtatggttaaaagatgggttacctgcgactgagaaatctgctcgctatttgactcgtggctactcgttaattatcaaggacgtaactgaagaggatgcagggaattatacaatcttgctgagcataaaacagtcaaatgtgtttaaaaacctcactgccactctaattgtcaatgtgaaaccccagatttacgaaaaggccgtgtcatcgtttccagacccggctctctacccactgggcagcagacaaatcctgacttgtaccgcatatggtatccctcaacctacaatcaagtggttctggcacccctgtaaccataatcattccgaagcaaggtgtgacttttgttccaataatgaagagtcctttatcctggatgctgacagcaacatgggaaacagaattgagagcatcactcagcgcatggcaataatagaaggaaagaataagatggctagcaccttggttgtggctgactctagaatttctggaatctacatttgcatagcttccaataaagttgggactgtgggaagaaacataagcttttatatcacagatgtgccaaatgggtttcatgttaacttggaaaaaatgccgacggaaggagaggacctgaaactgtcttgcacagttaacaagttcttatacagagacgttacttggattttactgcggacagttaataacagaacaatgcactacagtattagcaagcaaaaaatggccatcactaaggagcactccatcactcttaatcttaccatcatgaatgtttccctgcaagattcaggcacctatgcctgcagagccaggaatgtatacacaggggaagaaatcctccagaagaaagaaattacaatcagagatcaggaagcaccatacctcctgcgaaacctcagtgatcacacagtggccatcagcagttccaccactttagactgtcatgctaatggtgtccccgagcctcagatcacttggtttaaaaacaaccacaaaatacaacaagagcctggaattattttaggaccaggaagcagcacgctgtttattgaaagagtcacagaagaggatgaaggtgtctatcactgcaaagccaccaaccagaagggctctgtggaaagttcagcatacctcactgttcaaggaacctcggacaagtctaatctggagctgatcactctaacatgcacctgtgtggctgcgactctcttctggctcctattaaccctctttatccgaaaaatgaaaaggtcttcttctgaaataaagactgactacctatcaattataatggacccagatgaagttcctttggatgagcagtgtgagcggctcccttatgatgccagcaagtgggagtttgcccgggagagacttaaactgggcaaatcacttggaagaggggcttttggaaaagtggttcaagcatcagcatttggcattaagaaatcacctacgtgccggactgtggctgtgaaaatgctgaaagagggggccacggccagcgagtacaaagctctgatgactgagctaaaaatcttgacccacattggccaccatctgaacgtggttaacctgctgggagcctgcaccaagcaaggagggcctctgatggtgattgttgaatactgcaaatatggaaatctctccaactacctcaagagcaaacgtgacttattttttctcaacaaggatgcagcactacacatggagcctaagaaagaaaaaatggagccaggcctggaacaaggcaagaaaccaagactagatagcgtcaccagcagcgaaagctttgcgagctccggctttcaggaagataaaagtctgagtgatgttgaggaagaggaggattctgacggtttctacaaggagcccatcactatggaagatctgatttcttacagttttcaagtggccagaggcatggagttcctgtcttccagaaagtgcattcatcgggacctggcagcgagaaacattcttttatctgagaacaacgtggtgaagatttgtgattttggccttgcccgggatatttataagaaccccgattatgtgagaaaaggagatactcgacttcctctgaaatggatggctcctgaatctatctttgacaaaatctacagcaccaagagcgacgtgtggtcttacggagtattgctgtgggaaatcttctccttaggtgggtctccatacccaggagtacaaatggatgaggacttttgcagtcgcctgagggaaggcatgaggatgagagctcctgagtactctactcctgaaatctatcagatcatgctggactgctggcacagagacccaaaagaaaggccaagatttgcagaacttgtggaaaaactaggtgatttgcttcaagcaaatgtacaacaggatggtaaagactacatcccaatcaatgccatactgacaggaaatagtgggtttacatactcaactcctgccttctctgaggacttcttcaaggaaagtatttcagctccgaagtttaattcaggaagctctgatgatgtcagatacgtaaatgctttcaagttcatgagcctggaaagaatcaaaacctttgaagaacttttaccgaatgccacctccatgtttgatgactaccagggcgacagcagcactctgttggcctctcccatgctgaagcgcttcacctggactgacagcaaacccaaggcctcgctcaagattgacttgagagtaaccagtaaaagtaaggagtcggggctgtctgatgtcagcaggcccagtttctgccattccagctgtgggcacgtcagcgaaggcaagcgcaggttcacctacgaccacgctgagctggaaaggaaaatcgcgtgctgctccccgcccccagactacaactcggtggtcctgtactccaccccacccatctagagtttgacacgaagccttatttctagaagcacatgtgtatttatacccccaggaaactagcttttgccagtattatgcatatataagtttacacctttatctttccatgggagccagctgctttttgtgatttttttaatagtgcttttttttttttgactaacaagaatgtaactccagatagagaaatagtgacaagtgaagaacactactgctaaatcctcatgttactcagtgttagagaaatccttcctaaacccaatgacttccctgctccaacccccgccacctcagggcacgcaggaccagtttgattgaggagctgcactgatcacccaatgcatcacgtaccccactgggccagccctgcagcccaaaacccagggcaacaagcccgttagccccagggatcactggctggcctgagcaacatctcgggagtcctctagcaggcctaagacatgtgaggaggaaaaggaaaaaaagcaaaaagcaagggagaaaagagaaaccgggagaaggcatgagaaagaatttgagacgcaccatgtgggcacggagggggacggggctcagcaatgccatttcagtggcttcccagctctgacccttctacatttgagggcccagccaggagcagatggacagcgatgaggggacattttctggattctgggaggcaagaaaaggacaaatatcttttttggaactaaagcaaattttagaactttacctatggaagtggttctatgtccattctcattcgtggcatgttttgatttgtagcactgagggtggcactcaactctgagcccatacttttggctcctctagtaagatgcactgaaaacttagccagagttaggttgtctccaggccatgatggccttacactgaaaatgtcacattctattttgggtattaatatatagtccagacacttaactcaatttcttggtattattctgttttgcacagttagttgtgaaagaaagctgagaagaatgaaaatgcagtcctgaggagaggagttttctccatatcaaaacgagggctgatggaggaaaaaggtcaataaggtcaagggaaaaccccgtctctataccaaccaaaccaattcaccaacacagttgggacccaaaacacaggaagtcagtcacgtttccttttcatttaatggggattccactatctcacactaatctgaaaggatgtggaagagcattagctggcgcatattaagcactttaagctccttgagtaaaaaggtggtatgtaatttatgcaaggtatttctccagttgggactcaggatattagttaatgagccatcactagaagaaaagcccattttcaactgctttgaaacttgcctggggtctgagcatgatgggaatagggagacagggtaggaaagggcgcctactcttcagggtctaaagatcaagtgggccttggatcgctaagctggctctgtttgatgctatttatgcaagttagggtctatgtatttatgatgtctgcaccttctgcagccagtcagaagctggagaggcaacagtggattgctgcttcttggggagaagagtatgcttccttttatccatgtaatttaactgtagaacctgagctctaagtaaccgaagaatgtatgcctctgttcttatgtgccacatccttgtttaaaggctctctgtatgaagagatgggaccgtcatcagcacattccctagtgagcctactggctcctggcagcggcttttgtggaagactcactagccagaagagaggagtgggacagtcctctccaccaagatctaaatccaaacaaaagcaggctagagccagaagagaggacaaatctttgttcttcctcttctttacatacgcaaaccacctgtgacagctggcaattttataaatcaggtaactggaaggaggttaaacacagaaaaaagaagacctcagtcaattctctacttttttttttttttccaaatcagataatagcccagcaaatagtgataacaaataaaaccttagctattcatgtcttgatttcaataattaattcttaatcattaagagaccataataaatactccttttcaagagaaaagcaaaaccattagaattgttactcagctccttcaaactcaggtttgtagcatacatgagtccatccatcagtcaaagaatggttccatctggagtcttaatgtagaaagaaaaatggagacttgtaataatgagctagttacaaagtgcttgttcattaaaatagcactgaaaattgaaacatgaattaactgataatattccaatcatttgccatttatgacaaaaatggttggcactaacaaagaacgagcacttcctttcagagtttctgagataatgtacgtggaacagtctgggtggaatggggctgaaaccatgtgcaagtctgtgtcttgtcagtccaagaagtgacaccgagatgttaattttagggacccgtgccttgtttcctagcccacaagaatgcaaacatcaaacagatactcgctagcctcatttaaattgattaaaggaggagtgcatctttggccgacagtggtgtaactgtatgtgtgtgtgtgtgtgtgtgtgtgtgtgtgtgtgtgggtgtatgtgtgttttgtgcataactatttaaggaaactggaattttaaagttacttttatacaaaccaagaatatatgctacagatataagacagacatggtttggtcctatatttctagtcatgatgaatgtattttgtataccatcttcatataataaacttccaaa

SEQ ID NO: 929 - DNA, 1220 bp, Artificial
  cDNA Sequence
atgtcgcaagtcaggattcctgatccagagacaatggccctgatgggatggagcccaaaggtgtcatcgagagtaactggaatgaaattgttgacagctttgatgacatgaacctcttggagtcccttctccatggcatctacgcctatggttctgagaagccctctgccatccagcagcgagccattctaccttgtatcaggggttatgttgtgatcgttcaagcccaatctggcactgggaaaatggccacattttccatatcaattctgcatcagattgaattagatgtaaaagccacccaggccttggtcctagcacccacttgagaatcggctcagcagatacagaaggtggtcatagcactaggagaccacatggatgcctcctgtcacacctgtattgggggcaccaacgttcatgctgaggtacagaaactgcagatggaagctccccatataattgtgggtacccctggccatgtgtttgatatgcttaactggagatacctgtctcccaaatacatcaagatgtttgtgctggacaaaactgacgaaatgttaagccatggattcaaggaccagatctatggcatattccaagagctcaacagcaacacccaggtagttttgccatcagctacaatgccttctgatgtgcttgaggtgaccaagaagttcatgagggaacacatttggattctggtcaagaaggaagagttgaccctggagggtatctgccaattctacatcaacatggaacgagaagagtggaagctggacacactgggtgacttgtatgaaaccctgaccattgcccaggcagtcatcttcctcaacacccgcaggaaggcggactggcttaccaagaagatgcatgctcaagatttcactgtctctgccatgcatggagatatggaccagaaggaatgagacgggatcatgagggagtttcattctggctctagcagagttttgattatcactgacctgctggccagaggcattgatgtgcagcaggtttctttagtcatcaactatgaccttcccaccaacagggaaaactatatccacagaatcggtcgacgtggacagtttggccgtaaaggtgtggctattaacatggtgacagaagaagacaagaggactctttgagacatcgagaccttctataatacctccattgaggaaatgcccctcaatgttgctgacctcatctga

SEQ ID NO: 930 - DNA, 1330 bp, Artificial
  cDNA Sequence
gccagccctcggaaacggaagtgagcggcggggtcgactgacggtaacggggcagagaggctgttcgcagagctgcggaagatgaatgccagaggacttggatctgagctaaaggacagtattccagttactgaactttcagcaagtggaccttttgaaagtcatgatcttcttcggaaaggtttttcttgtgtgaaaaatgaacttttgcctagtcatccccttgaattatcagaaaaaaatttccagctcaaccaagataaaatgaatttttccacactgagaaacattcagggtctatttgctccgctaaaattacagatggaattcaaggcagtgcagcaggttcagcgtcttccatttctttcaagctcaaatctttcactggatgttttgaggggtaatgatgagactattggatttgaggatattcttaatgatccatcacaaagcgaagtcatgggagagccacacttgatggtggaatataaacttggtttactgtaatagtgtgctgttcatggaaaccgagggctgcatcttgtttatagtcatctttgtactgtaatttgatgtacacaacattaaaagtactgacacctgagaatttctgctcaagtagtatcagtgatcatttaaaatttggaggggtctttggtttacagccatgtgacaattaaaagcactaaagggagatcatgttaaagctcttaatttatattaaaacagtagcctttgtctttaaaaaagttgttgctcatgaatattataaaatgatctacaggtttcaattcaacctgtttctaggtttttttgtaaatttagttttgattaagcattataagcatttgagtctataaactttatagtagcatctttcagaataaacatttttaattgatttcagtggcaactctcaaattgattacaatatgagatatatcagtgtcgtccattaacactcataagaataatatttactgtgtcagtgctattttaggattatagttattgtttgattatttcaggttgaaaagtagaagttccaaggttttgattttggtctggtctttaagtgaaaaattaaagcaaccagtagatgtaggttaaacttttacttcatagacttaatatgtaattaatatattgccaagcaacactgttaaagaaaagtaaaactcattttttcttgttcttaatttatatattacaagatactgtaaggtattctttatgaagttgatatataaaaatttacatttttagaacattagtgaatggatcatcttttacaattaaaagtatattttgattatcagtttcttaggaa

SEQ ID NO: 931 - DNA, 1428 bp, Artificial
  cDNA Sequence
gccagccctcggaaacggaagtgagcggcggggtcgactgacggtaacggggcagagaggctgttcgcagagctgcggaagatgttgtggtatttgagaagaacactgagtcaccattgccacagactctgatatcggtactgctggtaggccatccatccaaatctagaaagtttctattgaatgccagaggacttggatctgagctaaaggacagtattccagttactgaactttcagcaagtggaccttttgaaagtcatgatcttcttcggaaaggtttttcttgtgtgaaaaatgaacttttgcctagtcatccccttgaattatcagaaaaaaatttccagctcaaccaagataaaatgaatttttccacactgagaaacattcagggtctatttgctccgctaaaattacagatggaattcaaggcagtgcagcaggttcagcgtcttccatttctttcaagctcaaatctttcactggatgttttgaggggtaatgatgagactattggatttgaggatattcttaatgatccatcacaaagcgaagtcatgggagagccacacttgatggtggaatataaacttggtttactgtaatagtgtgctgttcatggaaaccgagggctgcatcttgtttatagtcatctttgtactgtaatttgatgtacacaacattaaaagtactgacacctgagaatttctgctcaagtagtatcagtgatcatttaaaatttggaggggtctttggtttacagccatgtgacaattaaaagcactaaagggagatcatgttaaagctcttaatttatattaaaacagtagcctttgtctttaaaaaagttgttgctcatgaatattataaaatgatctacaggtttcaattcaacctgtttctaggtttttttgtaaatttagttttgattaagcattataagcatttgagtctataaactttatagtagcatctttcagaataaacatttttaattgatttcagtggcaactctcaaattgattacaatatgagatatatcagtgtcgtccattaacactcataagaataatatttactgtgtcagtgctattttaggattatagttattgtttgattatttcaggttgaaaagtagaagttccaaggttttgattttggtctggtctttaagtgaaaaattaaagcaaccagtagatgtaggttaaacttttacttcatagacttaatatgtaattaatatattgccaagcaacactgttaaagaaaagtaaaactcattttttcttgttcttaatttatatattacaagatactgtaaggtattctttatgaagttgatatataaaaatttacatttttagaacattagtgaatggatcatcttttacaattaaaagtatattttgattatcagtttcttaggaa

SEQ ID NO: 932 - DNA, 2121 bp, Artificial
  cDNA Sequence
ggacagcgatgctcagctggctgcggccgagtcatcgcctagcgctggcagggccgctgaccgaccgacggaggcgccgattggccgattgtccactgcgcagaaggagcagctgctccgcgccccgccgcgccgcgctgaggccgaggtccgcagggccgcggggaagccgagggctgccggagaaccctgcaggtgtcactcgggacgcggaagtgcgcttgccgaggtttgctttacaatacgcttgagactccccgacaagcgtaatttggtcgagttcgacgggaaagtactctccccaccccagcgccggccgcgtagtccgaggttactgtccccggcgcgtcctctgttgccccagtccagaggctgcccttgaacccgggcgcgcacgagcgcagggcatccgaggcgacagcccctggcacggcccgacctgtacccagcctggcaggaagactgtaatcgtgggaatacagctacctacccaggcaatatgaagattttatttgtagaacctgccattttccttagtgcatttgctatgactttgaccggtccactgacaacgcaatatgtttatcggagaatatgggaagaaactggcaactacactttttcatctgatagcaatatttctgagtgtgaaaaaaacaaaagcagcccaatttttgcattccaggaggaagttcagaaaaaagtgtcacgttttaatctgcagatggacataagtggattaattcctggtctagtgtctacattcatacttttgtctattagtgatcactacggacgaaaattccctatgattttgtcttccgttggtgctcttgcaaccagcgtttggctctgtttgctttgctattttgcctttccattccagcttttgattgcatctaccttcattggtgcattttgtggcaattataccacattttggggagcttgctttgcctatatagttgatcagtgtaaagaacacaaacaaaaaacaattcgaatagctatcattgactttctacttggacttgttactggactaacaggactgtcatctggctattttattagagagctaggttttgagtggtcgtttctaattattgctgtgtctcttgctgttaatttgatctatattttattttttctcggagatccagtgaaagagtgttcatctcagaatgttactatgtcatgtagtgaaggcttcaaaaacctattttaccgaacttacatgctttttaagaatgcttctggtaagagacgatttttgctctgtttgttactttttacagtaatcacttatttttttgtggtaattggcattgccccaatttttatcctttatgaattggattcaccactctgctggaatgaagtttttataggttatggatcagctttgggtagtgcctcttttttgactagtttcctaggaatatggcttttttcttattgtatggaagatattcatatggccttcattgggatttttaccacgatgacaggaatggctatgaccgcgtttgccagtacaacactgatgatgtttttagccagggtgccgttccttttcactattgtgccattctctgttctacggtccatgttgtcaaaagtggttcgttcgactgaacaaggtaccctgtttgcttgtattgctttcttagaaacacttggaggagtcactgcagtttctacttttaatggaatttactcagccactgttgcttggtaccctggcttcactttcctgctgtctgctggtctgttactacttccagccatcagtctatgtgttgtcaagtgtaccagctggaatgagggaagctatgaacttcttatacaagaagaatccagtgaagatgcttcagacagagcctgttaagctgctattgatagtcggagcttatatactgtgacttctgaagactatacatgaattccacaatcagtgctttgttgatacaaaatccttaaaagggaggcactttaaagaatatgtatttttcacttttcttaatatgtttcatcggtgacaggcatgataatatttctatatgtaatgggtaattgggaaaaaatagatgataaataaaattgctctaaagaagttaa

SEQ ID NO: 933 - DNA, 2133 bp, Artificial
  cDNA Sequence
aggctcttgcaggaagcattgcttgttaggagccatcctgtgctttcaggtgtcacagattagcatggggttggagggtgggagacagcatcctgaagagcaggggtaggtgtggctttgcctggggctgtggcagagaggagagacatgcagttatcaaaagagtcagctgcactgtctttttagctttgccctgtggacactggaactcagctatttggagtttccaacatctctcacatcaagtccaaggagaacctttcccttagtttcctcagctgcagaatgggctgctgacttctcagggactttgagggaataactttcatttcattcacccagcagtgccctcatgtttactgttttcaatgagtaacagttgtctccattagtttgtgtttgttgttttgtaattctgccttttttttttcctctctctctatccctactccaaacaggtaccctgtttgcttgtattgctttcttagaaacacttggaggagtcactgcagtttctacttttaatggaatttactcagccactgttgcttggtaccctggcttcactttcctgctgtctgctggtctgttactacttccagccatcagtctatgtgttgtcaagtgtaccagctggaatgagggaagctatgaacttcttatacaagaagaatccagtgaagatgcttcagacaggtgactgtgatttaaacaaacaaaaaaaatctatgaatgcacatatcatataccatgacttctgaagactataaatgaattccacaatcagtgcttcactgagaaccaattttacctatcttttcttctaaactgaacagtcagagagacagctcctggctttagcttcttgtggtaccacgcactttgagcactttgtgcgtatcatgcaatatacttgcaatacacagaacaaatttcaaatacgcctcacttttagacttagaagagaaacattaaaacttaagggtgtaaggagggatcaagaaacttgataaggtcaaaagcaataatctctctgacatattccaggctcttacactgagaccaaagagaaatctttacctcagtttcttcatcagcagaatgggtttctggcctctctcagggataattttgaaggcataatgaaaattatgatgaatcactcattggtaggaaaataatgatataagtttcaaatatgtatgattttacctatacttggtaatgctttattttatagagcctgttaagctgctattgatagtcggagcttatatactgtgacttctgaagactatacatgaattccacaatcagtgctttgttgatacaaaatccttaaaagggaggcactttaaagaatatgtatttttcacttttcttaatatgtttcatcggtgacaggcatgataatatttctatatgtaatgggtaattgggaaaaaatagatgataaataaaattgctctaaagaagttaaaaaactgaatgaacagctaatactggtataaagtaactaatgtttggagccaacatttgttccttgtgtcagcaaaaggatattcacattccatgatccctggctgagaattctgcctctagtctttcttacccagctgttgtctatccttgttcaattataaatactgctaagggcatttttaaaatacgatcttgtactccttaaatttgaatccgtcaacacggtcactcataggaaaatgatcaaacaagcaagccagtcatgatttgactccttcccatctcatttcttactgccttacgctcatcctgaggtccaccttggtctctaaaaacaccatgtgttctcatgcctccatgtcttttcacacactgttccatttgctcttcctcccacattacattgaaactttcaagcctcagtcgaaacattgcttcttctggatagcagccttcttgacatccctcctcactccccagtccctacagggcttccatagctctttgtgtgcacttcgatcccagcattttccatcgacttgtaattgtttctgctacctgacaatcatcgccttgagtactgggacaacctttgattactcattatatcctcaataaatatttgttgaactaaactaaatgactacaaaa

SEQ ID NO: 934 - DNA, 1499 bp, Artificial
  cDNA Sequence
atgatgttgctgggcttgctgcaggcggggtgggtcggtgctgggccaggcgatggagaaggtgacaggaggcaacctcttgtccatgctgctgatcgcctgcaccttcaccctcagcctggtctacctgttccgtctggccgccggccacttggtccagctgcccgcaggggcgaaaagtcctccatacgttttctccccagttccattccctgggcatgccatagcatttgggaaaagtccagttgaatttctagaaatgcatatgagaagtatggacctgtatttagttttaccatggtaggcaagacatttacttaccttctggggagtgatgctgctgcgctgctttttaatagtaaaaatgaagacctgaatgcagaagatgtctacagtcacctgacgacacctgtgtttgggaagggagttgcatacgatgtgcctaatccagttttcttggagcagaagaaaatgttaaaaagtggccttaacaaagcccactttaaacagcatgtttaaaaagaaacaaaggagtactttcagagttggggagaaagtggagaaaaaaatgtgtttgaagctctttctgagctcataattttaacagctagccactgtttgcatggaaaggaaatcagaagtcaactcaatgaaaaggtagcacagctgtatgcagatttggatggaggtttcagccatgcagcctggctcttaccaggttggctgcctttgcctagtttcagatgcagggacagagctcattgggaaatcaaggatattttctataaggcaatccagaaacgcagacagtctcaagaaaaaattgatgacattctccaaactttactagatgctacatacaaggatgggcgtcctttgactgatgatgaagtagcagggatgcttattggattactcttggcagggcagcattcatcctcaactactagtgcttggatggacttctttttggccagagacaaaacacttcaagaaaaatgttatttagaacagaaaacagtctgtggagagaatctgcctcctttaacttatgaccaactcaaggatctaaatttacttgatcgctgtataaaagaaacattaagacttagacctcctataatgatcatgatgagaatggccagaactcctcagactgtggtagggtataccattcctccaggacatcaggtgtgtgtttctcccactgtcaatcaaagacctaaagactcatgggtagaacgcctggactttaatcctgattgctacttacaggataacccagcatcaggggaaaagtttgcctatgtgccatttggagctgggtgtcatcgttgaattggggaaaattttgcctatgttcaaattaagacaatttggtccactatgcttcgtttatatgaatttgatctcattgatggatattttcccatcgtgaattatacaactatgattcacacccctgaaaacccacttatccattacaaacgaagatcaaa

SEQ ID NO: 935 - DNA, 380 bp, Artificial
  cDNA Sequence
gccaggtgagcctcggaaaagtctggcccagtgaggcttaggagtggtggcctgttgggaaagcacctccaggcctctgggaccatctctctccgggtgcgggcatagtcccaatcgagaggagcggtggggaggggccgggtgtggaccccgagcttcccatggacgtagacaactttgcagcagtcctggacctgggagcggaggaccggcctggacggcggggaccggtgcttctgggctcggggcagcaccctggcccggggccagcccaggaaccagctcaggtagttgcccatgacagcagtgcaatggtcgggaccttctgttagaaattcggcttccagaagtttccgaagtctgccgccagggccaagtgt

SEQ ID NO: 936 - DNA, 4041 bp, Artificial
  cDNA Sequence
cggggtcagatacctgggggtggggaggggccacagaagacattgccagaccacgctgtcccggcagctttccctgcaactgacagtacctcagagggaaagagtgtgcgtcatcctaaaccatctacctcagaaagcaagcagagcactccctcagagacccaaacagtgggggcacatgtactgcaggtgtgcagtgagcacacatcacattccgcccatccagagcctgctctgaatttgactttggcatcgaaggaaatcccaagtaaactggaagcacaattaggtcagggaaagggagaggccaagctggatctgaaatatgttcctcccaggagagttgaacaggagggaaaggcagcccaggaagggtatctgggatgccacaaggaagagaatctgtcagccttggagggaagggatccatgtggggaagcacacccggaagccaccgatgcacttggccatctgctgaacagtgacctccaccaccttggggtgggaagaggcaactgtgaagagaagagaggagtcaacccaggggagcaggattctctccacaccacccccaaacagggctctgcttccttaggaggggctgataatcagcccactggcaaaatttcaccatgtgcaggtgagaagttgggtgaaaggacatccagcagcttttcaccaggtgacagtcatgtggcttttattcctaataatctgactgacagcaagcccttggatgtcattgaggaggaaaggcggttgggcagtgggaataaggacagtgttatggttttggtgttcaatccttctgttggagagaacaagacggaggtgcctgagcccctggaccctcaaagtggccgctcagaagcacgggaaagcaaagaggtcaccacatctgttgctgaaaacaggaaccttctagagaatgcagataagattgaaagcacctcagcaagagcagattcagttctcaatattccagcacccctccacccagagacaactgtgaacatgacctaccagcctacaacacccagtagcagttttcaggatgttagcgtgttcggtatggatgcggggtcccccttggtagttccaccccctactgatagtgcacgcttgttgaacacgtcccccaaagtgcctgacaagaacacttgccccagtgggatccccaagcctgtcttcacacattccaaggacacaccttcctcgcaggagggaatggagaactatcaggttgaaaaaacagaggagaggacagaaactaagcccatcattatgcccaagcccaagcatgtgaggcccaagatcatcacctacatcaggaggaatccccaggccctgggccaggtggacgcctcgctggttccagtggggcttccatatgccccgcccacatgtaccatgcctcttccccacgaagagaaggcagcaggtggtgacctgaagccatctgccaacctctatgagaaattcaagccagacctgcagaagccaagggtcttcagttccggattgatggtgtctggaatcaagcccccgggacatcctttcagtcaaatgagtgaaaagtttttgcaggaggttacagaccaccctggaaaagaagagttttgttctcctccctatgctcattatgaagtccctccaactttctatcggtcagccatgctccttaagccccagctaggattgggtgcaatgtcccgtttaccatctgcaaagagcaggattctgattgcaagtcagaggtcttcagcgagcgccatccacccaccaggacccataacaacagccaccagtctctacagttccgatccttcagatttaaagaaagcttccagttcaaatgctgcaaaatccaatctcccgaaatctggtctccgtcctcccggatactcacgtctcccggcagccaaactggcggcatttggctttgtccggagctccagcgtctcctcagtctccagcacccagtccggggacagtgcacagccagagcagggccggccagccacccgttcaacctttgggaatgaagaacagccagttctgaaggcatctctgccttctaaggacacacccaagggggccggccgggtggcccctccagcatcctccagtgtgacagcaccccgcaggagtttacttccagcgccaaaatccacttccacacccgctggaacaaagaaagatgctcagaaagatcaagatacgaataaacctgctgtttcatctcctaagagagtagcagcttcaaccaccaagcttcattcaccaggatacccaaagcagaggactgcggcagctcgaaatgggtttccgcccaagccggacccgcaggcccgtgaggctgagcggcagctggtgctgcggctgaaggagcggtgtgagcagcagaccagacagctgggcgttgcgcaaggggagctgaagagggccatctgcggctttgatgccctcgccgtggccacgcagcatttctttagaaagaatgaaagtgcccttgtgaaagaaaaagagctgtcaatcgaacttgcaaacatcagggatgaagttgccttccatacagcaaagtgcgagaaactacaaaaggagaaggaggagctggagaggcggttcgaggacgaggtgaagaggctgggctggcagcagcaggccgagctccaggagctggaggagcggctgcagctgcaattcgaggcggaaatggcgcgcctgcaggaggagcacggtgaccagctgctgagcatccggtgtcaacaccaggagcaggtggaagatctcaccgccagccatgatgctgctctcctagagatggaaaataaccacacagttgccatcacaatcctgcaggatgaccacgaccacaaagtccaagaattgatgtccactcatgagcttgaaaagaaagaattggaagaaaattttgaaaaactgcggctgtcattgcaggaccaggtggacacgctgaccttccagagccagtctctgcgggacagagcccgccgcttcgaagaggccttgaggaagaacacagaggagcagctggagattgcattggctccttatcagcacttggaagaagacatgaagagtctgaagcaggtattagaaatgaagaatcagcaaatacacgagcaagaaaagaagattcttgagctggaaaagctggcagaaaagaacattatcctagaagaaaagatccaggttctccaacagcagaacgaagacctcaaagcaaggattgaccaaaacacagttgtcaccagacagctgtcggaggaaaatgctaacctccaggaatatgttgagaaggaaacccaggagaagaagagattgagccgaaccaatgaagagctgctttggaagctccaaactggggacccgaccagtccgattaaactctcgcccacatctcccgtttaccgcggctcctcctcggggccctcctctccggccagagtcagcacaacacccagatgacgccactacacggcctgcgggagctccggcttctcgtcctccggtctccaccctgagggagcaccgacccggtgccgccggagctggccctgtgcgcatgctcagtagctgcgaatgcatcctaggcgcgtcctcctctgatccccgtgtaagactgccctggtgtcggcacttaggaatgtgtaaatggtaaagtctgatgtgcaaacgttttaccatagttagagccaaaagaaagacacttgcaattgttcttgagcaatgaactttcactgcagaatttcaggttagttacaaaaagctcagttttcaatatacattgaataatcattgtgtactgcaccgatatgtgtgtatatttagatatacgtatatacacatgctgcggttctgaatttcattttttataacatgaagtgctgacatattttagtgaaggtcagcagttttctaacttgtgcctaagaattattgggaaatgaaaatgcatttctatctagcttcccaggaatatttctacccaaaatagaaaaaggaaaaaaaaaaaga

SEQ ID NO: 937 - DNA, 1793 bp, Artificial
  cDNA Sequence
agatctgatcgctgctgccctgctctcctcctcctctcattcctctgcctcctggattcctgaagtttaggagaaataaggtagccaagggaaccacatggaagttgtgacagctcccagcggcgcgcccctttcgtgtgtgccggtacctcggcttaggagttgcccgctgacaccttgaatgaaggaggtccccttgccagccagcctgccgggatgggccattgctgctgcaagccttataactgccttcagtgcctggacaagacgaatgaaagtgcccttgtgaaagaaaaagagctgtcaatcgaacttgcaaacatcagggatgaagttgccttccatacagcaaagtgcgagaaactacaaaaggagaaggaggagctggagaggcggttcgaggacgaggtgaagaggctgggctggcagcagcaggccgagctccaggagctggaggagcggctgcagctgcaattcgaggcggaaatggcgcgcctgcaggaggagcacggtgaccagctgctgagcatccggtgtcaacaccaggagcaggtggaagatctcaccgccagccatgatgctgctctcctagagatggaaaataaccacacagttgccatcacaatcctgcaggatgaccacgaccacaaagtccaagaattgatgtccactcatgagcttgaaaagaaagaattggaagaaaattttgaaaaactgcggctgtcattgcaggaccaggtggacacgctgaccttccagagccagtctctgcgggacagagcccgccgcttcgaagaggccttgaggaagaacacagaggagcagctggagattgcattggctccttatcagcacttggaagaagacatgaagagtctgaagcaggtattagaaatgaagaatcagcaaatacacgagcaagaaaagaagattcttgagctggaaaagctggtgaaaaagaacattatcctagaagaaaagatccaggttctccaacagcagaacgaagacctcaaagcaaggattgaccaaaacacagttgtcaccagacagctgtcggaggaaaatgctaacctccaggaatatgttgagaaggaaacccaggagaagaagagattgagccgaaccaatgaagagctgctttggaagctccaaactggggacccgaccagtccgattaaactctcgcccacatctcccgtttaccgcggctcctcctcggggccctcctctccggccagagtcagcacaacacccagatgacgccactacacggcctgcgggagctccggcttctcgtcctccggtctccaccctgagggagcaccgacccggtgccgccggagctggccctgtgcgcatgctcagtagctgcgaatgcatcctaggcgcgtcctcctctgatccccgtgtaagactgccctggtgtcggcacttaggaatgtgtaaatggtaaagtctgatgtgcaaacgttttaccatagttagagccaaaagaaagacacttgcaattgttcttgagcaatgaactttcactgcagaatttcaggttagttacaaaaagctcagttttcaatatacattgaataatcattgtgtactgcaccgatatgtgtgtatatttagatatacgtatatacacatgctgcggttctgaatttcattttttataacatgaagtgctgacatattttagtgaaggtcagcagttttctaacttgtgcctaagaattattgggaaatgaaaatgcatttctatctagcttcccaggaatatttctacccaaaataga

SEQ ID NO: 938 - DNA, 646 bp, Artificial
  cDNA Sequence
agtatttccctccggagtgtagctcctgtgaaatgctccaagatgatctcggatgcaaattcagccatgcaagagtgatgaaatgcttgcattatttccaaagatgaattaagacaatgaggcagctcttcatttgtcaagatccagcacaaaggtgctcaagaaatgttgatatgaaaaaaaatcaaaccaacctggctaagggttctctacactggaaattacctgtggataagttatgctgtagccagggtgctggtaccatccaaacagataattcagaggagacaggggacaccaaaataataagattttcaaaggattctgtgaggcccccaaaacttgagaacctcttggattcatctctccactctggtttctacccccagaatctatcaagtggcctcactcctggattacctccagcacaagagaaagtgcatattctgtctgctctactgggccaggggagtagggaaagaacaggagacagtaaggataaaatgaaagcaacataaatgggcagcataaaatagaaaaagcagctattgcatctccctcatttcagattatttgtcagatatgcccttccccacacatgtgtgtatgcatgttccattacatcacagttctgtccatctgcccg

SEQ ID NO: 939 - DNA, 720 bp, Artificial
  cDNA Sequence
agtatttccctccggagtgtagctcctgtgaaatgctccaagatgatctcggatgcaaattcagccatgcaagagtgatgaaatgcttgcattatttccaaagatgaattaagacaatgaggcagctcttcatttgtcaaattttcaaaggattctgtgaggcccccaaaacttgagaacctcttggattcatctctccactctggtttctacccccagaatctatcaagtggcctcactcctggattacctccagcacaagagaaagtgcatattctgtctgctctactgggccaggggagtagggaaagaacaggagacagtaaggataaaatgaaagcaacataaatgggcagcataaaatagaaaaagcagctattgcatctccctcatttcagattatttgtcagatatgcccttccccacacatgtgtgtatgcatgttccattacatcacagttctgtccatctgcccgtcccactagaccatgaatccttggcaatcaagaccataactctcatagtacccaacacaataactgccctgtaatacattcccaataagtatttgctgaatttaattgaagcaaattaatagaagaagacatattgtgcatagttcctataattatatacaaactgaggcccagaactgaaccattagccatggtattggtatcactgtcaactcagactcccaggcaacagtgtaaatggaat

SEQ ID NO: 940 - DNA, 651 bp, Artificial
  cDNA Sequence
agtatttccctccggagtgtagctcctgtgaaatgctccaagatgatctcggatgcaaattcagccatgcaagagtgatgaaatgcttgcattatttccaaagatgaattaagacaatgaggcagctcttcatttgtcaagatccagcacaaaggtgctcaagaaatgttgatatgaaaaaaaatcaaaccaacctggctaagggttctctacactggaaattacctgtggataagttatgctgtagccagggtgctggtaccatccaaacagataattcagaggagacaggggacaccaaaataataagaaggacttgcaatcaaaacctgaagaggttttctctgacattgacttcagcagttcttcaccctaggaggtctacagaggggcttcaggaaaccagaaaccacatgcacaaagaagtatttttctgagaattgagcttatcagtttctgggttgttgttttttttccagattttcaaaggattctgtgaggcccccaaaacttgagaacctcttggattcatctctccactctggtttctacccccagaatctatcaagtggcctcactcctggattacctccagcacaagagaaagtgcatattctgtctgctctactgggccaggggagtagggaaaga

SEQ ID NO: 941 - DNA, 1210 bp, Artificial
  cDNA Sequence
ggctccctgcttctcctgttcgacagacagccacattttctcttgcattgccagccgcatccctgagacatcatggtgaaggtgaaggccagagtcgacagatttggtcatgttaggtgtctggtcaccagggctgcttttaactctgctaaagtagatattgtggccatcagtgaccccttcattgacctcaactacatggtctacatgttccagtatggttctacccatggcaaattccatggcactgtcaaggctgagaacaggaagcttgtcatcactggaaatctcatcaccatcttccaggagcgagatccctccaaaatcaaatggggtgatgctggcactgagtacagtgtggagtccaccagcatcttcaccatcatggagaagtctggggctcacttgcagggaggagccaaaagggtcatcctttctgccccctctgccaacaccctgatgttcgtgatgggcgtgacccatgagaattatgacagcagcctcaagatcatcagcaatgcctcctgcaccatgaattgcttagcacccctggccaaagtcatccgtgacaactttggtatcatggaaggactcatgaccacagtccatgctgtccctgccacccagaagactgtggatggaccatccaggagactgtggtgtgatagccatggggctctccagaacatcatccctgcccctagtgacgctgccaaggctgtggccaaggtcatccctgagctgaatgggaagctcactggcatggccttctgtgtccccactgccaacttgtcagttgtggatctgacctgctgtcttgaaaaacctgccaaatatgatgacatcaagaaggtggtaaagcaggtgtcagagggccccctcaagggcatcctgggctacactgagtaccagcttgtctcctctgacttcaacagcgacacccactcttccaccttcgacgctggggctagcattgccctcaacgaccactttttcaagctcatttcctggtatgacaatgaatttggctacagcaacagggtgatggacctcatggcccacatgtcctccaaggagtaagacccccagaccaccagccccagtgagagcacaagaggaagagagaggccttcactgctgggggacacttagtccccctccacactgagaatcccccctcctcagagtttccatgcagatctcctgaaga

SEQ ID NO: 942 - DNA, 733 bp, Artificial
  cDNA Sequence
gtggcagccctcggaatcacggggaggtcactgccacaacctggctctttgtaggggggtccaactccaggcaggggatcactgcctgaggtacctctttagagtcctgagtgtggctcctggaccatccccttcccactgcttgtccacgcgcttgcaccgctatgagcgatgacggcaaaggaaaagaaaagcgtcctccctacgaggtggtctgtttcccagtggcagggggagctacggtacacaagcacaggttcacatttatgaagcagccaataagaattcccagcctgagaggaccttggaaccagaaggaattggaggagatttaaacaagctgacccaaggaaagcacaagatctttctatgcattgaagatcaccaaatcaaagataaaagtgctcgaccattatggcctatggcaaactcgggctggctgaagcatccttctcttccatttagaaccctggtgaggccccttagaccaccactgggctgtcctcctccctcctcagagacagagttctgggctgggccatggaggtgtctgtcaacacggcagtagtcctcgttctatggaaaaccagctgttccctgtgacacgactccattcccgcagctgcctgctattcagctgggctgacggacagcagagcacagggttggaagaccaccctctcagacaggtttaccaagaagctcactgagaggcgacacaaacggccaagaa

SEQ ID NO: 943 - DNA, 547 bp, Artificial
  cDNA Sequence
gatgtggccagtggtgtggatgtgaatattcatccctgtggaggaaaatagtggggtctctgagatttgattctgaaaccttccttgtatccctcctgagacatctttgctgcaagatcgaggctgtcctctggtgagaaggtggtgaggcttcccgtcatattccagctctgaacagcaacatggggtgcaaagtcctgctcaacattgggcagcagatgctgcggcggaaggtggtggactgtagccgggaggagacgcggctgtctcgctgcctgaacacttttgatctggtggccctcggggtgggcagcacactgggtgctggtgtctacgtcctggctggagctgtggcccgtgagaatgcaggccctgccattgtcatctccttcctgatcgctgcgctggcctcagtgctggctggcctgtgctatggcgagtttggtgctcgggtccccaagacgggctcagcttacctctacagctatgtcaccgttggagagctctgggccttcatcaccggctggaacttaatcctctcctacat

SEQ ID NO: 944 - DNA, 7243 bp, Artificial
  cDNA Sequence
gcggccgcgggctcccgctaaccgcagcctccactcctctccccgcgcgccgcgcccccgccccgccccgccccgcccggtctcgccggccgagcgtccgttggtccttgagcgcgtccgacagtctgtctgttcgcgatcctgccggagccccgccgccgccggcttggattctgaaaccttccttgtatccctcctgagacatctttgctgcaagatcgaggctgtcctctggtgagaaggtggtgaggcttcccgtcatattccagctctgaacagcaacatggggtgcaaagtcctgctcaacattgggcagcagatgctgcggcggaaggtggtggactgtagccgggaggagacgcggctgtctcgctgcctgaacacttttgatctggtggccctcggggtgggcagcacactgggtgctggtgtctacgtcctggctggagctgtggcccgtgagaatgcaggccctgccattgtcatctccttcctgatcgctgcgctggcctcagtgctggctggcctgtgctatggcgagtttggtgctcgggtccccaagacgggctcagcttacctctacagctatgtcaccgttggagagctctgggccttcatcaccggctggaacttaatcctctcctacatcatcggtacttcaagcgtagcgagggcctggagcgccaccttcgacgagctgataggcagacccatcggggagttctcacggacacacatgactctgaacgcccccggcgtgctggctgaaaaccccgacatattcgcagtgatcataattctcatcttgacaggacttttaactcttggtgtgaaagagtcggccatggtcaacaaaatattcacttgtattaacgtcctggtcctgggcttcataatggtgtcaggatttgtgaaaggatcggttaaaaactggcagctcacggaggaggattttgggaacacatcaggccgtctctgtttgaacaatgacacaaaagaagggaagcccggtgttggtggattcatgcccttcgggttctctggtgtcctgtcgggggcagcgacttgcttctatgccttcgtgggctttgactgcatcgccaccacaggtgaagaggtgaagaacccacagaaggccatccccgtggggatcgtggcgtccctcttgatctgcttcatcgcctactttggggtgtcggctgccctcacgctcatgatgccctacttctgcctggacaataacagccccctgcccgacgcctttaagcacgtgggctgggaaggtgccaagtacgcagtggccgtgggctccctctgcgctctttccgccagtcttctaggttccatgtttcccatgcctcgggttatctatgccatggctgaggatggactgctatttaaattcttagccaacgtcaatgataggaccaaaacaccaataatcgccacattagcctcgggtgccgttgctgctgtgatggccttcctctttgacctgaaggacttggtggacctcatgtccattggcactctcctggcttactcgttggtggctgcctgtgtgttggtcttacggtaccagccagagcagcctaacctggtataccagatggccagtacttccgacgagttagatccagcagaccaaaatgaattggcaagcaccaatgattcccagctgggctttttaccagaggcagagatgttctctttgaaaaccatactctcacccaaaaacatggagccttccaaaatctctgggctaattgtgaacatttcaaccagcctcatagctgttctcatcatcaccttctgcattgtgaccgtgcttggaagggaggctctcaccaaaggggcgctgtgggcagtctttctgctcgcagggtctgccctcctctgtgccgtggtcacgggcgtcatctggaggcagcccgagagcaagaccaagctctcatttaaggttcccttcctgccagtgctccccatcctgagcatcttcgtgaacgtctatctcatgatgcagctggaccagggcacctgggtccggtttgctgtgtggatgctgataggcttcatcatctactttggctatggcctgtggcacagcgaggaggcgtccctggatgccgaccaagcaaggactcctgacggcaacttggaccagtgcaagtgacgcacagccccgccccccggaggtggcagcagccccgagggacgcccccagaggaccgggaggcaccccaccctccccaccagtgcaacagaaaccacctgcgtccacaccctcactgcagccaaaggtgcaattacttgacctgcagccccagcccaccctcggctctgcagccggttctccgggccctggtcacctccagacagctgcctggccggggccactaggctgcggctggccactgtgtctcctcacttctctgaacaaagcagttcctcccctaccagctcagccccgagctgccgcagcctcaggcagaacggaggtcaccttctctccttatcttgggaaccaggccttcctcccggggactgttctgggattgaaattgtgcatactccaaactttcgcagccatcttcccgctcagccccagacacccagcaatcaagccagatgagtaccacaaaacagtgtgtccccagcagctccccaccccagagccaaatgacagtagtgcacttaaaaaggaaaatcaggcctgttgtccttctccggttgcattcagatgggtcattagggccggaccctgcctgccccttggcttctcagggctttgctctgacaccatgacagctgcccggggctgagggcagctggctccactcaaatgaggaagaagggatcactcccattagggcctgctttgcttatgcatgtgtgtgcacatgcatgtaaaccagggaccttcagctcacggcctccaggcctgggccagttcttgctgctcctgccgtctcccccgactggctgtgtcctgagtaactggaacatgagacagtatctgcaggactggccccatggtggccgagtcagaagtctgtttcctgtgagtcgccaccgttcactcagtcttgccctcccatgctttggagccagtctggtggctcctgtaaggttctcaaggctggtggcagctcagtctggggtcaggacatgtcggggtcatgcgtttctggccctgacataagctgtctggcctctctgtgacatgatgaaattgaaatcaatccacagtccatgaaattgtgacactccaccagattaagttagggcataacattaacttggaaatggccatgtcatcacccctgcggctgtcctatagctgagatgcgtgggtcgcaggggaggtgatttctaggcatattgctgtcccttttgtgtatctgtcatccggatgcttcggaccccacgcctctgcaagtgggagagacccgagcatcctccccacccccatagctccagtgcacgccacccccgtcttgcctgggtcggggcctgcggccagcaccatttcacacacactccttgtagatgggagccagaggaaacctgaacgtgggtggagcgttccactgagtctacttcaggagacagaaggcccatgctgatgggggaggaggagggatgtgggcattttggacaccaggggaaatggaaatgctgctttcaaaacttagtttcctttccatttcttcctagtctggcctttgacacaaatctggtagaaagaagcctgataaattgagggcacttgtaccctccctgtgcccccagaaggttcttggagagaagtgcaagaatttgtgaacacggcggtggagggcgggtggatggccatgggctgagcctccgtatcaggcctgctcaccttgctgggagctttattctgatctcattttgaatgttccagagggagcatcataagagcccagagctccgatttccaaagagtgatattgacatttatggagattggtgttgtaacatattttgataaatactaacttattttgttggggttttggttgtctcttgtcttaggacctggtagttatttgcttgatttttttttccgttattttctacataggcaaagagaattcgagggatagacagtctccaagaaaagtgaagtggtgggagagaattgcttttttcttttttttcttttctctagtttttctttctggctgagatttccgtgcaagacagcacccaatagactatttagagttgacatttgacattttaatgggcgccatggctcattttgtagattgagaaggtgcgtctcccctgctccaagtctcatcatgacagcgtgctgacagctgggagtctgtggccttcctcacgcagaggccttaaagctggacacagaagcacgcctaggctgggcagggatgggacccatgccccctccttagaggacgggcttcctggttaggaaaggacacgtgggggtgccttgcataatagttcactggtcaccgtgcttttatgagtagtgtttttgtgcacttgccaggggttttctctctgtgtgagaggggagtgatttaagcaatggtgtctggagtaagccttacaattttaatagactttttcttatcatatccctcatttctttccctgaaataaaaatacacacaagcaaaaaaaaaatgatagtttcacatctcttagttcccttgcccaaacaagaatattcttagttccactggccaggattttcctacatagtcagaacttacacattactagaggcacacccaccaaggagtattgtgtctacttttatctgtgcaccagccacaaatacccacattggaaagacccatttgtgatgggtaaacatcccttcctgtctcccacaacccctgtgactgccctgcatgtgttcatgacctccgaaggcccaaattcatgaagcagcaaacccagcagatctccacccccctgcctcaggacctctgctgaagagggggatgaagtgggtctccagggaggcagtgggggccttgttggcagctggctcgggagccggcttacaggagggcagctctgcagttgggaggggcaccgtccggaggagaccaggcctctacacaccccccactctacttatcatccctgctcacacacccttgtccaaggctttatgcatcggatttatttttccaaatcaagaggacagtgatagatgcattttccccaggctgtctcagaaaggtcgctaaatgtatactgttgtcagaattgctgagatctccccccacttttggtttttgcagcagtaaaaactctttccactgtgacttattttctctctcaggcagccagccacctggtcccttgtgctgactctagcacagtggccaggatccaatacgagtccaggggtgaccgcaggatggtgggggcagcgggcttctccacctaccccagccaccaaggccctgacgcactgcctcctgcaccttcagcacatccctgtgcacagctggaagggtgcatggcccgctcacctttgttcagatgggtggaaacgctgatgataccagctcctccctgccgtgcccctgccacggagcaggcattgtgaactggctggtgtttgcagtcccacgtggcatggcctccagcccaacccacagtggagactggagacagggcaatgagtctggtggggggcacgtggacatgccccataggggccccacccagacttaacaggcaaggtcctgggcattgcgcgacgcaggactcaatgctaaagcaagcctgcctggctctgtgccagggcccctcttctgattcacacatcccatttttacacagacccttccttcttaataaaggctgacagttctgttggcagccaagaacccacaccatgaagacagggagtgaggggcctttgtgcccaactccagcacagctgcgttctggggtgtgtgagaggcatgttcgtgtctgtgcgctggtggtctcgtgagacagttccgaggacggggaaattgcagggtggtgggggcgtgaggcttatatgtggaactgatgcagagttcgcctgcagacggatctggatatacactatgtataattgttacgtgtaatttaaaatatatctgtttgccatcgtcatgagaagattatatgtaaggctctgaagggagagggagatgtacattctgccaggctcctggggaccttatccgagtcatgaaattgattactgttgatccagtggtgcaagaagctacactccatgtgtcatcacgcttatgactcctaatgtatttttaaggcaaaaaatgtcagccgactccatcttcacccctcgattcctcgagtccagcctttctgtgccagtgcttcactgagccacaacgctctcgccatcgggacccggctgggcctggagtctcggggcacagttgccatggagccctcctgggtcattctacaaatgtgctgagtgccagctgaaaaccccacaggagatggagtaccttggccaagcttaaagagaagattttctcagggtatttattagtgtgtccagcagggtcaggaagcaggatggaaagatgcactcagactgttaatttattaacaaggcaaatgattttgtgtttcttgatgacagactattaagtttgggacttattttcccatttgagaagttataatatatatttaagatgataagtttcctgcttaagttgtgcctttcagcttcaatgagtttaaggagcactaagggtaatgataccaatgagggttggtttattatcaaacctgaatagctgtggtttctccagtaaatattttcttctactgaacatggagccattattaagagttgtgtgttttttattatgtacatttgtatatttttttgcttgtttgatgttctatttttctaatagttttcttttagtttcttaaagttgtgatactagatttagattctgatgctaactgcaaatcaggttggtctctgctgggtctctcctgcttttattttactttaaggacaagtgtagttgtcgtccaccacctttcaaaaaatgtgaaactgccctgcctcccctttttgctgacaacactgtgtacattgaccacttcctaccatactttatgttgtaaaatcaaactcttttgtggtacattatctcatgcttctgcaaattcgaataaattctatggcttccatgtg

SEQ ID NO: 945 - DNA, 726 bp, Artificial
  cDNA Sequence
acctcatgtccattggcactctcctggcttactcgttggtggctgcctgtgtgttggtcttacggtaccagccagagcagcctaacctggtataccagatggccagtacttccgacgagttagatccagcagaccaaaatgaattggcaagcaccaatgattcccagctgggctttttaccagaggcagagatgttctctttgaaaaccatactctcacccaaaaacatggagccttccaaaatctctgggctaattgtgaacatttcaaccagcctcatagctgttctcatcatcaccttctgcattgtgaccgtgcttggaagggaggctctcaccaaaggggcgctgtgggcagtctttctgctcgcagggtctgccctcctctgtgccgtggtcacgggcgtcatctggaggcagcccgagagcaagaccaagctctcatttaaggtgagcagctcggcctagggaaggaaccctggtacacagaccctggccctcctgatgcctggccagccctgcgtgggctcagccgggcctgggtgctcccgaggaaggtttttgctagccagcttcaggtaagatggggcaggggtcctgaaggcacagagaggaccagaccctggaaggaggcagcagcccttctcccctggacgtttccctgagtagtcaagggcaggctgacaccttcctgcatgacacaggccaagagagacctcgccagtcc

SEQ ID NO: 946 - DNA, 4384 bp, Artificial
  cDNA Sequence
ggagggaggacgaggacgggggcggcggctgctgcgagggggggcccgtgctctccccgtttcccttagtcgcactcaggcagccgccgccgccgccgctgccgccatgttggtttgagaggcgatgacaggaggcggccgcggcgtgtgggactgaaaagtgaaggaggaggaggagaaacaaagctctgagaggaaaccattcccgggctgaggagaaggaggacccggcctcttccggggaccagccgaagtcggcgtcgcccggagctcgcgaggccggggaggggaggggaagggaaggcggagaccggggaggcggcggcggggaaggcggaggcagaagaggagtggcgaggagccggagacgatgcgccccgaccccagctgctgtccggaggcgcccgcggcctgagcccagaggggctgtggagtgtcccggccggccccgagcacccccgcgctgtcggtcccccgctccggtctttcgctttggcttccaactagttaaatgcccttgagcgcgggtttccgcggcccggctcttcgcccccgcggcgcgagttgagccgtttccccgcgctgtccgcgcgggcgctccgacagcggctctgcagggtccgcggccagcgtccggccaccgctcggccgccactcaaggctcacgcgtcgatgtgtagctacatagttatctgtgtacatccacgctggggcatttttctcctgcttaatgaggacttgactcgggagcaagtgtgaatcattgccggggctgggaaaggaggaaggcgcatttaaccccctcccacccctctccatgtccgtgtgtcactcggctcggtccacctggcgcggccggtcctggggctgctgctgctgttgacgacgacgacgacgacgggggctgcctctgctgtcccgggagtttcctcctgctccggccacacagctcctggggattgttcctcttcgaaccagaacctcggcctgaccggcactttggctccaaaataactttatttttgggggagaaagcacatcacgaaccagtcaaaatcgtggtttatttctgtaacgtgaagacttctgctcttttttctttgtttgtttttttcgtaaacatctgggtgtatatcaaacggcaagatgtccagtaatgtcccggcggatatgataaatttgcgcctcattttggtaagcggaaaaacaaaagagttcctgttttctcctaacgattctgcttctgacattgcaaagcatgtatatgacaattggccaatggactgggaagaagagcaggtcagcagtccaaatattctacgacttatttatcaaggacgatttctacatggaaatgtcacattaggagcattaaaacttccttttggcaaaacaacagtgatgcatttggtggccagagagacattaccagagccaaactctcaaggtcagaggaatcgtgagaagactggagagagtaattgttgtgtaatcctgtaaacactgtctgcctagtgtgatgtgatatagtctttgtctttcatgctgctgggacagaaaagacccgacattgcttcagaaaccgttcagaacagtctgcctgtaaacacatggaactgaattaccacatgaacactgtcatcttttctcatgaaagtaaaaagaaccaagaacatttttcactctgattttttatttcttgtattttttgttgagctgttttaacacatattggtttttgaatgcagtcaatctccaggggaaaagttaacaagttatctttcgtagcagaaaccattttgctgccacaaaattttcatcatcagaactaataaatcaagtgttccaaatacaatttgcattaaaaagattggcattattttcctcatcagcagaatttataacagtgtgtggtatctagaaatacttatatatacaattccacactggaagacactcagcaattaatgaagttaattactgggccaacttgagaggaaaaaatggaaaagaaactaaaatgttgggtgaattctaccaaagtcagccgtggtggctgcactggcacagaatactaaactgagtgtgactattttcactgcaacaaatgaaaaaacaaaatgtgcctgtttaaagcactcagtagagggctgatgaaactaattttttttcctttaagacatgcactcttgagtcctacagtaactgagtgtttgtttagacagcacaagaaggggtgagagtgcgtctcctagccttaatgtgggagggtagtttcagtcactcatcggctttcattattgtgcagaaatattagaaaacctcattgatcaattttatgtatttgaatatcagcaaattgaaattttccataattatcattaatttgtaaccacatccagtgtcatgcttactccttagagttcagatgaattcttaaaattaaaaaaaaactccatagtactaattttgtttctttatatagtttgcgtttgatattagtgcttgcaattgtattaaagtcaaaagctgatttttatggcatacacaagaatgccactttttcttttatttcataccaataatttaaagattgatatgctaaaaacaatttgcacagcactaaagcatgagctactttcatctaaacctgtaaaaatatgaaagatttttatattttttcactgggaagaaattcttcctggatgaaattacaaatatgtgtagaatatatttaataaaagacttataaaatacctaactacaggacttaaaatatagattggcgcgtagtatacagaacaatattccatataaataagtttagcctttataaaaatgaagttgcaggctgacattacattctgtactaagtgtcaacagcccttacaaacattaaatgtaaatggtttcaaatggtcagcgttgtttaaatgtaatcatgttattttattcattgttaatgctttgatgaaaaggctttatatgcagtagatctacgaaaatattgttcatactgatcagaattaaatttgtatagagcagagttttaaaatgaatgtaaatagcactaaacgttttctttctgcaacctgtacttacagattcttcctgtaaactaaataaaaaaaaaatgatagtgcattttggtggtaattttaaaggtcttgattaggtcaataattgtttaagcaccgtctcattcatgttttctactttcatttcttaagcttttaaaattcatttaattaatattctgttgttgttttggggagtattcccaatgtatctttgatatttaacctggttaatttgtggacagtcacaacaatggatagaattatgtagtctccgttatcactaaaatgttatcttcaagagatgttaaatatttatatgctttgttgactagctgaaatgtgaattctgttagtgttgactaaagaatctggtagttgcttaattgggcaattaaacaatttatggctctattttgtaaaacaaactactggtaattatttttaatacctattttcattctgattactctttttttaagttaaagactatcagttaattaagattgagtttttatgatggttaaaaataattctctattggtttttcaatatatttttctgtgtgttctcagattatatatttccctcaatttagagtttgctaagtgaaataaactggttcactagtagagaaagaattacgtcgcttaatacctaatatcatagttgtacaatatgaaaaaaaagaataaaaagtagcagtaaaattatatactgaaaacaccaaaaatttagatgccttaatagtatatacgtgaaatactcagctgtccctttaaaaataattccttggactgcctggtggttaaaatacgattcctcatatccaaggctacttttgaagatccctctgccaaaaatatagctcacttatctaaaggtgagagctgcatagatccagtaatgtacataaagcctgaatgatgagcctatgtccctgcctaacgctggtgtctcactcatctcttttacctaaattgtcctgaactttgttaagtgttctggacaaggccaagcttttctttattaaaacctcagcatgtctccctgatctgaactatttgctttctcttcaagataagttgtattttaccatggaaaaatacagtatctaacattaccattcacgttaaatgaagtttcctcataacatttatctttagttttatgaagtcatcgtgaccaatgttacagtaatttctgttagctgattgtggtaaacaatgtttaatgtgaaaagaaattaaaactttcttcatctgttgtagaatatttctcttctttaaaatggcttctattcataa

SEQ ID NO: 947 - DNA, 448 bp, Artificial
  cDNA Sequence
gcagagaacaaagattggtggcttcctcctgagcacactgggatgtggcattacatcggggctgctgagtgcccttaccttcagctgcccagatgcagaggcagttccacaaggtactggcacaagaagagtcgtggaagactgacctggccatggcttctcatgtcccagctcaggacctgccacatcaattctccctttcctctggccgtcacgtgtggagtgaaattctcagaagcggctgtccctgtgcacctctctggctgtgtccagaaaatgaacatctgtttacagcttcaattttctaatgattagaatgccacaaacaagaaaacccagaggaaagctgttgatgctgaaatgtttccttcctctacatattccatgatgcgtcctgtggggttatgcaaacagtaatatctcattaaatattctggtctcttgggaa

SEQ ID NO: 948 - DNA, 575 bp, Artificial
  cDNA Sequence
tcttctctcttcctccttcggctcctgttggccggtgccttcctgaacctgaagaatatctttgctctttccaactcccacattcaaaacagagtcttacaactcagccacattttctgctgagccagccagtgggaacaaacaccaagagacctggagccacagaaacactcatacatgagccaagaagaaaaaaattgtgtggcagctgcccagctctgctctgcaaccatgcgcttcctgtttactgactaagacctgatgaacctgtatctactactgcccagggcacattaaagtcaccacaacccctgctagatgactattttgatatggaggggaaagaattgctcccctcagcccatggggataaatttaggaccatcactggccagccttatgtccttgcctgaggagttggaactgggaaccaaaagggaaagttcacctgacttggaaacgtgcacacaagcagtctctcaacactgtgacgtttatagtgaaggaagcatcaccgaagagagttgcgtttcattcggatggcctggccataataaactgtcctgaatggaaca

SEQ ID NO: 949 - DNA, 211 bp, Artificial
  cDNA Sequence
atgacagtgctgggcgaggtggttgaagcagggttgcagcacaggtgtgtcgcttcctggagctgttctgggatggatgtgtggagaagccagggaaatgcctagactctcacactgaaaattgcctctctagctctgtggaccgcttcattgacaccactcttaccatcccagtcggcttgcccagattgtacagaaaggagggcagtag

SEQ ID NO: 950 - DNA, 463 bp, Artificial
  cDNA Sequence
aggagtcccctgctcaacagcgtgctcctggtgatactgccacccgtaacgggtactggctttgctaacatcctgacgagacgtcggggagagacgggaagtggcagagatgggatctcactgtgttgcccacgctggtttcaaactcctagcctcaagcaatcctcctgcctcagcctcctgaagccctgggattacaagcataagccaccgcccccggccagatcacatgattctttacatctctgctgacagatttcatcactggtgctgagtgcagggagtcccgcagccacttacacgtgttgcattgccgggcaatacaggcctgtgtgacttgctattctatggctgggcttctgcctgcagatgcctggtttctccactgccaaggctcatggtctgacacatccaggaaattcaacagtgaggatgcaatgacaatgagtcgtgcatgagggtt

SEQ ID NO: 951 - DNA, 374 bp, Artificial
  cDNA Sequence
cacccaggcaagcttgcgtgactaacggaggagcgtctccccttagattcttcccgcccggagccggggacagcagaaaaccacctgacctccagattctctctcgtccagtggagattctcctgcccgaaggcaggcgctctccaaggtccctctccccagaagagccacgatcccaggaagccggcttgtgcagaggaaagaaccgcacctcgttgtcagaacaaccccagctctgccacctacaccttgtgtgaccttgggcaagtcagagaaacttctcagatgcacaatctcgtcacgctcctagtttccaagcccacacacctgagggtcaatgtcccttattgcacccccaccccataccgactcca

SEQ ID NO: 952 - DNA, 2123 bp, Artificial
  cDNA Sequence
gccttttcacgcacgtcgcgagctaacggactcggcggcggcggcggcggcggcctgcgccccacccgcaccccatctggaccgcatcgctgaatgtgcccggacctgcgccttctgggtctctgaaagaagatgaatttggctgagatttgtgataatgcaaagaaaggaagagaatatgcccttcttggaaattacgactcatcaatggtatattaccagggggtgatgcagcagattcagagacattgccagtcagtcagagatccagctatcaaaggcaaatggcaacaggttcggcaggaattattggaggaatatgaacaagttaaaagtattgtcagcactttagaaagttttaaaattgacaagcctccagatttccctgtgtcctgtcaagatgaaccatttagagatcctgctgtttggccaccccctgttcctgcagaacacagagctccacctcagatcaggcgtcccaatcgagaagtaagacctctgaggaaagaaatggcaggagtaggagcccggggacctgtaggccgagcacatcctatatcaaagagtgaaaagccttctacaagtagggacaaggactatagagcaagagggagagatgacaaggcaagatgctgtctttctggaaggaagaatatgcaagatggtgcaagtgatggtgaaatgccaaaatttgatggtgctggttatgataaggatctggtggaagcccttgaaagagacattgtatccaggaatcctagcattcattgggatgacatagcagatctggaagaagctaagaagttgctaagggaagctgttgttcttccaatgtggatgcctgactttttcaaagggattagaaggccatggaagggtgtactgatggttggacccccaggcactggtaaaactatgctagctaaagctgttgccactgaatgtggtacaacattcttcaacgtttcgtcttctacactgacatctaaatacagaggtgaatctgagaagttagttcgtctgttgtttgagatggctagattttatgcccctaccacgatcttcattgatgagatagattctatctgcagtcgaagaggaacctctgatgaacatgaggcaagtcgcagggtcaagtctgaactgctcattcagatggatggagttggaggagctttagaaaatgatgatccttccaaaatggttatggtattggctgctactaatttcccgtgggacattgatgaagctttgcgaagaaggttagaaaaaaggatatatatacctctcccaacagcaaaaggaagagctgagcttctgaagatcaaccttcgtgaggtcgaattagatcctgatattcaactggaagatatagccgagaagattgagggctattctggtgctgacatcactaatgtttgcagggatgcctctttaatggcaatgagacggcgtatcaatggcttaagtccagaagaaatccgtgcactttctaaagaggaacttcagatgcctgttaccaaaggagactttgaattggccctaaagaaaattgctaagtctgtctctgctgcagacttggagaagtatgaaaaatggatggttgaatttggatctgcttgaatttctgtcagctctttaatttctggtatttttgttgataaaatacgaagaaattcctgcaatttttaaaaaacaagtttggaatttttttcagtggagtggttttcgcttaaaggaaaaaaaaatctaaaactgcgaagaatactaaatgtagttgagaaataattgatggcgagagtttgctagtctccctccccggctttgtgctggtattccacgtattcctgcattaatattgcacacccaaaccagtctatcagggaggctgaagcaagggcgcagtgtgatattttaggaatacagaagatttagaaatacccctatttctcatttgcagtttttttttccaattctgtgctctgtcaacatgagggacctatctatgtatgttgacttttaacatcaaaattggatttgtgtcaaacattcattgttaagagaagaatgacagtatattttggaggaaataatgaatttactaattaaacctttagaattta

SEQ ID NO: 953 - DNA, 589 bp, Artificial
  cDNA Sequence
gcttgttcagtcatggcctcaggtaatgcgtgcatgggaaagcctgcccctaacttcaaggccacatccatggtggatggcgccttcaaagaggtgaagctgtcagactacaaagggaagtacgtggtcctctttttctaccctctggacttcacttttgtgtgccccacggagatcactgcagtcagcagccatgccgaggacttccgcaagctgggctgcgaagtgctgggcatcttggtggactctcagttcacccacctggcttggattaacatcccccggaaggagggaggcttgggccccctgaacatccccctgcttgctaatgtggcaatctgaggattacggtgagctgaaaacagatgagtgcattgcctactggggcctctttatcattgatggcaagggtgtcctttgccagatcactgttaatgatttgcctgtgggacgctcattggatgaggctctgcagctggtccagaccatccagtacacggacgagcacagggaagtttgtcctgctggctggaagcttggcagtgacacaattaagctcaacgtggatgacggcgaggaatatttctcc

SEQ ID NO: 954 - DNA, 423 bp, Artificial
  cDNA Sequence
accagcttaaccacagcacacactgcaactcattcatacgagaaacacacgaaatgtaggctgtgttgagaaataaatagcagaattgtaattaggggccagaggaaaagggtgtgaagaccatgtcaagatttatgcctgtgagatgggttgcagaattgacctgagcagaccaggcttccgagggtcaaaaaagcgtctgaaggagagacactgagtgcattctgggttcacattcccctcctctactgcattcctgaattttctgcctcacagcggcatctgaagcagtggctgtatgtgtccttaaccacccttcaagtccacaacatgtcatattacctcattttggctccctgggactattttggaggacctgaattagtcatgtggggtacttgattaaaaatcacttgaacagcc

SEQ ID NO: 955 - DNA, 1056 bp, Artificial
  cDNA Sequence
ctacagagtgggtctaggtccaggtacagtctcagaaccacactgcaaaactggcttagtcaggtagctgctgtatctgctgcttccactgtgaactcaaaaaccacattgcctgtgctgcaggccggaaagctgctgaaccaggaagctgtgctgatgctgctgactgcccctgaggttagagattgactagacatagtgccactgtcatccctgctggagaaggtccgaagcacctccacctctgtgcttccagaggggcactgtggtggccacttaaaatgctcaggctataccatgcactagagcatctacctgggcaagggatatgctgtatgacactctcctgatgctgggcatggctgtgagccaaagcacccaggcagccctgccatcagaagggtaaaccacggacacctgatgccttcctgaaggaagagcactacgcctgccaaaccatcaagcgttgatgctccagcgccttctacccgtggttctccagcctcagcagaagagagagaaattgatgaccctgtcgttgtagcatccccatcacccagcaattaattttagttcaatgcttcaaacgctcttcaggcgcagtgtgcgttcagctgtgtcagctaatgcaaatgggggatctcagaagtcttaatgaagtaactatccctgaacactgggatcaatactcagcatccagctgtcaaatcaacaccaagccgcctcctggagcagattgttaagctgatgcgagtctgggctctgcctcaccacttgtctcagagacagagtcttgctctgtcacctaggctggagtgcagtggtgccatcacagctcactgcagcctcgacctccccgtgctcaagtgatcctcacacctcagcctcccgagtagccgcgatcacaagttaaacaaacacagttctttacatcaatgcttccgtccctggccatctggtctcctgtcccctccagacccaaaaccatgggctgggctgcagcaaaatgagggtgtactcagtgcactgaggcccatgtaccatgagagatggtga

SEQ ID NO: 956 - DNA, 419 bp, Artificial
  cDNA Sequence
agtccacaaaagagaattttctgatgtgagaatggagggtgttgcctgcaactaccccagatccctgcggtggcagtttaagccgcctcctggagcagattgttaagctgatgcgagtctgggctctgcctcaccacttgtctcagagacagagtcttgctctgtcacctaggctggagtgcagtggtgccatcacagctcactgcagcctcgacctccccgtgctcaagtgatcctcacacctcagcctcccgagtagccgcgatcacaagttaaacaaacacagttctttacatcaatgcttccgtccctggccatctggtctcctgtcccctccagacccaaaaccatgggctgggctgcagcaaaatgagggtgtactcagtgcactgaggcccatgtaccatgagagatggtga

SEQ ID NO: 957 - DNA, 348 bp, Artificial
  cDNA Sequence
gcctcctgagtagctgggacaacaggcacctgccaccacgcccagctaatcttttttgtatttttagtagagacggggtttcaccttgttagccaggatggtctccatctcctgacctcgtgatctgcctgccttgacctcccaaagtgctgggattacaggcgtgagccaccgcgcccggcctctacagcatattttaaaaggcaaaaagcaaatgggggatctcagaagtcttaatgaagtaactatccctgaacactgggatcaatactcagcatccagctgtcaaatcaacaccaagccgcctcctggagcagattgttaagctgatgcgagtctgggctctgc

SEQ ID NO: 958 - DNA, 539 bp, Artificial
  cDNA Sequence
gagattgactagacatagtgccactgtcatccctgctggagaaggtccgaagcacctccacctctgtgcttccagaggggcactgtggtggccacttaaaatgctcaggctataccatgcactagagcatctacctgggcaagggatatgctgtatgacactctcctgatgctgggcatggctgtgagccaaagcacccaggcagccctgccatcagaagggtaaaccacggacacctgatgccttcctgaaggaagagcactacgcctgccaaaccatcaagcgttgatgctccagcgccttctacccgtggttctccagcctcagcagaagagagagaaattgatgaccctgtcgttgtagcatccccatcacccagcaattaattttagttcaatgcttcaaacgctcttcaggcgcagtgtgcgttcagctgtgtcagctaatggcactggagacacagaaatgaaagagacaacgtgccctcaaggatctcacagtgtgtggtgaggtggacacacacacacatatctaagcac

SEQ ID NO: 959 - DNA, 1022 bp, Artificial
  cDNA Sequence
aaagccaaagctcctgccaaagaaatgtgtggagcagaaaagaaaacccagagcagaatgtcaagagcaaggatgtgttgggacaggaaatgaagacgagattgggagaggtcatgcagaatcaggtcacattctggagggaagaaggagcaaaggcacatgatgagagagtgctaattaaggtggccaaagagaacagtgtggtgctgtaaatgccggcagagcaaggagccctgctgccagcctgacccaacacagtcacgttgatgaaaatggaaaaggatggctggaggccttcagttgcaaagttctccattgtcagattacgctgcctgatgggcatgaaaagtccacaaaagagaattttctgatgtgagaatggagggtgttgcctgcaactaccccagatccctgcggtggcagtttaagccgcctcctggagcagattgttaagctgatgcgagtctgggctctgcctcaccacttgtctcagagacagagtcttgctctgtcacctaggctggagtgcagtggtgccatcacagctcactgcagcctcgacctccccgtgctcaagtgatcctcacacctcagcctcccgagtagccgcgatcacaagaaagacctgatgtcatatggaagccaagaagaaactcttgtccaatttgtagggaaagcagagagacagagagacagagagagcttcagcttggtttcaaaacaaggatggaaatacagaacaacttaagttaccagcacacttcataacaattaaaaatcatctcgcttcttccttctgccagcataattttgggctcacaggtggattgacctgacctccaagaaatgtgtgacaaggactcgccccttacctcctcagttacagcacgtttggtgtttatgtgaagctggtggctttcagtatcatggtgaaaattttcttttaggtcataattgcttaactacaatgaaaagtattgattttggaaaaggctcatcttcccaaagaggttcacttcagg

SEQ ID NO: 960 - DNA, 331 bp, Artificial
  cDNA Sequence
cccagatccctgcggtggcagtttaagccgcctcctggagcagattgttaagctgatgcgagtctgggctctgcctcaccacttgtctcagagaatgtccagtgctaggagactcataagttggagagaaacggcctgatttatagaaactgagcgagactccggaccacctgatgcagagaaacctgtgacctgaaaaagtctatttgtgtttcctctaggaatctcggccaagaagacagggacaagctcccaactctgactaccccttttacagggaaaaaaaaaaaatcccgtgccttctttgcagcaagtgacaaatccttgtcat

SEQ ID NO: 961 - DNA, 705 bp, Artificial
  cDNA Sequence
cgatgcattctgggaaagaagcagcaccaaatccaagatggcggccagcaggaggctgatgaaggagcttgaagaaatccgcaaatgtggaatggaaaacttccgtaacatccaggttgatgaagctaatttattgacttggcaagggcttattgttcctgacaaccctccgtataataagggggccttcagaatcgaaatcaactttccagcagagtacccattcaaaccaccgaggatcacatttaaaacaaagatctatcacccgaacatcgacgaaaaggggcaggtctgtctgccagtaattagtgctgaaaactggaagccagcaaccaaaaccgaccaagtaatccagtccctcatagcactggtgaatgacccgcagcccgagcacccgcttcgggctgacctagctgaagaatactctaacgaccgtaaaaaattctgtaagaatgctgaagagtttacaaagaaatatggggaaaagcgacctgtggactaaaatgtgccacgattggttccagcaagtgtgagcagagaccccgtgcagtacattcagacaccccgcaaagcaggactctgtggaaattgatacgtgccaccgtctggcgttcgcttgcagcagttactaactttctacagttttcttaattaaaagtggtctaggtaacctgtaaagaaaggattaaaaatttaagatgttct

SEQ ID NO: 962 - DNA, 364 bp, Artificial
  cDNA Sequence
tttttttttctttcctggattttttctcttttagtctccaaagatctgtaggcaacggtgttggattccagttccctatctctaggcatgttgcattcaaaccaaaggccttgtgcagaagatttctattttccactttctattaagacagcaaggaggggccgggtgcatgggttggaaaatacataaacccagggaggatgaatttctttaccctcaaatagatccaattccttcccgtaggtcgaagacaacatctccaaaggtaaaaatgagaaacccaacaactacttgattgatgagtaggcagcctgctagtaggggactccttcactcatttacaaatgagctgggcattgtactc

SEQ ID NO: 963 - DNA, 591 bp, Artificial
  cDNA Sequence
gcaggagtggcttttgtccctcatccttgtttactcggagaaacttcagaccggacgtgtttagtcagaacagaaatacatctcagggccaaaccgataggaaacgaaaaataactaaacatgggcaaaggagatcctaagaagccgagaggcaaaatgtcatcatatgcattttttgtgcaaacttgtcgggaggagcataagaagaagcacccagatgcttcagtcaacttctcagagttttctaagaagtgctcagagaggtggaagaccatgtctgctaaagagaaaggaaaatttgaagatatggcaaaagcggacaaggcccgttatgaaagagaaatgaaaacctatatccctcccaaaggggagacaaaaaagaagttcaaggatcccaatgcacccaagaggcctccttcggccttcttcctcttctgctctgagtatcgcccaaaaatcaaaggagaacatcctggcctgtccattggtgatgttgcgaagaaactgggagagatgtggaataacactgctgcagatgacaagcagccttatgaaaagaaggctgcgaagctgaaggaaaaatatgaaaag

SEQ ID NO: 964 - DNA, 740 bp, Artificial
  cDNA Sequence
atctcagggccaaaccgataggaaacgaggctgcctcgcggtggcaccgccaccccccaaccgggttccgagcaccggagctggctgctgctccctctttggagcaaagttttatgcaaagagggtgttttttgaaactttcggtgcacgaaaaataactaaacatgggcaaaggagatcctaagaagccgagaggcaaaatgtcatcatatgcattttttgtgcaaacttgtcgggaggagcataagaagaagcacccagatgcttcagtcaacttctcagagttttctaagaagtgctcagagaggtggaagaccatgtctgctaaagagaaaggaaaatttgaagatatggcaaaagcggacaaggcccgttatgaaagagaaatgaaaacctatatccctcccaaaggggagacaaaaaagaagttcaaggatcccaatgcacccaagaggcctccttcggccttcttcctcttctgctctgagtatcgcccaaaaatcaaaggagaacatcctggcctgtccattggtgatgttgcgaagaaactgggagagatgtggaataacactgctgcagatgacaagcagccttatgaaaagaaggctgcgaagctgaaggaaaaatatgaaaaggatattgctgcatatcgagctaaaggaaagcctgatgcagcaaaaaagggagttgtcaaggctgaaaaaagcaagaaaaagaaggaagaggaggaagatgaggaa

SEQ ID NO: 965 - DNA, 644 bp, Artificial
  cDNA Sequence
atctcagggccaaaccgataggaaacgaggctgcctcgcggtggcaccgccaccccccaaccgggttccgagcaccggagctggctgctgctccctctttggagcaaagttttatgcaaagagggtgttttttgaaactttcgaaaaataactaaacatgggcaaaggagatcctaagaagccgagaggcaaaatgtcatcatatgcattttttgtgcaaacttgtcgggaggagcataagaagaagcacccagatgcttcagtcaacttctcagagttttctaagaagtgctcagagaggtggaagaccatgtctgctaaagagaaaggaaaatttgaagatatggcaaaagcggacaaggcccgttatgaaagagaaatgaaaacctatatccctcccaaaggggagacaaaaaagaagttcaaggatcccaatgcacccaagaggcctccttcggccttcttcctcttctgctctgagtatcgcccaaaaatcaaaggagaacatcctggcctgtccattggtgatgttgcgaagaaactgggagagatgtggaataacactgctgcagatgacaagcagccttatgaaaagatattgctgcatatcgagctaaaggaaagcctgatgcagcaaaaaaggg

SEQ ID NO: 966 - DNA, 821 bp, Artificial
  cDNA Sequence
gtaatgttacagagcggagagagtgaggaggctgcgtctggctcccgctctcacagccattgcagtacattgagctccatagagacagcaccggggcaagtgagagccggacgggcactgggcgactctgtgcctcgctgaggaaaaataactaaacatgggcaaaggagatcctaagaagccgagaggcaaaatgtcatcatatgcattttttgtgcaaacttgtcgggaggagcataagaagaagcacccagatgcttcagtcaacttctcagagttttctaagaagtgctcagagaggtggaagaccatgtctgctaaagagaaaggaaaatttgaagatatggcaaaagcggacaaggcccgttatgaaagagaaatgaaaacctatatccctcccaaaggggagacaaaaaagaagttcaaggatcccaatgcacccaagaggcctccttcggccttcttcctcttctgctctgagtatcgcccaaaaatcaaaggagaacatcctggcctgtccattggtgatgttgcgaagaaactgggagagatgtggaataacactgctgcagatgacaagcagccttatgaaaagaaggctgcgaagctgaaggaaaaatatgaaaagttctagttatttctggagttgctgtggatctacagatacgtgatattttggtataactagaatcttgatttctttcataaagttctgccatgttctatttctttccttaatgtttttttcttccctactgttttatcctccctttgctttggaaggatattgctgcatatcgagctaaaggaaagcctgatgc

SEQ ID NO: 967 - DNA, 2343 bp, Artificial
  cDNA Sequence
ggcggtagccaataggagccgcgctggctggagagtaatgttacagagcggagagagtgaggaggctgcgtctggctcccgctctcacagccattgcagtacattgagctccatagagacagcaccggggcaagtgagagccggacgggcactgggcgactctgtgcctcgctgaggaaaaataactaaacatgggcaaaggagatcctaagaagccgagaggcaaaatgtcatcatatgcattttttgtgcaaacttgtcgggaggagcataagaagaagcacccagatgcttcagtcaacttctcagagttttctaagaagtgctcagagaggtggaagaccatgtctgctaaagagaaaggaaaatttgaagatatggcaaaagcggacaaggcccgttatgaaagagaaatgaaaacctatatccctcccaaaggggagacaaaaaagaagttcaaggatcccaatgcacccaagaggcctccttcggccttcttcctcttctgctctgagtatcgcccaaaaatcaaaggagaacatcctggcctgtccattggtgatgttgcgaagaaactgggagagatgtggaataacactgctgcagatgacaagcagccttatgaaaagaaggctgcgaagctgaaggaaaaatatgaaaaggatattgctgcatatcgagctaaaggaaagcctgatgcagcaaaaaagggagttgtcaaggctgaaaaaagcaagaaaaagaaggaagaggaggaagatgaggaagatgaagaggatgaggaggaggaggaagatgaagaagatgaagatgaagaagaagatgatgatgatgaataagttggttctagcgcagttttttttttcttgtctataaagcatttaacccccctgtacacaactcactccttttaaagaaaaaaattgaaatgtaaggctgtgtaagatttgtttttaaactgtacagtgtctttttttgtatagttaacacactaccgaatgtgtctttagatagccctgtcctggtggtattttcaatagccactaaccttgcctggtacagtatgggggttgtaaattggcatggaaatttaaagcaggttcttgttggtgcacagcacaaattagttatatatggggatggtagttttttcatcttcagttgtctctgatgcagcttatacgaaataattgttgttctgttaactgaataccactctgtaattgcaaaaaaaaaaaaaaagttgcagctgttttgttgacattctgaatgcttctaagtaaatacaattttttttattagtattgttgtccttttcataggtctgaaatttttcttcttgaggggaagctagtcttttgcttttgcccattttgaatcacatgaattattacagtgtttatcctttcatatagttagctaataaaaagcttttgtctacacaccctgcatatcataatgggggtaaagttaagttgagatagttttcatccataactgaacatccaaaatcttgatcagttaagaaatttcacatagcccacttacatttacaaactgaagagtaatcaatctactcaaagcatgggattattagaatcaaacattttgaaagtctgtccttgaaggactaatagaaaagtatgttctaacctttacatgaggactctattctttaactcccattaccatgtaatggcagttatattttgcagttcccacattaaagaagacctgagaatgtatccccaaaagcgtgagcttaaaatacaagactgccatattaaattttttgttgacattagtctcagtgaagactatgaaaatgctggctatagatgtcttttcccatttatctaaatatggactgctcaggaaacgagactttccattacaagtatttttaattaattgggccagcttttcaaacaaagatgccacattcaaaatagggtatattttcctatattacggtttgcccctttataaatccaagtagataggaagaaagaagacaaactttgcatctcagtatgaattattcaatttatttgaatgatttttctttacaaaacaaactcattcattagtcatgtttatctgcttaggagtttagggaacaatttggcaattttgtggttttcgagattatcgttttcttaaagtgccagtattttaaaatagcgttcttgtaattttacacgcttttgtgatggagtgctgttttgttatataatttagacttggattctttccatttgcatttgtttatgtaatttcaggaggaatactgaacatctgagtcctggatgatactaataaactaataattgcagaggtttt

SEQ ID NO: 968 - DNA, 455 bp, Artificial
  cDNA Sequence
agaagccctgcctttccagagacctaaagtgtaacgcaatcagagacctttgaggggctcgaggctcggcggcttccgcccctcagcaccagcagagaccccagttttcaggggacatgatcccatagtgtcgccctcacttttgaaggaaaaataactaaacatgggcaaaggagatcctaagaagccgagaggcaaaatgtcatcatatgcattttttgtgcaaacttgtcgggaggagcataagaagaagcacccagatgcttcagtcaacttctcagagttttctaagaagtgctcagagaggtggaagaccatgtctgctaaagagaaaggaaaatttgaagatatggcaaaagcggacaaggcccgttatgaaagagaaatgaaaacctatatccctcccaaaggggagacaaaaaagaagttcaaggatcccaatgcacccaagaggc

SEQ ID NO: 969 - DNA, 476 bp, Artificial
  cDNA Sequence
cgggcggagccagcccccatttcgagcggggcttctccctgcgccgagcctgacaaaatgggggcggcggcgaactaaacatgggcaaaggagatcctaagaagccgagaggcaaaatgtcatcatatgcattttttgtgcaaacttgtcgggaggagcataagaagaagcacccagatgcttcagtcaacttctcagagttttctaagaagtgctcagagaggtggaagaccatgtctgctaaagagaaaggaaaatttgaagatatggcaaaagcggacaaggcccgttatgaaagagaaatgaaaacctatatccctcccaaaggggagacaaaaaagaagttcaaggatcccaatgcacccaagaggcctccttcggccttcttcctcttctgctctgagtatcgcccaaaaatcaaaggagaacatcctggcctgtccattggtgatgttgcgaagaaactgggagagatg

SEQ ID NO: 970 - DNA, 503 bp, Artificial
  cDNA Sequence
gaggaggctgcgtctggctcccgctctcacagccattgcagtacattgagctccatagagacagcaccggggcaagtgagagccggacgggcactgggcgactctgtgcctcgctgaggaaaaataactaaacatgggcaaaggagatcctaagaagccgagaggcaaaatgtcatcatatgcattttttgtgcaaacttgtcgggaggagcataagaagaagcacccagatgcttcagtcaacttctcagagttttctaagaagtgctcagagaggtggaaggtaagagggcttaaaacatgctaacaaggtaattaaaagacagtttccaattgaggatgcaaaaaaaagcctagttggcattctcgtagtgggacgctattacatagcaaaagacattggttttgaggataatttacttaaatgttacaacttaaacttacaaataattattttgtagaccatgtctgctaaagagaaaggaaaatttgaagatatggca

SEQ ID NO: 971 - DNA, 425 bp, Artificial
  cDNA Sequence
ctcccaaaggggagacaaaaaagaagttcaaggatcccaatgcacccaagaggcctccttcggccttcttcctcttctgctctgagtatcgcccaaaaatcaaaggagaacatcctggcctgtccattggtgatgttgcgaagaaactgggagagatgtggaataacactgctgcagatgacaagcagccttatgaaaagaaggctgcgaagctgaaggaaaaatatgaaaaggtaagaagtgtgggtttgcttggtaaaatgatgacaagtacgccagatgtatgattgtacttagtttgaggtgtaataagtttttagggtaacagctacattaagtatggtgttgatataagtcctcatccttcaaagaatgcagaggaccaaataaattagggtttttttgactaaaatgtaatcagactc

SEQ ID NO: 972 - DNA, 1814 bp, Artificial
  cDNA Sequence
atggtgacctctctgggttttaacacctggaacaggccgggtgcagtggctcacacctgtccatcccagcactttgggaggctgagatgggcagatcaactgaggttgggagtttgagaccagcctggccaacatggtgaaaccctatctctactaaaaatacaaaaattagccaggcgtggtggtgcacacctgtaatcccagctactctggaggctgaggcatgaaaatcgcttgaacctgggaggcggaggttgcagtgagctgagatcgcgccactgcactctagcctgggcaacagagtgagcctctgtcttaaaaaaaaaaaaaaaaaaaaaaaaaaacctggaacaggcagagcctggaggatgtgtgtggacttcccatctgtgccaaatgtgctttggagaaaacccacatagctgaatgattaaagtcaagcacggaaggaatgcagtctctgtgccaggccattcccagtgtttcactggtgccctggggtccacatgcttttttaaagaagactaggccaggcacagtggctcacgcctgtaatcccagcactttgggaggctgaggcaggcggatcacctgaggtcgggagttcgagaccagcctgaccaacatggagaaaccctgtctctactaaaaatacaaaattagccgggcgtggtggcaggtgcctgtaatcccagctactcaggaggctgaggcaggagaactgcttgaacccgggaggcagaggttgtgatgagccaagatcgcgccattgcactccagcttgggcaacaagagcgaaaactccatctcaaaaaaaaaaaaaaaaaagactaaagtgtgccaaatttgcagtaaattggagaatgtcagacctgcctcttagacgtagagtgtggccagcacatccaggttcatgacacagcattgtcttttgaaagtaatgtgccaaagtcagatgtcaaccgagggttctacacacagaatatggagagagatctgtaactctgatggaacacgtctaattagcatgctggggaaagacacatcccccagtgtcgtgctgctcaaactggcctggaccataccctactatcaaaggaatcagcctcacatttgctcctgctaggtgaaaggagagtgtcagagaaaagaggagcgtccctacagacagaagaagcctacagatctggatgatccccttgctgatcaaaatgttgaagactcatattatggaatcaatgaccctatagctgataagcttctaaagcagacttcaaccatgcctcatctggacccaccagaggacaagactctcaccacattagacgtggatggtctgggtgaaacagatcagagaaatcatttctaccagttaggagagattgaccatcactctaatgcagaagcagcagggtgctttcacccagttttccacaaggcaggctacagacatggctgctgagaagtcctttaataagttgattgcaatcgccacagactcaacgtgaaatcaagaagatctcaagcagccagaggaaaagaaaaagaaggacggaaccacatactctgggatcaagttagagccttttccaggactgccatgagctcttcctcctgttgcagcagctacttcagcctacccctaagtgatcctccaccactgtggtgaacattgccctgccacccccaccactccccgtactatcaggtttggggctacacatgttccacctcattcctttcatgaagactccaggaccaatccttttcaggaccctcagaggatgggagctcatgctggaaaatacagctgc

SEQ ID NO: 973 - DNA, 1255 bp, Artificial
  cDNA Sequence
acttgtcagtcccaagggcactcatgaagcagtcgctcattgactctgcactggggccgtcctgcatcacagtgagaaatgggagacttccacagagaaagtgaaggtccaaggtccaacgttgtgtgtccagaagaaggccagactgtgcccctgtggagtcctctgatgaggcggatgaggaattttcattcattgggaaatccaaggaacaggaagcagagcctgaggaacaggaggagggctcagccagccagccaggctgtggcattttcaggaccaggtgagtgacgagaggaagagagattggccggcattggaaaacagtggagcctggagtgatagaagcaggcagcttcagaagagaagcaggtgcctagcgcccggaatgagcggatgtcagtgaagaagaagaggaagaaaccgaggatgaggagatggggtggcagtgcagcaccctgtgtcagggagtacaggagaggagacaggagtgtgggaggcacaggggtggcaggggaggcggtgaggaggggcgccctggggagctcagagcagatctgagtatggagagtccacagacagtgaggatgagacggagcctcgcctgatgcaggccctcactgggaaggaagaagggctgagtgacagttcgagaacctgaggctgaagcattgaaccagaaggagctggagcaggaggcaaaaggcaccctgaggaggcatggtgccccctccagactgtaggagaccatggaagagcctgcggagagcaggcggggccgcactactctggatgcgctcaacaccaagaggagagtcaggaggagcaggaggcatggaaagttcagaagctaaaacaaacaagggagcagagacgaggaagaagagcttgagaaggaggaagcagaaattgagcacctgcggaagctggctgaggaagagcagcaagctgagcttcaggcatatggcaaggtcattaccagcaaagccattcagggcaaatatgagaaatatacaaaagagatttcagtgcccccaccctggaggatcatttcaacaaagccatgcttcctaaagtcatgcaagaactttgggcactctggttataccaaatacacccatggtgggcattgagataccacttccttctacccaacacggggccaagagagtacccagaacacaaagttcttcaaacaaaaggtagctgaagcacaagatgtagctgagcaaccatttaccaagaagcagaagac

SEQ ID NO: 974 - DNA, 1024 bp, Artificial
  cDNA Sequence
catgcccaccatcattgagcgggagttcaaggagttggatgctcagcatcgctggcagctgccgtacttggaaattcgaaatgagtcccatgactatcttcatagagtggccaagtttccagaaaacagaaatcgaaatagatacagagatgtaagcccatatgatcacagtcgtgttaaactgcagaatactgagaatgattatattaatgccagcttagttgacatagaagaggcacgaaggagttacatcttaacaccgggtccacttcctaacatgtgctgccatttctggcttacggtttggcagcagaagaccaaagcagttgttgtgctgaaccgcattgtggagaaagaatcggttaaatgtgcgcagtactggccaacagatgaccaaaagatgctgtttaaagaaacgggattcaatgtgaagctctttcagaagatgtgaagtcatattacacagtacatctactacgattagaaaatatcaatagtggtgaaaccagaacaatatctcacttgcattatacgacctggccagattttggagtccctgaatcaccagcttcatttctcaatttcttgttgaaagtgagagaatctggctccttgaaccctgaccatgggcctgcagtgatccattgtagcgaaggcactgggtgcacgggcaccttctctctggtagacgcttgtcttgttttgatgggaaaaggagattatattaacattaaacaagtgttattgaacatgagaaaatactgaatgggtcttattcagaccccagatcaactgagattctcatacatggctataatagaaggagcaaaatgtataaaggtagattctagtatacagaaacggtggaaagaattttctaaggaaaacttagctcctgcttttgatcattcaccgaacaaaataatgactgaaaaatacaatgggaacagaattggtctagaagaagaaaaactgacaggtgaccgatgtacagtaaatgcaagatacaatggaagagaacagt

SEQ ID NO: 975 - DNA, 1133 bp, Artificial
  cDNA Sequence
cccaaacccagccactcacacatggcgggctcagcagccaccggccccgcccctcctcgtcgccgcagtcgcaactgcgtctgcggccacagggcggacagccacgcctctgcggagggcgaccggaagtgctcacgtcttcaccttccccgccacgccaccgtcctttcaggcccagcgtgcagcaggaaggaggactcttttgccgcggactcaagccggaagccgccttcctagtggagacgcgagtgggggaggagcagtccgaggggaacgtgggttgaacgttgcaactagggtggagatcaagctggaacaggagttccgatcgacccggtaccaagaaggggagtgcccgcggcagaattttgattcagctaaagttccatcagatgagtattgccctgcttgtagagagaagggaaagttaaaagccttaaagacttaccgaattagttttcaagaatctatctttttgtgtgaggatctgcagtgcatctatcctttgggctctaaatcacttaataacctaatttctcctgatttggaagaatgtcacactccacataagcctcagaaaaggaagagcttagaaagcagctataaggattcacttcttttagcaaattccaaaaagactagaaattatattgctattgacggtggaaaagttttgaacagcaaacataatggagaagtatatgacgaaacctcgtcaaacttacctgatagtagtggtcaacagaatccaattaggacagctgattccttggagcggaatgagattttggaagctgatactgttgacatggctactacaaaagatcctgctacagttgatgtctctggaactggcagaccttcccctcaaaatgaaggatgtacatctaaactggaaatgccactggagagcaaatgtacatcatttccccaggctttatgtgtccagtggaaaaatgcttatgctctctgttggttagactgtatcctgtcagctttggtgcactcggaagagttaaagaacaccgtgactggactgtgctcgaaggaggaatctatattctggcggttgcttacaaaatataatcaagcaaatacacttctatataccagtcaattgagtggtgttaaag

SEQ ID NO: 976 - DNA, 3814 bp, Artificial
  cDNA Sequence
agggcggacagccacgcctctgcggagggcgaccggaagtgctcacgtcttcaccttccccgccacgccaccgtcctttcaggcccagcgtgcagcaggaaggaggactcttttgccgcggactcaagccggaagccgccttcctagtggagacgcgagtgggggaggagcagtccgaggggaacgtgggttgaacgttgcaactagggtggagatcaagctggaacaggagttccgatcgacccggtaccaagaaggggagtgcccgcggcagggttcattgaaaaaatccttagtgatattgacatgtctcaagtgacataaattagccaatgactcggaatgatggattctccgaagattggaaatggtttgccagtgattggaccagggactgatatagggatatcttcactccacatggtggggtatttgggaaaaaattttgattcagctaaagttccatcagatgagtattgccctgcttgtagagagaagggaaagttaaaagccttaaagacttaccgaattagttttcaagaatctatctttttgtgtgaggatctgcagtgcatctatcctttgggctctaaatcacttaataacctaatttctcctgatttggaagaatgtcacactccacataagcctcagaaaaggaagagcttagaaagcagctataaggattcacttcttttagcaaattccaaaaagactagaaattatattgctattgacggtggaaaagttttgaacagcaaacataatggagaagtatatgacgaaacctcgtcaaacttacctgatagtagtggtcaacagaatccaattaggacagctgattccttggagcggaatgagattttggaagctgatactgttgacatggctactacaaaagatcctgctacagttgatgtctctggaactggcagaccttcccctcaaaatgaaggatgtacatctaaactggaaatgccactggagagcaaatgtacatcatttccccaggctttatgtgtccagtggaaaaatgcttatgctctctgttggttagactgtatcctgtcagctttggtgcactcggaagagttaaagaacaccgtgactggactgtgctcgaaggaggaatctatattctggcggttgcttacaaaatataatcaagcaaatacacttctatataccagtcaattgagtggtgttaaagatggagattgtaaaaaacttacctcagaaatatttgcagagatagagacctgtctgaatgaagttagagatgaaatttttattagccttcagccccagcttagatgcacattaggtgatatggaaagccctgtgtttgcatttcccctgctcttaaaactagaaacccacattgaaaagctcttcctatattctttttcttgggactttgaatgttcgcagtgtggacaccaatatcaaaacaggcatatgaagagtctggtcacctttacaaatgtcatccctgagtggcacccacttaatgctgcccattttggtccatgtaacaattgcaacagtaaatcacaaataagaaaaatggtattagaaaaagtatctcccatattcatgttgcactttgtagaaggcttaccacagaatgacttgcagcactatgcatttcattttgaaggctgtctttatcagataacttctgtaattcagtatcgagcaaataatcattttataacatggattttagatgctgatggaagttggctggaatgtgatgacttaaaaggcccatgttctgaaaggcacaagaaatttgaagttcctgcttcagagatacatattgttatttgggaaagaaaaatatcccaagtgacagataaagaagctgcctgccttccacttaaaaagactaatgaccaacacgctctcagtaatgagaaaccagtatctttaacatcgtgttctgtgggtgatgctgcctcagctgaaacagcctcagtaactcaccctaaagatatatcagttgcccctcgtactctttcacaggacacagctgtaactcatggagatcatttactttcaggtccaaaaggtttggttgacaatattttacctctgacacttgaagaaactatccagaaaacagcctcagtttcacagttaaattctgaagctttcctgttagaaaataaacctgtagcagaaaatacaggaattctcaaaaccaatactttgctatcacaagaatcactaatggcttcttcagtatcagctccatgtaatgaaaagcttattcaagaccaatttgtggacataagttttccatcccaagttgtaaatacaaacatgcagtcagtacagctgaatacagaagatactgtaaatactaaatctgtgaataatactgatgctactggtcttatacagggagtgaagtcagtagaaattgagaaggacgctcagttaaaacaattccttacaccaaaaactgaacaattaaaaccagaacgtgtcacatctcaggtatctaatttgaagaaaaaagaaactacagcagattctcaaaccacaacatctaagtcattacagaatcagtctctgaaagaaaatcagaagaagccatttgtgggaagttgggttaaaggcttaataagcaggggtgcttcttttatgccactctgtgtttcagctcataatagaaacactataactgatttacaaccttcagttaaaggggtaaataattttggtggctttaaaactaaaggtataaaccagaaggccagccacgtatccaagaaagctcgtaagagtgcaagtaagcctcctcccatcagtaagccaccagcaggccctccatcgtctaatggcacagctgcccacccacatgctcatgctgcttcagaagttttggaaaagtctggaagcacctcatgtggagctcaactcaaccacagttcttatgggaatggtatttcttcagcaaaccatgaagacttggtggaaggtcagattcataaacttcgtctaaaacttcgtaaaaagctaaaggcagaaaagaagaaattagctgctcttatgtcttccccgcaaagcagaacagttcgaagtgaaaatctagaacaggtgccccaggatgggtctccaaatgattgtgaatcaatagaggacttgttaaatgagctaccatatccaattgatattgccagtgagtctgcatgcaccactgttcctggtgtttccctgtacagtagtcaaactcatgaagaaattttagcggaattattgtctcctacacctgtttcaacagagctgtcagaaaatggggaaggtgactttaggtatttgggaatgggagatagtcatatcccaccaccagtaccaagtgaattcaatgatgtttcccagaacacacatctgagacaggaccataattattgtagccccaccaagaaaaatccatgtgaagttcagccagactctctgacaaataatgcctgcgttagaacattaaacttggagagtccgatgaagactgatattttcgatgagtttttttcctcctcagcattaaatgctttagcaaatgacacattagacctacctcatttcgatgaatatctgtttgagaattattgaattaatgcttgttaacttttttcatataatatttattattattagaagaacttacaatgtgttcaggtagtgtttatacactggacttgtgtaattacttgtgtaataaccatgaacaaaatgcaaggtttaacctttggttctgcccatgaagcatgtaatctttcttacacattaaaatcactgaatgtgt

SEQ ID NO: 977 - DNA, 897 bp, Artificial
  cDNA Sequence
aatgatgaaagagtgcaagctctcacttccccttcctgtacagggcaggttgtgcagctggaggcagagcagtcctctctggggagcctgaagcaaacatggatcaagaaactgtaggcaatgttgtcctgttggccatcgtcaccctcatcagcgtggtccagaatggattctttgcccataaagtggagcacgaaagcaggacccagaatgggaggagcttccagaggaccggaacacttgcctttgagcgggtctacactgccaaccagaactgtgtagatgcgtaccccactttcctcgctgtgctctggtctgcggggctactttgcagccaagttcctgctgcgtttgctggactgatgtacttgtttgtgaggcaaaagtactttgtcggttacctaggagagagaacgcagagcacccctggctacatatttgggaaacgcatcatactcttcctgttcctcatgtccgttgctggcatattcaactattacctcatcttctttttcggaagtgactttgaaaactacataaagacgatctccaccaccatctcccctctacttctcattccctaactctctgctgaatatggggttggtgttctcatctaatcaatacctacaagtcatcataattcagctcttgagagcattctgctcttctttagatggctgtaaatctattggccatctgggcttcacagcttgagttaaccttgcttttccgggaacaaaatgatgtcatgtcagctccgccccttgaacatgaccgtggccccaaatttgctattcccatgcattttgtttgtttcttcacttatcctgttctctgaagatgttttgtgaccaggtttgtgttttcttaaaataaaatgcagagacatgtttt

SEQ ID NO: 978 - DNA, 547 bp, Artificial
  cDNA Sequence
ctgtggagctgatgaaatcctgcagggagcttcacggtgacagcaagaggagaaacacatccccatatgccccgcagagtttgaagtcccggctgcacctctccccagcagcaggttgactctggaaagttgcagcgttcttacctacagagtgggaacagtactacccattgcacagagtgggtgcaaagctctgtgacggaatacatggattctttgcccataaagtggagcacgaaagcaggacccagaatgggaggagcttccagaggaccggaacacttgcctttgagcgggtctacactgccaagtgagtcctaaccctgatgttgctaataagtgggggcatgggcaggggggcctccttctaggagtgatgaccacccttaataccacatgtctgtctgagccaagtttctgagcgccagggaggtgaggaaggttggacttcaccagagaggctttgtggacaccctttatcatcttagtgagtgctagtgtcaaaacaaagggagtggggatatggggcacattggtggagggaggt

SEQ ID NO: 979 - DNA, 906 bp, Artificial
  cDNA Sequence
cggaaaggcgcctgggctggtgacggtgtcaagtgtaggcaagaaatacggctgatcaagaagcgacttcacctccctcgcacaacactgagtccctttgcggcaggggccctccccgccgcgaaccctacttggaaccttgcgccatgcgatgtctctctcattctaggccacggaagccctgggtcaccctttcagcctggttctctccggtggtgctggcttgtttctcctgtctgttggggtcagctgcgtccagcctcggctcctgcaggattgcccgggcaacccagaggagatgggcgggcgtggaggtcctccctggatgacccttcccaccatttcaacatcattaggaatttaacaggcttttgcaagaaggcccagtctccctgcttcctggcctttctatttaaaagcacccatcttcaccttctcccaaaggctctggaagttttacagacagcatctttctagcctcgccctgcgtctctttctagtcatttgactgaggctgaacaaagcccagatgggagtttcattcccttcacctcccccaactcccagctgaaggaggctggccccagacacaggacacagcttcctgaccctgcgggcaggagcctggcttgttggtgacgggcaggagcctggcttgttggtgagtgggcctcctcattgctgctggagttttccatcctcattccacaacaagccaagtcagcaagttgctgccaggaaccttcacaccttgtgctttgggatctgaggggaaacacacacaccggcaccaccctccctgagcccgggaatgaagccagcatcagcggagagcaacctactgaggaaaatgatggagtaattccctgggcacacttcaggcgtggtgccaggtaacaggccctg

SEQ ID NO: 980 - DNA, 411 bp, Artificial
  cDNA Sequence
tccccacagaggagtttgaaattcttgcttcaggccatatggagtggatattccttccagaaggaaattacagaccactctctgtttctactcaactgcttttcactccaggatgcttcacctcttggggccttccccagcagaggcccaggatcacctgcaaaaggcttccccaagggtggggccagaagcagggctgcagatatgtgtcctgaacctcccatggaccctgctggctcccttcaaaggcttcgggcatagcgacttgcctttccgtcttgttcagtcgtcaccagtcagccgtctgcagacttctctccctcacgttgtggcagaggagttgtacattctctagattttaaaaatatataagttactttttctttaaaataaaaattgtctctgaaataa

SEQ ID NO: 981 - DNA, 450 bp, Artificial
  cDNA Sequence
cggcggcgcgggggggcttcaacgtcttcggtgacggcctcgtgcgcctcgacgggcagctctaccgcctcagcagctacatcaagaggtatgtggaactgaccaactactgtgattataaagactacagggaaactatattgagcaaaccaatgttgttctttattaatgtacagaccaaaaaagacacctcaaaagaaaggacgtacgcgtttcttgtaaacacgaggcaccccaagataagaagacagatagagcaagggatggacatggtcatctcctcagtgattggagaaagttaccggcttcaggttcaatagatgatgtttttaactgcaatctgtcacccagatcatctctgacagagcctcttttggcagaattaccatttccaagtgttctggaatctgaagagacacccaaccaatttatctgattgaactgaacatt

SEQ ID NO: 982 - DNA, 2374 bp, Artificial
  cDNA Sequence
ctggggtcgtggccgtgggccggcaggggcgaggcgggcgtccagagggcggataaaaggggccgcgctgcgccggggccgctttctccgcgcggtgcctgcagggctcccagcgagtggcagcttgggaggggccgcccgggcggtcagactggcacctgagcggccaccgcgtcccggccaggcgggcagaccgaccccctcctcacctcgcgcgcggctgacgcaggcagggcgcccggcccctcctggggaccatcaggtgccggctgggggctgtaggcaccggacggaagcaggcggtgtgaggaccgacgacgcgggcatggcgggggcggcctgcgagccggtggccaggccgagcctgacctccatctcgtctggggagcttcgcagcctgtggacctgcgactgcgagctggccctgctgccgctggctcagctgctgcgcctgcagcccggtgccttccagctgagcggcgaccagctcgtggtggccaggcccggggagccggcggcggcgcgggggggcttcaacgtcttcggtgacggcctcgtgcgcctcgacgggcagctctaccgcctcagcagctacatcaagaggtatgtggaactgaccaactactgtgattataaagactacagggaaactatattgagcaaaccaatgttgttctttattaatgtacagaccaaaaaagacacctcaaaagaaaggacgtacgcgtttcttgtaaacacgaggcaccccaagataagaagacagatagagcaagggatggacatggtcatctcctcagtgattggagaaagttaccggcttcagtttgattttcaagaggcagtgaagaatttcttccccccaggaaatgaagtggttaatggagaaaatttaagctttgcatatgaattcaaagctgatgcattatttgatttcttctattggtttgggctcagtaattccgttgtaaaagtaaatggaaaagttctgaatttgtcaagtacaagtccagaaaagaaggagacgattaagttatttctggaaaaaatgagtgagcctttaatccgaaggagcagtttctctgaccgaaagttcagtgtaacttccagaggttcaatagatgatgtttttaactgcaatctgtcacccagatcatctctgacagagcctcttttggcagaattaccatttccaagtgttctggaatctgaagagacacccaaccaatttatctgattgaactgaacattgtagcagttgctcccgcactccaggcctgtgctagactataggctggggggagggtaggaggtgggaggcagatacttccacctgcgtgtcaatctccggctcctccatggcttctatggaggactcctctcttctgcttctgtggatgtgatgccctggcaggcccagggcagctgattcccctaaaacttatgattaccaggatggaaaggccttggtcccatggcactgggtggggctgggggatattctctactttgaacacttctccaaagaggcagaagggccacagagttctgccaccctgaacatttttctcagttccctgggagtttttgtggcagcctttgtgggagtggtctgactggctgttgacctagcatgcttcataaatcagggtttggccctctgcttggagcatccaaccccttgaactcaaacctgtcgagcaaggggttaagagttctgttctcttgccaacctggctgggcaaaagcctgtgccatctttcactgggaggcaaatatgtttttcatcctgccatatgacacctatgagaaacgttcacagtgaggagtagccaggttgctaggacagtaaccctgccacacactgcctgaaatcggaactcccttggcctccctcttaactaagtgacccatgtagaaggaagccaggagatatggtaccgaacaatgacaggggaagggtattggacacggcagcgtcctccttattgaaaacacattatgtcagttgggaattttaaataagcttttagcaaacctaacactaaaagcaaaatagaagaaagctataccattaccataatacatttttcatctcatggctacaatggaattcttgaaaaggaaaaaaaaatcctatctacatataaaaacctgcatgaatgaatcactacatatgcttataatgaggaagagttatgggtcctgagtgtaattttttatcctttcttaaaaagtttctgtattatgcattttgataacactactgatgatccttccacttatatttgaaatgttatgtaccacatttgcacaattaaaacttttcttagcattcaacctagaattgattaaatttatgactgaggcttca

SEQ ID NO: 983 - DNA, 435 bp, Artificial
  cDNA Sequence
tttgacatactaggtggttagtaactactgactgtctccaggttacaacacagttattacccacttgggtgaaaagagaagacaggaaatacattttggagttggctggcaacctgtttacaaagcaatttacaacagttccttattcttaaggggctattctaatacaagacctcagagaaacagtgcagtgtgacaaaggaggaatttatcaaaggagacagaaaaagcatcaaggcaagctgtgaaatggtgcggtaggaaccaaatagagagccaaaggatctttctgtcactgcaggcccttaggggtaagcaaatccttccctgatccctggtctccttatctgtaaatgagaataccagcacccacctcactgtgctgtaaacatgatgagttctaacaataatttataaattgtaaaatcacacaaa

SEQ ID NO: 984 - DNA, 747 bp, Artificial
  cDNA Sequence
gggtgctggccacgcaggaggcttaacctggccggcgcgggaatggggtgcagagagcaaagaaatgtggctttgatcttatggatgccttacttttacattatttgtacagttcttgcagtgagctttccggaccactgtcttgtatgtttcctaagaaaagcaaaaagggaagagattgaagagaaagtagattttcaactacaaactttcatccatttgctttcagcttaagcaaatgtgcgcaaagttgtcatggatttttgcagtcaataaaaaccaagcaagaagactgaatcccaagtcatctggggcagataagaaaagaaacaatttgctgaaactccctctgcttataacaaaactgactgaaatcagccggaatcaatatggccaaatgcagtttgcgcacagcaagcttgctgatgtcacagcctgaatttctactgcatgtttcataccaactccctccaaatttgcacatgggacccaccaggaagcatgaagagagagccatgcatgcctgaagacttcccagatgttccctttgcttccaccaatcacctgctaaccccaggatccaaccctaaaccttttgtaataaaattactgccctaaagccagtacaagacagatttgaactggacttttgtttcctcagaagttaacttgcaatgtgaagctttccttttctcaaaaacttggtgtcatagtgttggcttctagtgcagtgagccccttttgctg

SEQ ID NO: 985 - DNA, 400 bp, Artificial
  cDNA Sequence
aggaaatgcacgcgtggaaacaggagtgggcagggaggatgtgacactgtcctcctcaccaggccacgttcctggcaccaaccatagtgtttgggcagataagaaaagaaacaatttgctgaaactccctctgcttataacaaaactgactgaaatcagccggaatcaatatggccaaatgcagtttgcgcacagcaagcttgctgatgtcacagcctgaatttctactgcatgtttcataccaactccctccaaatttgcacatgggacccaccaggaagcatgaagagagagccatgcatgcctgaagacttcccagatgttccctttgcttccaccaatcacctgctaaccccaggatccaaccctaaaccttttgtaataaaattactgccctaaa

SEQ ID NO: 986 - DNA, 1478 bp, Artificial
  cDNA Sequence
ctcctggggcagaatggaacagcctgggcccagggctccggatccctctctctgccaccacaacctccagccaacagatgaccccaactgggattcctatgctaccactatgaggactgcattcacgcctaaaacaggagcagtgcctgccttaattcgccaaaacggtatcagaagattaggatatacatattcacttagtgatcctattctcaatcagacacaatatagtgatgagtacacttggaaatcacactctaaagaagatttgatcaaaactgagacttcaagaggaatcaagagccacaaatctcatctcaatgaagacattttcctgtggacactacctcactgtcaacaaacggggacactaaagaactgcctcccttggaaaatcccggcttcaatgaaagaagttaacaaggcactatcaaatcagtttatttcccttactaagagagactttgtggacagatcaaaagctcagaagattaagaaaagttctcacttgtctctggaatggaaaaagttacttccccaacctccagacactgaattccgaaggaattaccaaattccagctaaaattcctgagcttcaagatttcagtttcaaatatggatgctactcaagcttgcctgttgcttctcagggtctagtgccttctgtgctgcacagctacctgaggaaccaagagcacacaaagaaacagaccacataccaaagtgactacgacaaaacctacccagatttcttaatgcttttaaactcatttacttcctctcaagtcaaagagtaccttcagagtctttcctacaaagatagacaaattattgatcgctttattcgtactcactgtgacactaacaaaaagaagaaatgaaaagggaaaatagtacaaatgaagaaaatctgaaaatcaatggaagcacgaggacattcctagtcattttctcaattatcaaggaaaaataagatgcaaatagcttcaagtatgatgtgatagtcatgaatttgtgtcttttgctccgctttatttttaaacaataaaattaaggctacaaaattttccctgaacatagctttagctgtatccaatagtttttgatacaatgtttttttcttttcccttttggatacttaatttgtagtttcaattttgatttctcctgtgaactaggaattatgtggaagagatttcttaatgtcccattaatcagagacttaagaaatcattttattgccttatctcttctttgaatgaatgaaagtttaaaaatctgcttttgggaaatcaattgcagttttatttaatgccattaatcaagtatatgattaatttgtgtgttacgtgaatatgagaaaaaaattatagtttattgtattttttaatcccttatatctttaattgtatacttgaattgttcaattctgaaagaatattggaacctcccacaataaatatatttttatcaatt

SEQ ID NO: 987 - DNA, 256 bp, Artificial
  cDNA Sequence
ctcctggggcagaatggaacagcctgggcccagggctccggatccctctctctgccaccacaacctccagccaaggtttttaaacactcgaggaagtgcctggctaagaggggacaggaaaaaaggaagaactggtgattttccaaggaaaacagggccaaaggcaaagaagaaagagaagtcctggaagctctgaagagaacaggtcctgcctgagtcccgatccccatataggatcttggaaacagcaaggaaa

SEQ ID NO: 988 - DNA, 337 bp, Artificial
  cDNA Sequence
agaggactttttgtgtccagacagatggcaatactcatccgtatgttgtctgccccagggcaagtgtcacagtgagtacgaataaagcgatcaataatttgtctatctgaaaagtatgaagaaaaacaggatgaaaattttcactttgatgaagtgacacatgcattactgtaacccacgaccacaggatgatatagatcattccttccatcccagaagacccttcatgcaccttcccagtcaacactccctacttcaagacagccactgttctggtttctttcatcaaagataagttttcccagttgtagaccttcaaataaatgaaatcatacag

SEQ ID NO: 989 - DNA, 399 bp, Artificial
  cDNA Sequence
ctttccctggctgacagaactctgccttcgagtaggtgttgggggtcatgcccttcatgaaaggaggagtttctctctcatctcgtcaaaaaacaaattattctgccaagcaaggagcatgttttagcttagtcaccacagaagaaacagatcacttttaattatgacatttcatcaacacttggcaagtaagaaagatgggttgaaagactgcatcagaaatattctagagttattttcctgctaacatggaaacaaaaagattcaatgtgagaagaaaaaatagattcctaatggtcaagagaacaagaaaattagatagaaacttaaatataaagtacccggaagtcaaaatgtttgaaatgacacttagagccttaattaaccagattttaagat

SEQ ID NO: 990 - DNA, 656 bp, Artificial
  cDNA Sequence
atgaaaaacaaagtgaagtctgtgattgtacctacttggaggtgaaccaaactaggtgtatcatagttgttgggtgagacagaagaatagttgtgtaaggacatgccacatgactttcgtcacttctggaaaccacagccatgctggcaggatgactgaaccataggcacaaggaggacaacctctgtgtcctctccagttacaacggggagattattatttgaaaagtcatctcaggccacatatcatacaagctgaacacttccagcccctctgatggcccagcaggctctcttaccttctggaggctattctatgaagtgggcctcattgcaaacttcgtgaaagccccagtcagcagcatctcggtgacagcaggagatgccctttcctacctggctaaccagcaaggctttgtgcatgtctatgacatccaggagtatggtctgcagggacaggagctccagcctgaagggcacatgtcagcatggtgactagtttggagctgatagaagaaaagtttctgctgtcatcctcccttgactgcactgggacctttgggcagagcagcccctgggatattttcactcctgcctcctagagccacctgagagtcccctatgaagttttgacagatccccagagcatgccagctc

SEQ ID NO: 991 - DNA, 404 bp, Artificial
  cDNA Sequence
tgacagcaagaaaagaaagaaagaaacagttcattttttctgatggtgattgtgttgatttaaatccagaatttggaatcttcttaacgatgaaccctggatatgctgggcgccaggaactaccagaaaacctaaaaatccagtttagaactgttgctatgatggttcctgatagacaggttcattatgactttggattgagaaatattctgtctgtattgaggactcttggatctcaaaaaagagccagaccagaagatagtgaattaagcattgtcatgagaggactaagagatatgaacctttccaaactggttgatgaagatgaacccctgttcctcagcttaatcaatgacctgttcccaggactgcaactggatagtaatacttatgcagaactgcaa

SEQ ID NO: 992 - DNA, 812 bp, Artificial
  cDNA Sequence
gatgagaaatacaaccatattgatgagtctgaaatgaaaaaagtggagaagtctgttaatgaagtgatggaatggatgaataatgtcatgaatgctcaggctaaaaagagtcttgatcaggatccagttgtacgtgctcaggaaattaaaacaaaaatcaaggaattgaacaacacatgtgaacccgttgtaacacaaccgaaaccaaaaattgaatcacccaaactggaaagaactccaaatggcccaaatattgataaaaaggaagaagatttagaagacaaaaacaattttggtgctgaacctccacatcagaatgattcctgtggaattgtgaattcatactaagctttctgtgcagtctcaccatttgcatcactgaggatgaaactgacttttgtcttttggagaaaaaaaactgtactgcttgttcaagagggctgtgattaaaatctttaagcatttgttcctgccaaggtagttttcttgcattttgctctccattcagcatgtgtgtgggtgtggatgtttataaacaagactaagtctgacttcataagggctttctaaaaccatttctgtccaagagaaaatgactttttgctttgatattaaaaattcaatgagtaaaacaaaagctagtcaaatgtgttagcagcatgcagaacaaaaactttaaactttctctctcactatacagtatattgtcatgtgaaagtgtggaatggaagaaatgtcgatcctgttgtaactgattgtgaacacttttatgagctttaaaataaagttcatcttatggtgtcatttctaaa

SEQ ID NO: 993 - DNA, 334 bp, Artificial
  cDNA Sequence
gagaatacctctttgttttgttgtgaaaaattctgaagtacgagtgccactaatattgtcatattttgtgttaaggatcatcaaaattttttgagactcctcacagaaactgaagactggctgtatgaagaaggagaggaccaagctaaacaagcatatgttgacaagttggaagaattaatgaaaattggcactccagttaaagttcggtttcaggaagctgaagaacggccaaaaatgtttgaagaactaggacagaggctgcagcattatgccaagatagcagctgacttcagaaataagggatgagaaatacaaccatattgatgagtct

SEQ ID NO: 994 - DNA, 3612 bp, Artificial
  cDNA Sequence
gaggaagtgggacctccccttttgggtcggtagttcagcgccggcgccggtgtgcgagccgcggcagagtgaggcaggcaacccgaggtgcggagcgacctgcggaggctgagccccgctttctcccagggtttcttatcagccagccgccgctgtccccgggggagtaggaggctcctgacaggccgcggctgtctgtgtgtccttctgagtgtcagaggaacggccagaccccgcgggccggagcagaacgcggccagggcagaaagcggcggcaggagaagcaggcagggggccggaggacgcagaccgagacccgaggcggaggcggaccgcgagccggccatgtcggtggtggggttggacgtgggctcgcagagctgctacatcgcggtagcccgggccgggggcatcgagaccatcgccaatgagttcagcgaccggtgcaccccgtcagtcatatcatttggatcaaaaaatagaacaatcggagttgcagccaaaaatcagcaaatcactcatgcaaacaatacggtgtctaacttcaaaagatttcatggccgagcattcaatgaccccttcattcaaaaggagaaggaaaacttgagttacgatttggttccattgaaaaatggtggagttggaataaaggtaatgtacatgggtgaagaacatctatttagtgtggagcagataacagccatgttgttgactaagctgaaggaaactgctgaaaacagcctcaagaaaccagtaacagattgtgttatttcagtcccctccttctttacagatgctgagaggcgatctgtgttagatgctgcacagattgttggcctaaactgtttaagacttatgaatgacatgacagctgttgctttgaattacggaatttataagcaggatctcccaagcctggatgagaaacctcggatagtggtttttgttgatatgggacattcagcttttcaagtgtctgcttgtgcttttaacaagggaaaattgaaggtactgggaacagcttttgatcctttcttaggaggaaaaaacttcgatgaaaagttagtggaacatttttgtgcagaatttaaaactaagtacaagttggatgcaaaatccaaaatacgagcactcctacgtctgtatcaggaatgtgaaaaactgaaaaagctaatgagctctaacagcacagaccttccactgaatatcgaatgctttatgaatgataaagatgtttccggaaagatgaacaggtcacaatttgaagaactctgtgctgaacttctgcaaaagatagaagtacccctttattcactgttggaacaaactcatctcaaagtagaagatgtgagtgcagttgagattgttggaggcgctacacgaattccagctgtgaaggaaagaattgccaaattctttggaaaagatattagcacaacactcaatgcagatgaagcagtagccagaggatgtgcattacagtgtgcaatactttccccggcatttaaagttagagaattttccgtcacagatgcagttccttttccaatatctctgatctggaaccatgattcagaagatactgaaggtgttcatgaagtctttagtcgaaaccatgctgctcctttctccaaagttctcacctttctgagaagggggccttttgagctagaagctttctattctgatccccaaggagttccatatccagaagcaaaaataggccgctttgtagttcagaatgtttctgcacagaaagatggagaaaaatctagagtaaaagtcaaagtgcgagtcaacacccatggcattttcaccatctctacggcatctatggtggagaaagtcccaactgaggagaatgaaatgtcttctgaagctgacatggagtgtctgaatcagagaccaccagaaaacccagacactgataaaaatgtccagcaagacaacagtgaagctggaacacagccccaggtacaaactgatgctcaacaaacctcacagtctcccccttcacctgaacttacctcagaagaaaacaaaatcccagatgctgacaaagcaaatgaaaaaaaagttgaccagcctccagaagctaaaaagcccaaaataaaggtggtgaatgttgagctgcctattgaagccaacttggtctggcagttagggaaagaccttcttaacatgtatattgagacagagggtaagatgataatgcaagataaattggaaaaagaaaggaatgatgctaaaaatgcagttgaggaatatgtgtatgagttcagagacaagctgtgtggaccatatgaaaaatttatatgtgagcaggatcatcaaaattttttgagactcctcacagaaactgaagactggctgtatgaagaaggagaggaccaagctaaacaagcatatgttgacaagttggaagaattaatgaaaattggcactccagttaaagttcggtttcaggaagctgaagaacggccaaaaatgtttgaagaactaggacagaggctgcagcattatgccaagatagcagctgacttcagaaataaggatgagaaatacaaccatattgatgagtctgaaatgaaaaaagtggagaagtctgttaatgaagtgatggaatggatgaataatgtcatgaatgctcaggctaaaaagagtcttgatcaggatccagttgtacgtgctcaggaaattaaaacaaaaatcaaggaattgaacaacacatgtgaacccgttgtaacacaaccgaaaccaaaaattgaatcacccaaactggaaagaactccaaatggcccaaatattgataaaaaggaagaagatttagaagacaaaaacaattttggtgctgaacctccacatcagaatggtgaatgttaccctaatgagaaaaattctgttaatatggacttggactagataaccttaaattggcctattccttcaattaataaaatatttttgccatagtatgtgactctacataacatactgaaactatttatattttcttttttaaggatatttagaaattttgtgtattatatggaaaaagaaaaaaagcttaagtctgtagtctttatgatcctaaaagggaaaattgccttggtaactttcagattcctgtggaattgtgaattcatactaagctttctgtgcagtctcaccatttgcatcactgaggatgaaactgacttttgtcttttggagaaaaaaaactgtactgcttgttcaagagggctgtgattaaaatctttaagcatttgttcctgccaaggtagttttcttgcattttgctctccattcagcatgtgtgtgggtgtggatgtttataaacaagactaagtctgacttcataagggctttctaaaaccatttctgtccaagagaaaatgactttttgctttgatattaaaaattcaatgagtaaaacaaaagctagtcaaatgtgttagcagcatgcagaacaaaaactttaaactttctctctcactatacagtatattgtcatgtgaaagtgtggaatggaagaaatgtcgatcctgttgtaactgattgtgaacacttttatgagctttaaaataaagttcatcttatggtgtcatttct

SEQ ID NO: 995 - DNA, 3480 bp, Artificial
  cDNA Sequence
gaggaagtgggacctccccttttgggtcggtagttcagcgccggcgccggtgtgcgagccgcggcagagtgaggcaggcaacccgaggtgcggagcgacctgcggaggctgagccccgctttctcccagggtttcttatcagccagccgccgctgtccccgggggagtaggaggctcctgacaggccgcggctgtctgtgtgtccttctgagtgtcagaggaacggccagaccccgcgggccggagcagaacgcggccagggcagaaagcggcggcaggagaagcaggcagggggccggaggacgcagaccgagacccgaggcggaggcggaccgcgagccggccatgtcggtggtggggttggacgtgggctcgcagagctgctacatcgcggtagcccgggccgggggcatcgagaccatcgccaatgagttcagcgaccggtgcaccccgtcagtcatatcatttggatcaaaaaatagaacaatcggagttgcagccaaaaatcagcaaatcactcatgcaaacaatacggtgtctaacttcaaaagatttcatggccgagcattcaatgaccccttcattcaaaaggagaaggaaaacttgagttacgatttggttccattgaaaaatggtggagttggaataaaggtaatgtacatgggtgaagaacatctatttagtgtggagcagataacagccatgttgttgactaagctgaaggaaactgctgaaaacagcctcaagaaaccagtaacagattgtgttatttcagtcccctccttctttacagatgctgagaggcgatctgtgttagatgctgcacagattgttggcctaaactgtttaagacttatgaatgacatgacagctgttgctttgaattacggaatttataagcaggatctcccaagcctggatgagaaacctcggatagtggtttttgttgatatgggacattcagcttttcaagtgtctgcttgtgcttttaacaagggaaaattgaaggtactgggaacagcttttgatcctttcttaggaggaaaaaacttcgatgaaaagttagtggaacatttttgtgcagaatttaaaactaagtacaagttggatgcaaaatccaaaatacgagcactcctacgtctgtatcaggaatgtgaaaaactgaaaaagctaatgagctctaacagcacagaccttccactgaatatcgaatgctttatgaatgataaagatgtttccggaaagatgaacaggtcacaatttgaagaactctgtgctgaacttctgcaaaagatagaagtacccctttattcactgttggaacaaactcatctcaaagtagaagatgtgagtgcagttgagattgttggaggcgctacacgaattccagctgtgaaggaaagaattgccaaattctttggaaaagatattagcacaacactcaatgcagatgaagcagtagccagaggatgtgcattacagtgtgcaatactttccccggcatttaaagttagagaattttccgtcacagatgcagttccttttccaatatctctgatctggaaccatgattcagaagatactgaaggtgttcatgaagtctttagtcgaaaccatgctgctcctttctccaaagttctcacctttctgagaagggggccttttgagctagaagctttctattctgatccccaaggagttccatatccagaagcaaaaataggccgctttgtagttcagaatgtttctgcacagaaagatggagaaaaatctagagtaaaagtcaaagtgcgagtcaacacccatggcattttcaccatctctacggcatctatggtggagaaagtcccaactgaggagaatgaaatgtcttctgaagctgacatggagtgtctgaatcagagaccaccagaaaacccagacactgatgcaaatgaaaaaaaagttgaccagcctccagaagctaaaaagcccaaaataaaggtggtgaatgttgagctgcctattgaagccaacttggtctggcagttagggaaagaccttcttaacatgtatattgagacagagggtaagatgataatgcaagataaattggaaaaagaaaggaatgatgctaaaaatgcagttgaggaatatgtgtatgagttcagagacaagctgtgtggaccatatgaaaaatttatatgtgagcaggatcatcaaaattttttgagactcctcacagaaactgaagactggctgtatgaagaaggagaggaccaagctaaacaagcatatgttgacaagttggaagaattaatgaaaattggcactccagttaaagttcggtttcaggaagctgaagaacggccaaaaatgtttgaagaactaggacagaggctgcagcattatgccaagatagcagctgacttcagaaataaggatgagaaatacaaccatattgatgagtctgaaatgaaaaaagtggagaagtctgttaatgaagtgatggaatggatgaataatgtcatgaatgctcaggctaaaaagagtcttgatcaggatccagttgtacgtgctcaggaaattaaaacaaaaatcaaggaattgaacaacacatgtgaacccgttgtaacacaaccgaaaccaaaaattgaatcacccaaactggaaagaactccaaatggcccaaatattgataaaaaggaagaagatttagaagacaaaaacaattttggtgctgaacctccacatcagaatggtgaatgttaccctaatgagaaaaattctgttaatatggacttggactagataaccttaaattggcctattccttcaattaataaaatatttttgccatagtatgtgactctacataacatactgaaactatttatattttcttttttaaggatatttagaaattttgtgtattatatggaaaaagaaaaaaagcttaagtctgtagtctttatgatcctaaaagggaaaattgccttggtaactttcagattcctgtggaattgtgaattcatactaagctttctgtgcagtctcaccatttgcatcactgaggatgaaactgacttttgtcttttggagaaaaaaaactgtactgcttgttcaagagggctgtgattaaaatctttaagcatttgttcctgccaaggtagttttcttgcattttgctctccattcagcatgtgtgtgggtgtggatgtttataaacaagactaagtctgacttcataagggctttctaaaaccatttctgtccaagagaaaatgactttttgctttgatattaaaaattcaatgagtaaaacaaaagctagtcaaatgtgttagcagcatgcagaacaaaaactttaaactttctctctcactatacagtatattgtcatgtgaaagtgtggaatggaagaaatgtcgatcctgttgtaactgattgtgaacacttttatgagctttaaaataaagttcatcttatggtgtcatttct

SEQ ID NO: 996 - DNA, 3489 bp, Artificial
  cDNA Sequence
gaggaagtgggacctccccttttgggtcggtagttcagcgccggcgccggtgtgcgagccgcggcagagtgaggcaggcaacccgaggtgcggagcgacctgcggaggctgagccccgctttctcccagggtttcttatcagccagccgccgctgtccccgggggagtaggaggctcctgacaggccgcggctgtctgtgtgtccttctgagtgtcagaggaacggccagaccccgcgggccggagcagaacgcggccagggcagaaagcggcggcaggagaagcaggcagggggccggaggacgcagaccgagacccgaggcggaggcggaccgcgagccggccatgtcggtggtggggttggacgtgggctcgcagagctgctacatcgcggtagcccgggccgggggcatcgagaccatcgccaatgagttcagcgaccggtgcaccccgtcagtcatatcatttggatcaaaaaatagaacaatcggagttgcagccaaaaatcagcaaatcactcatgcaaacaatacggtgtctaacttcaaaagatttcatggccgagcattcaatgaccccttcattcaaaaggagaaggaaaacttgagttacgatttggttccattgaaaaatggtggagttggaataaaggtcccctccttctttacagatgctgagaggcgatctgtgttagatgctgcacagattgttggcctaaactgtttaagacttatgaatgacatgacagctgttgctttgaattacggaatttataagcaggatctcccaagcctggatgagaaacctcggatagtggtttttgttgatatgggacattcagcttttcaagtgtctgcttgtgcttttaacaagggaaaattgaaggtactgggaacagcttttgatcctttcttaggaggaaaaaacttcgatgaaaagttagtggaacatttttgtgcagaatttaaaactaagtacaagttggatgcaaaatccaaaatacgagcactcctacgtctgtatcaggaatgtgaaaaactgaaaaagctaatgagctctaacagcacagaccttccactgaatatcgaatgctttatgaatgataaagatgtttccggaaagatgaacaggtcacaatttgaagaactctgtgctgaacttctgcaaaagatagaagtacccctttattcactgttggaacaaactcatctcaaagtagaagatgtgagtgcagttgagattgttggaggcgctacacgaattccagctgtgaaggaaagaattgccaaattctttggaaaagatattagcacaacactcaatgcagatgaagcagtagccagaggatgtgcattacagtgtgcaatactttccccggcatttaaagttagagaattttccgtcacagatgcagttccttttccaatatctctgatctggaaccatgattcagaagatactgaaggtgttcatgaagtctttagtcgaaaccatgctgctcctttctccaaagttctcacctttctgagaagggggccttttgagctagaagctttctattctgatccccaaggagttccatatccagaagcaaaaataggccgctttgtagttcagaatgtttctgcacagaaagatggagaaaaatctagagtaaaagtcaaagtgcgagtcaacacccatggcattttcaccatctctacggcatctatggtggagaaagtcccaactgaggagaatgaaatgtcttctgaagctgacatggagtgtctgaatcagagaccaccagaaaacccagacactgataaaaatgtccagcaagacaacagtgaagctggaacacagccccaggtacaaactgatgctcaacaaacctcacagtctcccccttcacctgaacttacctcagaagaaaacaaaatcccagatgctgacaaagcaaatgaaaaaaaagttgaccagcctccagaagctaaaaagcccaaaataaaggtggtgaatgttgagctgcctattgaagccaacttggtctggcagttagggaaagaccttcttaacatgtatattgagacagagggtaagatgataatgcaagataaattggaaaaagaaaggaatgatgctaaaaatgcagttgaggaatatgtgtatgagttcagagacaagctgtgtggaccatatgaaaaatttatatgtgagcaggatcatcaaaattttttgagactcctcacagaaactgaagactggctgtatgaagaaggagaggaccaagctaaacaagcatatgttgacaagttggaagaattaatgaaaattggcactccagttaaagttcggtttcaggaagctgaagaacggccaaaaatgtttgaagaactaggacagaggctgcagcattatgccaagatagcagctgacttcagaaataaggatgagaaatacaaccatattgatgagtctgaaatgaaaaaagtggagaagtctgttaatgaagtgatggaatggatgaataatgtcatgaatgctcaggctaaaaagagtcttgatcaggatccagttgtacgtgctcaggaaattaaaacaaaaatcaaggaattgaacaacacatgtgaacccgttgtaacacaaccgaaaccaaaaattgaatcacccaaactggaaagaactccaaatggcccaaatattgataaaaaggaagaagatttagaagacaaaaacaattttggtgctgaacctccacatcagaatggtgaatgttaccctaatgagaaaaattctgttaatatggacttggactagataaccttaaattggcctattccttcaattaataaaatatttttgccatagtatgtgactctacataacatactgaaactatttatattttcttttttaaggatatttagaaattttgtgtattatatggaaaaagaaaaaaagcttaagtctgtagtctttatgatcctaaaagggaaaattgccttggtaactttcagattcctgtggaattgtgaattcatactaagctttctgtgcagtctcaccatttgcatcactgaggatgaaactgacttttgtcttttggagaaaaaaaactgtactgcttgttcaagagggctgtgattaaaatctttaagcatttgttcctgccaaggtagttttcttgcattttgctctccattcagcatgtgtgtgggtgtggatgtttataaacaagactaagtctgacttcataagggctttctaaaaccatttctgtccaagagaaaatgactttttgctttgatattaaaaattcaatgagtaaaacaaaagctagtcaaatgtgttagcagcatgcagaacaaaaactttaaactttctctctcactatacagtatattgtcatgtgaaagtgtggaatggaagaaatgtcgatcctgttgtaactgattgtgaacacttttatgagctttaaaataaagttcatcttatggtgtcatttct

SEQ ID NO: 997 - DNA, 4186 bp, Artificial
  cDNA Sequence
agagaagggtcagccgcggcggcagggcggcggcggcagcggcgcagctccgctccccgcgcgtctcccttccccgcgcccaggtagggcgctcagcctccgccgccaggatgcggccgcccgcctgctggtggctgctcgcgccgccggcgctgctcgcgctcctcacctgctccctggcttttggtttggcttctgaagatacaaagaaagaggtcaagcagtctcaggatttggagaaaagtggtatatcaaggaaaaatgacatagacttaaaaggaattgtattcgtcatccagagtcaaagtaattcttttcatgcaaagagagcagagcagttaaaaaaaagcatcttaaagcaggctgcagatcttacacaggagctccccagtgtcctcctccttcatcagctggctaaacaagaaggtgcatggaccatacttccgttgttaccgcatttttctgtaacatatagcagaaattcatcttggattttcttctgtgaagaagagacaagaatacagattccaaaactcttggaaaccctcagaagatatgacccctctaaggaatggtttttgggaaaagcattacatgatgaagaagctacaataattcaccattatgccttttccgagaatcctacagtttttaagtatccagactttgctgcaggctgggccttaagtattccacttgtaaacaagcttaccaagagactaaagagtgaatccttgaaatccgactttacaatagatttaaaacatgagattgccctctacatctgggacaaaggcggaggacctcccctgaccccagtgcctgagttttgtaccaatgacgtggacttctactgtgctaccacattccattcttttctaccgctttgtagaaagccagtgaagaagaaggatatttttgttgcagtaaaaacatgcaagaaatttcatggtgacagaatacctattgttaagcagacttgggagagccaggcaagtctcattgaatactatagtgactatactgaaaattccattcctactgtggatttgggaattcctaatacagatagaggtcattgtggaaagacatttgccattttggaaagatttctgaatcgtagccaggacaaaacagcatggttagtcattgtggatgatgatacattaataagtatctccaggctccagcacttgcttagctgttatgactccggcgagcctgtgtttctgggagagcgctacggctacggcctgggcactggtggagaatggtcttcagcagagaagccgtcaggagacttctcgccagtaaatgtcgatgctacagcaatgatgctcccgatgatatggtcctgggaatgtgctttagtggcttgggaatccctgtgacacacagccctctcttccatcaggctcggccggtggattaccctaaggactacctttctcatcaagttcccatatcgttccacaaacactggaacatcgatccagtgaaggtgtatttcacatggttggcacccagtgacgaagacaaagccaggcaggagacacagaaaggttttcgagaggagttataaatcagggtgacctgtgcgcctagcctgcgcagggaatgaactggagactgtggcctcatcccactgtgctgtgctcacaacacttgtgtctgccacatggcattgggtgcttcctgactttagggggagattttatgtatggtattttttgacagaggaagaaaaggggtcacaggagaaacatttttttttctgggaaaaatcacttgcttttgacttatgcagttgttttaacacttagtgatgactgtgtattctccaagctgtgatacagcagtttttttttattgtcacagggaaataaatggtaccagaagtccctttcctgttctgtctcttcattgtaatggaagtttcagttgggcatgagcctggagagatgtgactgtctacagttctatttgtatatataaaaagaagactgaaagtcttttgacatggatattgtgaatggtatgaacttttaaaccatattattgatgatgaaaattatttcctgggaactcagtaggaataataccgtattaaggaataatactgtacataaaacatcatgaaaccctagatatgaaatcccctgaagtctgtaatcatggtggttatgttttgtctattcttttgctgtttgtgcctcataaaaagagaatgaggtcttctgctagagcttcgtattgctttggaagttcatctgtgttttatttctccctgaagccctatctttatggcttacttgtaacatgaaagtagtagatgctgccagaaaatagtgtcctcaatattttaaaacaatgttgacatgttttgttcaagtcagcaagctctatgtgagtctcaggaagtgaattaaatttggaccttatgttttactcttgttttttttttttttttaaatgttacttaatgactctctcctgactcaggagagaaaccccttgtggaaggacagcatggtgatcaggcaatttctctgggttcccaaagaatgacatttgaacacagtattttgaaacagctctagttttcaaattatatctttaatatatagtaatgtaacatattcagtattaatgtataaaaagcactctaattatataattcagtttttgtaaaggtatttgcataaaatttaatatgtcttaaactaattttggtaaattacttcttttttttctttttaataaaaactgttactcattaactttgcttataatgctttttatagcccagcacagaatttaaagccataccaccaaaagtacctgtgtgtgttaatatgtttttcttgtagcatagattgactatttgcaatagtattagtatttaccatttttccaaattagcaactaccagacctcacgtgttgcagtgataacacaatgcattggattcagttttgtgaaaatggattctgtggccatccaagggatgtatcagggatgatcagctgatgagaggctccagaaggatttctagatcgcttcaagcctatactgatggccttagctttgttcagtcattgtaactgggattgttgtcattgctaccgtggtagtcaccttcatgtcatctataatagtactcctggagagccctggctgcctacaccagtggaaaagagtctccagttctgctctggcctactaactgttaccactgagagaacaacatgttcatttgacatgattgaagctggcatccgtatatgaagatccttgtcaagctttcttctgtggtctgattagtgccttctactgataccggggcacctcctctggtacttttaagtgttttgttaattatatttactttttggaatggtgtaagcctaaccacaagtaaaagatctttgcctaagtttttgatttctcaaatattgtgttcattagtctagactgggaatggggaggggaaatggggaaaatgaatgaatgaaatcagaaaaaagtcagcggctcagtaaatacagtttaaagagagaataattacttcagagctacccttttaagagaaaaccatcagaaattgataatgtttatataaagtttataaagccattgtgttttgttatataacaaatcagagatgttattttagaatcgattcccatctaaagaactcaattttgagtctgacatttccaggaccagatattgtcttactcacatttcctttgctttgaaatagggctttccttccaaatggctatttttaggctagggatgttaacatcagggatttgtgtgtggaataactggaatgtcatttttgcttttaagccatttctgatgatatagccaaagcaggttgtctgactatgtaggatttttacatcttgaaactaaatcagaaatccagacatgaaaataacctttctagaatgcctaggagcagaaaacaataatagcatgctaaatcacaaatgatgctatgtatgggtatgtaaatatcagtgctgtctgcatttctgggtttattgaagacctcttgttgtatatatcctcaaaaattaatgtaattgacatcttcaagaatgtttctattgtcttccattcataatcagagatgtaatttgtatggactaaataaaaactttattatgtaatg

SEQ ID NO: 998 - DNA, 782 bp, Artificial
  cDNA Sequence
tcatcctagcacatttcagtcactacctgaagttatttgatttactttcttaatttccatttctccactctagggaatggtttttgggaaaagcattacatgatgaagaagctacaataattcaccattatgccttttccgagaatcctacagtttttaagtatccagactttgctgcaggctgggccttaagtattccacttgtaaacaagcttaccaagagactaaagagtgaatccttgaaatccgactttacaatagatttaaaacatgagattgccctctacatctgggacaaaggcggaggacctcccctgaccccagtgcctgagttttgtaccaatgacgtggacttctactgtgctaccacattccattcttttctaccgctttgtagaaagccagtgaagaagaaggatatttttgttgcagtaaaaacatgcaagaaatttcatggtgacagaattaattgagaagaaacacccgtgttctttaataaacctattagagcgaaaaaggactgaaagcctaaaggctgaggaaattgaaagcaaaatttgcacagcctgcaggacccttgctggggactgaggaaagttcttgacctttcctcacagcttcttccagcattatgcaatggaggatattttacccaacagtgtgaacttttagtggctgcaagctgcagggagccctttctgggcaggcaagtctcattgaatactatagtgactatactgaaaattccattcctactgtggatttgggaattcctaatacag

SEQ ID NO: 999 - DNA, 950 bp, Artificial
  cDNA Sequence
acagtggacagctcagtagtctgacagcaagaatataatgctcaattctaaactggagaatgtaaacacagcaaggaaatcctggatacagcgttgaattgtaccatgctagactggctgctgctctccatgattttgatctgtcacacatcaataagagacctagaacttgctttcctgagagcaagagatgagtagttttgtttgtaggacacagttaattttgatgcaactaacctaaaagataagcatattctttctcaaccactttgtaaagctgaaagtaaattcagtagcctagaaattgatctccatcatacaagagatgctctcagagaaaagaccttggttttagaatctgtaccaaggatactctatgtgtaagccaaacacagtgtcaaatgaagtaaatcaagcaaatgtattagaatgaataagataaagtaagtaaatacattggaaagcagaagtctgtaaaagagggattatcttgactatagagtaaaaatagaaagccccaaaacttatatggaaacaaatttagtacaacaagaatgtggaaacaaatttagtacaagaaagagaccaaagaaagagtaaacaagatatagtagaaaagttaaaagaaaatctatctttgcagacacaagcagcatcttgagagaacttagttaagagagaataaagttgcttcaataagaagtcgcagggagctgagaaagatctgaaatctgaactctcaaaaatgaaaactttccataagactaataaaactgagttggaaaaatataagcagctctatctacaagaattaaaagttagaaaatcattggcaactaaactaaacaaaaccaatgataaaatagcagaggttaatagcaaacttcttgtagagaacagcagatcagatttttacaccactcttattacgaggcagtcctagagtcact

SEQ ID NO: 1000 - DNA, 2803 bp, Artificial
  cDNA Sequence
tgaacttactacatcagaactcctgctgaggtataagaggatacgtctaataactcaattgctgtaaacctatgattgtttttctggtttttaaacatctcttcagcctcagattgattacaatgttctttctacttcatttcatcgttctgatcaatgtcaaagattttgcactgactcaaggtagcatgatcactccttcatgccaaaaaggatattttccctgtgggaatcttaccaagtgcttaccccgagcttttcactgtgatggcaaggatgactgtgggaacggggcggacgaagagaactgtggtgacactagtggatgggcgaccatatttggcacagtgcatggaaatgctaacagcgtggccttaacacaggagtgctttctaaaacagtatccacaatgctgtgactgcaaagaaactgaattggaatgtgtaaatggtgacttaaagtctgtgccgatgatttctaacaatgtgacattactgtctcttaagaaaaacaaaatccacagtcttccagataaagttttcatcaaatacacaaaacttaaaaagatatttcttcagcataattgcattagacacatatccaggaaagcattttttggattatgtaatctgcaaatattatatctcaaccacaactgcatcacaaccctcagacctggaatattcaaagacttacatcagctaacttggctaattctagatgacaatccaataaccagaatttcacagcgcttgtttacgggattaaattccttgtttttcctgtctatggttaataactacttagaagctcttcccaagcagatgtgtgcccaaatgcctcaactcaactgggtggatttggaaggcaatagaataaagtatctcacaaattctacgtttctgtcgtgcgattcgctcacagtgctgtttctgcctagaaatcaaattggttttgttccagagaagacattttcttcattaaaaaatttaggagaactggatctgtctagcaatacgataacggaactatcacctcacctttttaaagacttgaagcttctacaaaagctgaacctgtcatccaatcctcttatgtatcttcacaagaaccagtttgaaagtcttaaacaacttcagtctctagacctggaaaggatagagattccaaatataaacacacgaatgtttcaacccatgaagaatctttctcacatttatttcaaaaactttcgatactgctcctatgctccccatgtccgaatatgtatgcccttgacggacggcatttcttcatttgaggacctcttggctaacaatatcctcagaatatttgtctgggttatagctttcattacctgctttggaaatctttttgtcattggcatgagatctttcattaaagctgaaaatacaactcacgctatgtccatcaaaatcctttgttgtgctgattgcctgatgggtgtttacttgttctttgttggcattttcgatataaaataccgagggcagtatcagaagtatgccttgctgtggatggagagcgtgcagtgccgcctcatggggttcctggccatgctgtccaccgaagtctctgttctgctactgacctacttgactttggagaagttcctggtcattgtcttccccttcagtaacattcgacctggaaaacggcagacctcagtcatcctcatttgcatctggatggcgggatttttaatagctgtaattccattttggaataaggattattttggaaacttttatgggaaaaatggagtatgtttcccactttattatgaccaaacagaagatattggaagcaaagggtattctcttggaattttcctaggtgtgaacttgctggcttttctcatcattgtgttttcctatattactatgttctgttccattcaaaaaaccgccttgcagaccacagaagtaaggaattgttttggaagagaggtggctgttgcaaatcgtttcttttttatagtgttctctgatgccatctgctggattcctgtatttgtagttaaaatcctttccctcttccgggtggaaataccagacacaatgacttcctggatagtgatttttttccttccagttaacagtgctttgaatccaatcctctatactctcacaaccaacttttttaaggacaagttgaaacagctgctgcacaaacatcagaggaaatcaattttcaaaattaaaaaaaaaagtttatctacatccattgtgtggatagaggactcctcttccctgaaacttggggttttgaacaaaataacacttggagacagtataatgaaaccagtttcctagcaatcattttggatcactggactttcagtggactacctaaaacaggggacagcttttggaagatgacatctgcaatgcttttcatctttaccaacggcaagcctttctgcacagagagcacagcagaatggctcctgtcactgcattccaatggcagctgtactatctaccaaccatgctgaggacagcaccaaaggttcctctcctcaccccacatgcctgaaaagcacatgtgaattcgtgtatagtgggctgaggtgcagctgatctctagctaatcaacacaacccaccaacaaatgaccacaggttggcactgtgtggtctttcacatcgggttgcactgtccatgaaatagaaacactcacaacatctgattccagtgtggccataataacagaaatctaacaactctttccttgccttttcaatatcaaataaaaccatcagcatcctgctggattgata

SEQ ID NO: 1001 - DNA, 978 bp, Artificial
  cDNA Sequence
gacggaaacacaccctttccttaggcgtcctgcgtcccccgattcctgctccctggttgccgcgtccttggctggcgtcagaaaaatggctacaaactttctagtaggtgagaagatctggttccacaagttcaaatatggcgatgcagaaaggagattctacgaacagatgaacgggcctgtggccggcgcctccctccaggaggccagcatgatcctccatgatattgccagagccagagagaacatcccgaaatccctggccggaagcttaggcccaggggcgtctagcggccccagcggagaccacagcgagctcgtcgtccggatcgccagtctggaagtggacaaccagagagacctggctgaacgtgctggagaagagcttgcccggccactgggccacagccccgcagacccagcacatgtctcccatgcgccaagtggagcccccggccaagaagctagccacaccagcagaggatgacgaggacgatgacattgacctgtttggcagcgacaatgaggcaacacagctgcggcattaccaatgaggagcggctgcagcagtacgcggagaagaaggccaagaagcccgcgctggtggccaagtcctccatcctgctggacttcaagccttgggacgatgagacggacacggcccacctggaggcctgtgtgcgcttcatccagccggacgggctggtgcggggggcctccaagctggtgcccgtgggctacggtatctggaagctgcagattcagcgtgtggtggaggacaaggtggggacagacttgctggaggaggagatcaccaagtttgaagagtgtatgcagagtgtcgacatcgcagctttcaacaagatctggcctgagtgtgtgtgtgtgcccgcgtgcatgaggccctgacacaattaaaaactgagaccggcaaaaaaaaaaaaaaaaaaaagggacgaaaacaaacttaatgaagct

SEQ ID NO: 1002 - DNA, 1115 bp, Artificial
  cDNA Sequence
aaaggacacggcggagcagagagagatgctcggccgctcctcctcctccgggtccaggacttgcttcttatttgctggacgctgatctccctgcagccctcggaggcggcggccgcgctgctttcatttcggggctgtcatcaccagaaacgccggctgccggccgcccaccagctcggctccagccaggcagtggtctctacaaggatgtctgacctagagtggagatggggtgactgaggatggaaatctagtctgaactccactctccaatttggcagaagacctgtgtcttactcagctttgtgttccttacatctctgtagcacacactcccctgcgaaggggttttataaggaacccagagccaagacaaaggaatcaggaggaattctagcacaatgggaagcccctgaagggtttaagcagaagacaataaaagactccgagaagtggcagcagggagtggaggaaaaaaagcctggaatttaccctgctttctgctctgcacatggaatgccccctccatgtgtccattgtcatccaaggtgttttgacaggtctagagtggggtaaaagaatggtatttattcaggcctaatattgaggcttggggctgggctgtatatcagagggcatgcatagacaaagctgaacaaaggggcacacctactgggcacctgctgggcacttctctaaaagtggcactgagacatcattaggatgaattagaactagggcaccagttaacccgggcctgcatgctagtgaaaggaaaattgcgcctctccctcaaccctgctccagacaactgaatggtgacttcaagaacaaatattcaggctgggtgcggtggctcacacctgtaatcccaacacttttggaggctgaggtgagtggatcacctgaggtcaggagttcgagactagcctggccaacatggtgaaaccctgtttctactaaagatacaaaaattagctgggcgtggtggtgggtgccagtaatctcagctaggaggctgaggcaggagaatcgcttgagcctgggaggcagaggttgttgagatggtgccattgcacttcagcctggacgacaagagcataactctgtctcaa

SEQ ID NO: 1003 - DNA, 1698 bp, Artificial
  cDNA Sequence
ggaggcggtatgatgagctgcagaattcttctgggcgtgatgggaagcccagggccatggccgtcacccggagcacatcttccacttcctcaggctccaactccaacgtccttgttccagtgagctggaaaaggccccagtattctcagaagagaacaaaagagaagttggtacatgtcctttctctgtgtggccaagaagtaggattgagcaaaaatccatcagtgattttttcatcgtgtggggatctggatctgcttgagcaccagacaagcttggtatcttctgaggacggtgcccgagagcaggagaacatggatgacacaaacagcgagcagcagtttagagtcttcagagacttcgacttcctagatgtggagctggaggatggagaggaacttcagggtgagagtatggacaatttcaactggggagtgcgcagacgttctctggacagcctggataagtgtgatatgcagattctggaggagcgccaactgtcaggaagcactcctagcctgaataaaatgcaccatgaggactccgatgaatcatccgaggaggaggacctcacagccagccagatcctggagcactcagacctaatcatgactctctccccctctgaagagacgaatcccatggagctgctcaccacagcctgtgactcgacccctgcagaacctcattcctttaacaccagaatgtccagctttgatgcttccttgcctgatatgaataatctgcagatttctgagggttcaaaggctgaagctgttcgtgaggaggaggacaccaccgtgcatgaggatgatctttctagttccatcaatgaactcccagcagcttttgaatgcagcgacagctttagcctggacatgactgagggggaagaaaaaggcaatcgggcactggaccagtttaccctggcgagctttggagaaggtgacaggggagtctctccccctccctcgcccttcttctcagccatccttgccgcctttcagcccgcagcctgtgacgatgccgaggaggcctggcgcagccacatcaaccagcttatgtgtgactcagatggctcctgtgctgtgtatacatttcatgtgttctcctccttgtttaagaatattcagaaaaggttctgcttcctaacctgtgatgcagccagttaccttggagataacctccggggaatcggatccaaatttgtcagctcttcccagatgctcacctcctgctctgctggacaagctcaagttcagtgtgttagaactgcaagaatatttggatacctacaacaacaggaaagaggccacactctcttggcttgcaaattgtaaggcaacatttgcagggggatcaagagatggagtaattacctgtcaaccaggggactccgaagaaaaggtaataaaagcctgttagaatgggtctcttgtgtgctctaacattgtgtattagttttggtctacccaagaagcctggaacttgagaaaagaagaggcggaatgagtcaccccaaacatttacatgaaaccaacagagtaagacagaatgccttccagcatgactgtgtgttgatgggatttgtggggaggtttcttcgttttggaaaagtagaggtataaaataaccttttttgctggatactgtctaactatactaataatttcctaataaatttattcttaattcaga

SEQ ID NO: 1004 - DNA, 711 bp, Artificial
  cDNA Sequence
gaacctcattcctttaacaccagaatgtccagctttgatgcttccttgcctgatatgaataatctgcagatttctgagggttcaaaggctgaagctgttcgtgaggaggaggacaccaccgtgcatgaggatgatctttctagttccatcaatgaactcccagcagcttttgaatgcagcgacagctttagcctggacatgactgagggggaagaaaaaggcaatcgggcactggaccagtttaccctggcgagcccgcagcctgtgacgatgccgaggaggcctggcgcagccacatcaaccagcttatgtgtgactcagatggctcctgtgctgtgtatacatttcatgtgttctcctccttgtttaagaatattcagaaaaggttctgcttcctaacctgtgatgcagccagttaccttggagataacctccggggaatcggatccaaatttgtcagctcttcccagatgctcacctcctgctctgaatgtcctacactttttgtggatgccgagactctcctttcatgtggacttctggacaagctcaagttcagtgtgttagaactgcaagaatatttggatacctacaacaacaggaaagaggccacactctcttggcttgcaaattgtaaggcaacatttgcagggggatcaagagatggagtaattacctgtcaaccaggggactccgaagaaaagcaattgg

SEQ ID NO: 1005 - DNA, 10735 bp, Artificial
  cDNA Sequence
agggggcggcgctcccggcccatcccttagccccgcggcggccgtgtgggccggaggctgcctgcaccgcgtcagggaggccggcctagaaaccctccctcccagaagaaagccgatcccagttcaggtggggtcttcctcggttgcgtacctggctggagccgagctggtgggcggccggcagccggcgtttctggtgatgacagccccgaaatgaaagcagcgcggccgccgcctccgagggctgcagggagatcagcgtccagcaaataagaagcaagtcctggacccggaggaggaggagcggccgagcatctctctctgctccgccgtgtcctttagatgagcactcccggccggagccggaggtggatccgcagagctgcctctgggcgcctgaccccgcgctgacatcacaacctgtgacaggcgcatcacgcccggtacctgctcccggccgctgcccgtcctcccagcctctttgtatgccgcagacatggccagccagcaggattcgggcttctttgagatcagtatcaaatatttactgaaatcctggagtaatacttctcccgttggcaacggttacatcaagcctccggttccacctgcttctggcacgcacagggagaaagggccgccaaccatgctacccatcaatgtggacccagacagtaaaccaggagaatatgtcctcaaaagtttatttgtcaacttcaccactcaggctgaacgcaagattcgtatcattatggcagagcccctggaaaagccattgacaaaatctctgcaacgtggagaagacccccaatttgatcaggtcatcagctcaatgagctccctttctgagtactgcctgccttccattctacgtacattatttgactggtataaaaggcaaaatggcattgaggatgaatcacatgaatacagaccaagaacaagcaataaatcaaaaagcgatgaacaacagcgagattatttaatggaaagacgggacctcgccattgattttattttttctttagtattaatagaagttttgaaacagattccacttcatcctgtaatagacagtttaatacatgatgttattaacttggctttcaagcactttaaatacaaagaagggtaccttggtcccaacactggcaatatgcatattgtggcagacctgtatgcagaagtcattggagtgttggcacaagccaaattccctgctgtaaagaagaaatttatggcggagctaaaagaattacggcacaaagagcagaacccatatgtggttcaaagcattatcagcttaataatgggcatgaaattctttcgaattaagatgtatccagtggaggattttgaggcctctcttcagtttatgcaggaatgtgcacattacttcctcgaggtcaaagacaaagatatcaagcatgccttggctgggctttttgttgaaatacttgttccagttgctgctgctgttaaaaatgaagtaaatgttccctgccttagaaattttgtggaaagcctgtatgacaccacgctggaactttcttctcgaaagaagcattccttggccttgtaccccctggtgacctgtttgctctgtgtcagtcagaagcagctgttcctgaacaggtggcacattttcctcaacaactgcttgtccaaccttaaaaacaaagatcccaagatggctcgagttgcactggaatctctctacagattactttgggtttacatgattcgaattaaatgtgaaagcaacacagctactcagagccgacttataaccatcatcacaacacttttccccaaagggtcccgcggtgtggtaccaagggacatgcctctgaacatctttgtgaaaatcatccagttcattgcccaggaacgtttagattttgcaatgaaagaaatcattttcgattttctttgtgtgggaaaaccagcaaaagcattcagtctcaacccagagagaatgaacattggtttacgggcattcttggtcatagctgatagcttgcagcagaaagatggggaacctcccatgccggttacaggagccgttcttccttcaggaaacacgttaagagtaaagaaaacatatttgagtaaaacactaactgaagaggaagccaaaatgataggcatgtccttatattactctcaagtacgaaaagctgtagacaacattttaaggcaccttgataaagaagtaggaaggtgtatgatgctgactaatgtacagatgttaaacaaagaaccggaagacatgatcacgggtgagagaaagccaaaaatagatcttttcaggacctgtgttgctgctattcctcgactgcttcctgatgggatgtcaaaacttgaacttattgacttactggctaggctctctattcatatggatgatgaattgcgacatattgcacaaaattctcttcagggtttacttgttgacttctcagattggagggaagatgtactatttggctttaccaacttcctgctccgggaagtaaatgatatgcatcacacactccttgattcgtccctgaagttgctgctgcagctgctcacccagtggaaactagtcatccagacacaaggaaaagtctatgaacaagccaacaaaatcagaaattcagagctcatcgcaaatggctccagtcacagaattcagtcggaacgaggtccccactgcagtgtactccacgctgtagaaggttttgctctggttttactctgcagtttccaggtggccacacgcaaactgtccgttttaatactcaaggaaattcgagcgttgtttattgccctggggcagcctgaggatgacgacaggccgatgattgatgtcatggatcagctaagttcttccattctagaaagttttattcatgtagcagtttcggattcagcaacattaccactcacccacaatgtggatctgcagtggttggtggaatggaacgcagtcctggtcaatagccattatgatgtgaaaagcccttcccatgtctggatatttgcacagtctgtcaaagacccctgggtcctctgcctcttcagcttcctccggcaggagaacttacccaagcactgccccacagccctcagctatgcctggccttatgccttcactcggctccagtcggtgatgcctctggtggacccaaatagcccaattaatgccaagaaaaccagcactgccggcagcggagacaactatgttactttgtggagaaattacctaattctttgttttggagttgcaaaacccagtattatgagcccaggacacttaagagcttccactccagaaataatggcgaccacacctgatggtacagtgagctacgataacaaggccataggcaccccatcggtgggagttctgttaaagcagttggtgcctttgatgagactagagagcattgagatcacagagtccttagttttaggatttggaagaacaaattcccttgttttcagagaattggtagaagaacttcatccattaatgaaagaagctctggaaagaagaccagagaacaagaaacgccgagaacggcgagacttgttaaggctacaactacttcgaatttttgaacttttggctgatgctggtgtaataagtgacagcacaaatggagccctagagcgggatactttagccctgggagctttgttcttagaatatgtggacttgacccgcatgctcctagaagctgaaaatgacaaagaagttgaaattcttaaagatatccgggcacattttagtgcaatggtggccaacttgattcagtgtgttccagttcaccaccgaagatttctcttcccccagcaaagtctgaggcaccaccttttcatcttattcagccagtgggcaggacccttcagcattatgttcactcctctggatcgttacagtgacagaaatcatcagattacaagatatcagtattgtgcattaaaagcaatgtcagcagtactgtgctgtggccctgtctttgacaatgtgggcctttccccagatggctacctatataaatggcttgacaacattctggcttgtcaagatttacgagttcatcaacttggctgcgaagttgttgtcttgctactggaacttaatcctgaccaaataaatctttttaactgggcaattgaccgatgctacacaggttcctaccaacttgcatctggctgcttcaaagccatagcaactgtgtgtggaagcaggaactatcccttcgacatagtgacattgttaaaccttgttctattcaaggcctctgacaccaacagagagatttatgaaatctccatgcagctcatgcagatccttgaagcaaagctttttgtatactcaaagaaagtcgctgagcaaagaccgggaagtattctctatggaacacacggcccgctgccacccctctacagcgtgtcacttgccctcttgtcatgtgagctggccaggatgtaccctgagctcacactccccctcttctcagaggtaagccagcgattccccacaacacaccccaacgggcgccagatcatgcttacctacctgctgccctggctgcacaacatcgagctggtggacagcaggctcctcctcccggggtcgagccccagcagcccagaggacgaagtcaaggaccgggaaggtgacgtgactgcttctcacgggctgagaggaaatggctggggctctccagaagccacgtcactggtcctgaacaacctcatgtacatgacggccaagtatggagatgaagttcctgggccagaaatggaaaatgcttggaatgctttagccaacaatgagaaatggagcaacaacctgaggatcaccttgcagttcctgattagcctctgtggggtcagcagcgacacagttctcctaccctatattaaaaaagtggcaatatacttgtgccgtaacaacaccattcaaaccatggaagagcttctctttgagctgcagcagacagagcccgtgaaccccatcgtccagcattgtgacaacccgcccttctaccgcttcacggccagtagcaaggcttccgcagcagcctcaggaaccacctctagcagcaatacagtggttgctggccaggaaaatttcccagatgctgaggagaacaagatattgaaagaatctgatgaaaggtttagtaatgtcatcagagcccacactcgcctcgagtcaagatacagcaatagctctggaggatcctacgatgaagataaaaatgatccaatttctccctacacgggctggttgctgactattacagagaccaagcagccgcagcccttaccgatgccttgtactggaggatgctgggcccccctggttgactatctcccggagaccatcactccccgggggccactccacaggtgcaatattgctgtaatttttatgactgaaatggtggtggatcacagtgtacgagaagactgggcgcttcatctaccattattacttcatgctgtcttcttaggtttagaccactaccggcctgaagtctttgaacacagcaaaaaactgcttcttcacctcttgattgccctctcttgcaacagcaatttccattccattgcttccgtgctcctgcagacccgagagatgggtgaagctaagactctaaccgtgcagccagcctaccaacctgaatatctctatacaggtggctttgacttcctgagagaggaccagtcatccccggtgcctgactcagggcttagttcaagctccacctcctctagcatcagtctgggaggcagcagtggaaacctcccacagatgacccaggaggtagaagatgtggacacagctgctgaaacagatgagaaggcaaacaagctcattgagtttctcacgaccagggcatttggtccactttggtgccatgaagacatcacacctaaaaatcaaaattcaaagagtgctgaacagctcactaattttctacgtcacgttgtatctgtatttaaagattccaaatcaggcttccatctggagcaccagttgagtgaagttgcattgcagacagccctcgcaagctcttcaaggcactatgctggtcggtccttccagatattccgggccctcaagcaacctctgtcagcacatgccttatctgaccttctctcaagattggtggaggtgataggagaacatggagatgagattcagggttatgtaatggaagcgctcctaaccttggaggcggctgtggataacttgtctgactgcttgaagaacagtgacctcctaactgtattgtcccgctcttcctcaccagatttaagctccagcagtaaactaacagcaagcagaaagagcacaggacaactaaacatgaacccgggaaccaccagcggcaacaccgcaactgccgaacggagccggcatcaacgaagcttctctgtgcccaagaagtttggtgtcatcgaccgatcctctgacccacctcgaagtgccacactggacagaattcaggcttgtacccaacaaggcctctcctcaaaaaccagaagctcatcctccttgaaggacagtctcacggacccatcccacataaaccatcccaccaacctgctggccaccatattctgggtcacagtggccttgatggagtctgattttgagtttgaatacttaatggccttaaggctgttgagcagactactggcacatatgccactcgataaggctgagaaccgagaaaagcttgagaaactccaggcacagctgaagtgggccgacttctccgggctgcagcagctgctgctgaaaggattcacatccctcaccaccacagacctgaccctgcagctcttcagtctgctgacaccagtgtccaaaatatccatggtggatgcatcccacgctattgggtttccactgaatgtcttgtgtctcctgcctcagctgattcagcattttgaaaatcccaatcagttctgtaaggatatagccgaaaggattgctcaggtttgtttagaagagaagaaccccaaactttcaaatcttgcacatgtcatgactctttataaaacgcacagctacacgagggactgtgccacgtgggtcaatgtggtctgtcgataccttcatgaagcatatgctgacattaccttgaatatggttacctacctggcagagctgctggagaagggcctccctagtgtgcagcagcccctgctccaggtgatctacagtcttctcagctacatggacctttctgtcgttcctgtcaaacagttcaatgtggaagttctgaagacaattgaaaaatatgtgcaaagtgttcactggagagaagctctgaatatcttgaagctggtagtttctcggtcagccagccttgttttaccttcataccagcacagtgacctctcaaaaatagaaatacatcgagtgtggactagtgcttccaaggaattacctgggaaaaccctggacttccacttcgatatttcggagactccaatcatcgggaggcggtatgatgagctgcagaattcttctgggcgtgatgggaagcccagggccatggccgtcacccggagcacatcttccacttcctcaggctccaactccaacgtccttgttccagtgagctggaaaaggccccagtattctcagaagagaacaaaagagaagttggtacatgtcctttctctgtgtggccaagaagtaggattgagcaaaaatccatcagtgattttttcatcgtgtggggatctggatctgcttgagcaccagacaagcttggtatcttctgaggacggtgcccgagagcaggagaacatggatgacacaaacagcgagcagcagtttagagtcttcagagacttcgacttcctagatgtggagctggaggatggagagggtgagagtatggacaatttcaactggggagtgcgcagacgttctctggacagcctggataagtgtgatatgcagattctggaggagcgccaactgtcaggaagcactcctagcctgaataaaatgcaccatgaggactccgatgaatcatccgaggaggaggacctcacagccagccagatcctggagcactcagacctaatcatgactctctccccctctgaagagacgaatcccatggagctgctcaccacagcctgtgactcgacccctgcagaacctcattcctttaacaccagaatgtccagctttgatgcttccttgcctgatatgaataatctgcagatttctgagggttcaaaggctgaagctgttcgtgaggaggaggacaccaccgtgcatgaggatgatctttctagttccatcaatgaactcccagcagcttttgaatgcagcgacagctttagcctggacatgactgagggggaagaaaaaggcaatcgggcactggaccagtttaccctggcgagctttggagaaggtgacaggggagtctctccccctccctcgcccttcttctcagccatccttgccgcctttcagcccgcagcctgtgacgatgccgaggaggcctggcgcagccacatcaaccagcttatgtgtgactcagatggctcctgtgctgtgtatacatttcatgtgttctcctccttgtttaagaatattcagaaaaggttctgcttcctaacctgtgatgcagccagttaccttggagataacctccggggaatcggatccaaatttgtcagctcttcccagatgctcacctcctgctctgaatgtcctacactttttgtggatgccgagactctcctttcatgtggacttctggacaagctcaagttcagtgtgttagaactgcaagaatatttggatacctacaacaacaggaaagaggccacactctcttggcttgcaaattgtaaggcaacatttgcagggggatcaagagatggagtaattacctgtcaaccaggggactccgaagaaaagcaattggaactgtgtcagagattatataagctacacttccagctgctattgctttttcagtcctactgtaagctcatcggccaggtgcacgaagttagctccatgccagagctgctgaatatgtccagggaactgagtgacctaaagaaacacctgaaggaagccagtgcagtcattgcagctgaccctctctattcagacggcgcgtggtccgagcccaccttcacgtccactgaagcagccatccagtccatgctggagtgcctgaagaacaacgaactcggcaaagctttgcggcagatcagggagtgcagaagtctgtggcccaatgacatctttggaagcagttctgatgatgaggtccagacactactgaatatttatttccgtcaccaaactctgggacagacgggtacttatgccctggtggggtctaaccagagcctgaccgagatctgcaccaagctgatggagctgaacatggagatccgggacatgatccgcagggcccagagttaccgagtcctcactacttttcttccagactccagtgtttctggcactagtctctgacaggagcctcctgtccccactgggttccaaactggcagtgctgccatgctggggcaacgtcattcagtgtcttctcggccttcaaaaggcttggacagactgttctccctcttgttacctgtagggctttttctaaagaggatggcagaacttccaacgtgtagcaatactataagaaccaaggtagcttagaacgtcctggacagactccactcatcatgctgtgtggcacaaatgtgttacatttgaccgagcatatgcaactcgctactgaagaagtgacttccgttgcataccaaagccgactacactgaacagtaccttcctttctagaaacaattttagattggcaaaagtgcaatgttttcttcactcaaaaaattttatattctcaaacatgtatattctttccctgtcttgttccattttcttttcttttttcttttttctttttcctttctttcgtgggctgagaaaggggcaggcaaaatgaagctggccactgaaaactgtaagatggtcaaaagctgacagcctgtgtatgtgaaaagggaattgtaaatggactgcaatgtaatgtacactgtaatttgaatacaattactgtatctaaaaggagctgctatgaagtacctttcttatgttgctaggctactgtttctgaaagccctggatctctttgcaccaaaaatggtccagatagactctttttaaggatcttggctgctttttactagaaggttgcttttatgagcatatttatactgctgaaggatgagtgttaattttaattaactttgccgttttgtagagaaaactattcacaagataaattccaagtcttttcacctgtcaggcatgcatattttaatatctgtttggatagtcagaagtagaatcataaaggtaaaatatgagttgttactttgtttcttcgatgtcatattttatgtgtaatatatatgtaaagggccattcttaagttctctccttaaacttaatgctgtcaagtgttagatgtgtgcatgtgaacttgttgcactgcagaaacatattcagagtttatctatgtaacttattcactctgtaaatacatttaaagtttttgtgatgtaagcttaattgatattctgttcagaactttctttagactaaaaaaaaaaaaaaagacaaaatacacgttgaccatggacttta

SEQ ID NO: 1006 - DNA, 502 bp, Artificial
  cDNA Sequence
tcagcgtccagcaaataagaagcaagtcctggacccggaggaggaggagcggccgagcatctctctctgctccgccgtgtcctttagatgagcactcccggccggagccggaggtggatccgcagagctgcctctgggcgcctgaccccgcgctgacatcacaacctgtgacaggcgcatcacgcccggtacctgctcccggccgctgcccgtcctcccagcctctttgtatgccgcagacatggccagccagcaggattcgggcttctttgagatcagtatcaaatatttactgaaatcctggagtaatatgcggtgccttctggaaaccatccaccatttgcacactaccccagtgcagaagatttagcaagtaaccagttcctggaaacgcgaatggcatttgtggaacaagataagacacaacttaacctcattttctttcatactaatgtctttcatttgatagatgccattcatcatattccttttaacattgctc

SEQ ID NO: 1007 - DNA, 691 bp, Artificial
  cDNA Sequence
tggtatgaacagtctgccctggacggaaggcctgttttagtttgtcttctactgtaggtctttagcacctgactaaaaatacacctggggccaaaaatataagggccctgcattgtggctgagacacttatggtggcagtgagcaacaggaccatggagcccatcattatgtgttttggctttggaacatggtctgtgtagctgttccagactgttagtttgggtttcttttcaggctcatggagattacaactgcttgttggagacgatcctgtgtgatcagcttcataaaagggcttgcttctcccgttggcaacggttacatcaagcctccggttccacctgcttctggcacgcacagggagaaagggccgccaaccatgctacccatcaatgtggacccagacagtaaaccaggagaatatgtcctcaaaagtttatttgtcaacttcaccactcaggctgaacgcaagattcgtatcattatggcagagcccctggaaaagccattgacaaaatctctgcaacgtggagaagacccccaatttgatcaggtcatcagctcaatgagctccctttctgagtactgcctgccttccattctacgtacattatttgactggtataaaaggcaaaatggcattgaggatgaatcacatgaatacagaccaagaacaagcaataaatcaaa

SEQ ID NO: 1008 - DNA, 650 bp, Artificial
  cDNA Sequence
catgcttgctgtgtagcaaatggaatctcttgcacaattggaactgtgtcagagattatataagctacacttccagctgctattgctttttcagtcctactgtaagctcatcggccaggtgcacgaagttagctccatgccagagctgctgaatatgtccagggaactgagtgacctaaagaaacacctgaaggaagccagtgcagtcattgcagctgaccctctctattcagacggcgcgtggtccgagcccaccttcacgtccactgaagcagccatccagtccatgctggagtgcctgaagaacaacgaactcggcaaagctttgcggcagatcagggagtgcagaagtctgtggcccaatgacatctttggaagcagttctgatgatgaggtccagacactactgaatatttatttccgtcaccaaactctgggacagacgggtacttatgccctggtggggtctaaccagagcctgaccgagatctgcaccaagctgatggagctgaacatggagatccgggacatgatccgcagggcccagagttaccgagtcctcactacttttcttccagactccagtgtttctggcactagtctctgacaggagcctcctgtccccactgggttccaaactggcagtgctg

SEQ ID NO: 1009 - DNA, 437 bp, Artificial
  cDNA Sequence
gcgtgaacatccagagttaggtctcaaggctcttctggttctaagtcctaacaaacaatgatcttttcagtgaactgtagaattctggaaagaataagcgtacctccaggctgcttacatcaatagcttacacgtgcttcctgatgcctgccttaacaacaaaaaattcgtgtccatagcaaatatttattgcatgcccactctgggctaggcactgttttagaggacaccgcagctatcaaggcagatgtggtccctgttcccatgaggctcctacatttgagtggaggaagatgtacttgtctacgttgggtgatgattagtgccatgaagaacaaaacggatacagtgagtaatgtggacagggctatcttagctatcactctaataaggtgatatctgaggagagatctgaatgaagtgaggatacaatggat

SEQ ID NO: 1010 - DNA, 148 bp, Artificial
  cDNA Sequence
cccaacttccagtttttggaaccaaaatatggctatttccactgtaaagattgtaagaccaggtgggagagtgcttacgtgtggtgcatttctggaacgaacaaggtttatttcaaacaactctgttgtaaatgccaaaagagtttta

SEQ ID NO: 1011 - DNA, 13860 bp, Artificial
  cDNA Sequence
tcttcccggaggtcctccagataccgccggagtatgagtggccttcccaatctacaggaaacattaaaagagagacaggcaagatttagagaggcaagggaaagccgaagactgaaaattgacccttcatacaaatatatatttgaaattctagcagaaaatcttggcctggacatagtaactgttgaagaattaattttggattgcccatctaatgtggtcgaactattgctggagcaactaaaggggcaaaaatgatgaaattgtatatagacaatgcagccccggataaactaaaaggactgtgcatattttttgttcgttgccgtaatgatgttgctataaatgttaaaactattcaagaggaagcgctctttactgttctggatgcgtcgaaaggactcttaaatggaattagggatatgttggcaaatatatttctaccagctgttcttgcaacaaacaactggggtgctttaaaccagtccaagcagggagaatctgaaaaacatattttcactgaaaccatcaacagatatctttcatttttagatggtgctagaataagtattgagggaacagtgaagttaaagacaatagacaatgttaatttttccaaactgcacacctttgaagaagtaactgctgcagccagcaactcagaaactgttcatcagctggaggaagtgctgatggtatggtacaaacagatcgaacaggtacttattgagagtgagcagatgagaaaagaagctggtgattcaggtccactcactgaattggaacactggaaacgcatgtcagccaagttcaactatatcattgagcagattaaagggccaagttgtaaggctgtcataaatgtgctaaatgttgcacactccaaactgctaaagaattggcgtgatttggatgcaagaatcactgatacagcaaatgaatccaaagataatgtcagatatttgtatactttggaaaaagtgtgtcaacctctctataaccatgacctagtttccatggcacatggaatacaaaatttgattaatgccatcagaatgattcacggtgtgtcaaggtattataatacctcagagagaatgacctcattgtttatcaaggtaacaaatcaaatggtaacagcatgtaaagcatatattactgatggaggattaaaccatgtatgggatcaggaaacgccagttgtactaaagaaaattcaggactgcatttttctattcaaggaatatcaggcatcttttcataaaacaaggaaactgatttcagaatcctcaggggaaaaatcttttgaggtttcagaaatgtatatatttggaaaatttgaagctttttgcaaaagactggagaagattacagaaatgataactgttgtgcaaacatattcaaccttgagtaattctaccatagaaggaatagatattatggcaataaaattcagaaatatataccaaggggttaagaaaaagcaatatgacattctggatccaagaaggacagaatttgacacagatttcttagatttcatgacaaaaatcaatggtttagaggtacaaatacaggcatttatgaacagtagttttgggaaaatcttatcttctcagcaggctcttcagctacttcaaaggtttcagaagctgaacattccctgtctgggattagaaataaaccacacaatagagcgtattcttcagtactatgtggctgaacttgatgctactaagaagctttatcattctcagaaagatgacccccctcttgctcgcaacatgccccctatagcaggaaaaatactctgggtgaggcagctctatcgccggataagtgagcccatcaattatttctttaaaaactcagacattttatcaagtccggacggtaaagctgtcatccgtcagtataacaagatctcctatgtgctggtggaattcgaggtggtctatcacacagcctggatcagagagatttcacagttgcattacgctttacaagccacgctttttgtgcgacatccagaaacagggaagttgctggttaatttcgatcccaaaattttggaagttgttcgggaaactaagtgtatgataaaaatgaagttggatgtaccagaacaggcaaagagattgctaaaattggaaagtaaattgaaagcagacaaactgtatttgcagggtcttctgcaatattatgatgagttatgtcaggaagtgccttctgtgtttgtcaatctgatgaccccaaaaatgaaaaaggtggaatctgtgttgaggcaaggactcacagtgttaacatggtcgtctttaacactggaaagcttctttcaagaagtcgaattagttttggatatgttcaatcaacttttaaagaagatcagtgacttgtgtgaaatgcatattgatacagttctgaaggagatagccaaaactgtgttgatttctctgcctgaaagtggtgctaccaaagtagaagatatgttgaccctcaatgagacatacacaaaagaatgggctgacattctaaaccacaaaagtaagcatgtggaagaagctgtcagagaacttatatcaatatttgagcagatttatgaagtgaaatacactgggaaagtaggaaaacagtcagaacagcggaaacacgttgtttttggaagtgaaacaggagagggtgaaaacaatgactatgaagctaatattgtgaatgagtttgatactcatgataaagaagatgaatttaaaaaggagtgtaaagaggtctttgcttttttctctcatcaattactagacagtcttcaaaaagctacacggttatctctggacacaatgaaaagaagaatatttgttgcaagcctttatgggcgaaagcagtcagaagatattatttcctttataaaaagtgaagtacatcttgcaattcctaatgtggtgatgattcctagtttggatgacattcaacaagccattaaccgtatgatccagttaaccctggaggtcagcagaggagtggctcactgggggcaacagcaaatccgtcccatcaagtctgtcattcccagccccaccactactgacgtgacccatcaaaacacaggaaaactgctgaagaaggaagaaagatcttttgaagaagctattcctgcgaggaagctgaagaatttttacccgggggtagcggagcacaaggatatttctaagttggtcctgctcctttcttcctctgtaaattccctaagaaaggcagctcatgaggccctgcaggactttcagaagtacaagactctctggacagaggaccgcgatgtgaaagtgaaggaatttttggctaacaacccctctctgactgaaatcagatcagaaattctacactatgctacttttgaacaggagattgatgagttgaagcctattattgttgtaggagcacttgaattacatacagagccgatgaaattggccttatccatcgaggccaaggcatggaagatgttactctgtcgatatctgaatgaagaatacaaaaagaaaatgtcatacatgatagcatttattaatgaatacttgaaaaagttatctagacctattcgtgatttagatgatgtcagatttgcaatggaagccttgtcttgcatacgtgataatgaaattcaaatggacatgactttgggaccaattgaagaagcctatgctattttaaacagatttgaagttgaagtaaccaaagaagaatcagaagcagttgataccttaagatattctttcaacaaattgcagagcaaagctgtttcagtacaagaggacctagttcaagtgcagccaaagtttaaaagcaatctacttgagtctgtggaagtttttcgtgaggacgtgataaactttgcagaagcatatgaattggaaggacctatggttccaaatataccaccccaagaagctagcaacaggctacagatatttcaggccagtttcgatgatctgtggaggaaatttgttacgtattcatctggtgaacaactttttggattgcctgtgactgattatgaggttttacacaaaaccagaaaagaactcaacttgctgcagaagctgtatggattgtatgacaccgtaatgagcagtattagtggttattatgaaatactttggggagatgtagatattgaaaaaattaatgcagaactgctggaatttcaaaacagatgtcgtaaacttccaaaaggacttaaagattggcaagcttttttggatctcaaaaagagaattgatgatttcagtgagtcatgtcctctactggaaatgatgaccaataaggccatgaaacagagacactgggatagaatctccgagttaactggaaccccatttgatgtggaatctgattctttttgccttagaaatatcatggaagcaccactccttaaacataaggatgatattgaggatatttgcatatctgccattaaggagaaggatatcgaagccaagctgactcaggtgattgagaattggaccaaccaaaatctgagttttgcagcatttaagggaaaaggagagctcctgctcaaaggaaccgaatcgggagaaattatcactttgatggaggatagtttaatggtcttagggtctttactcagcaacagatacaatgctccatttaaaaaaaatatccagaattgggtgtataaattgtccacttcctcagatataattgaagagtggctcgtagtacagaacctttgggtttatcttgaagccgtctttgtaggtggagatattgccaaacagctgcctcaggaagcaaaacgttttcagaatattgacaagtcttggataaaaataatgcagcgagctcatgagaatcccaatgtgattaattgctgtgttggagatgaaaccatgggacaacttttacctcatttacatgagcagttggaagtatgtcagaagtcactcacagggtatttggagaagaaacgattactgtttccaagattcttctttgtatctgatccagttctcctggaaattcttggacaagccagtgattcccacaccatacagccgcatctccctgcagtatctgacaacatcaatgaggtgacatttcatgcaaaagactatgatcgcatcatggccgtcatatcaagagaaggagaaaaaattgttttggataattctgttatggccaaaggtcctgtggagatttggctactggatttgttaaaaatgcagatgtcatcattacataatataattagatccgctttctatcaaatcagtgattcaggatttcaactcttaccattcctcagccactttccagcacaggttggacttctgggaattcagatgttgtggacacacgattcagaagaggctttacgtaatgcaaaagatgacaggaaaatcatgcaagtgaccaatcagaaatttttggatattctaaatactctcattagtcagacaacacatgatctaagcaagtttgatagagtgaagttcgagactctaattaccatccatgtgcatcagagagatatttttgatgacttggtaaaaatgcatatcaaatcacctactgactttgaatggctaaaacagagtagattttattttaaggaagatttggatcaaactgtggtgtctattacagatgttgattttatttaccaaaatgaatttctgggatgtactgatcgtcttgttatcactccattaacagatagatgctatatcacgttagctcaggccttgggcatgaacatgggaggtgctcccgcaggacctgctggcactggcaaaacagaaaccacaaaagacatgggaaggtgtttgggaaaatatgtggtcgtgttcaattgctcagatcaaatggatttcagaggcctaggaaggattttcaaaggtcttgcacagtcgggttcctggggctgttttgatgagtttaacagaattgaattgcctgtattatcagtggcagcacaacaaatttatattgttttgacagcaagaaaagaaagaaagaaacagttcattttttctgatggtgattgtgttgatttaaatccagaatttggaatcttcttaacgatgaaccctggatatgctgggcgccaggaactaccagaaaacctaaaaatccagtttagaactgttgctatgatggttcctgatagacagatcattatgagagttaaacttgcaagctgtggttttcttgaaaatgttatcttggctcaaaaattttacgttctttacaaactctgtgaagagcaacttactaaacaggttcattatgactttggattgagaaatattctgtctgtattgaggactcttggatctcaaaaaagagccagaccagaagatagtgaattaagcattgtcatgagaggactaagagatatgaacctttccaaactggttgatgaagatgaacccctgttcctcagcttaatcaatgacctgttcccaggactgcaactggatagtaatacttatgcagaactgcaaaacgcagtagcccatcaggttcagatagagggtttgattaaccatccaccctggaacctgaaactcgtgcagttatatgagacgtctttggtacggcatggcttgatgactcttgggcccagtggttctggaaagacaaccgttatcacgattctaatgaaggcgcaaacagaatgcggaaggcctcatagagaaatgcgaatgaatccaaaagccattactgcacctcagatgtttggcagactggacactgctaccaatgactggacagatgggattttttctactctgtggagaaaaacattaaaagctaaaaaaggtgaaaacattttcctcattttagatggtcctgtggatgccatctggattgagaacttaaattccgttttggatgacaataaaactctgacgttagctaatggagatcgcattcccatggcccctagttgtaagcttctgtttgaagtccacaatatcgagaacgcctctcctgccacggtttctaggatgggcatggtctatatcagcagctctgctctcagctggaggccaatcttacaggcatggttgaagaaacgcactgcacaggaagctgctgtattcctgacactgtatgagaaagtctttgaagatacatacacatatatgaagctaaatctcaatcccaaaatgcagctcttggagtgcaactatattgtgcaatctctcaatcttctggaagggttaattccctccaaagaagaaggcggtgtttcctgtgtcgaacatcttcataaattatttgtgtttggcctaatgtggagtttaggagcccttctggaattagaaagcagagaaaagcttgaagccttcttacggcagcatgaaagcaagttggacttaccagaaatacctaaaggctcaaatcaaaccatgtatgagttttatgttactgattatggtgattgggagcactggaataagaaacttcagccttattattatccaactgacagtattccggaatattcatcaattttggttccaaatgttgacaatattagaacaaattttttgatagacaccattgcaaaacaacataaagctgttttgctcacaggagagcagggaactgcaaaaactgtcatggttaaggcctatttgaaaaaatatgatcctgaagtacagctatccaaaagtctaaacttttcatctgccacagaaccaatgatgtttcagagaacaattgaaagctacgtggataagcgaattggaagcacatatgggccaccaggagggagaaaaatgactgtatttattgatgatattaatatgcctgtgattaatgagtggggagatcagataactaatgagattgtgcgacagatgatggaaatggaaggaatgtacagcttggacaagcctggagacttcactactattgttgatgtgcagctcatagcagcaatgatccaccctggaggtggtcgaaatgatattccacaacgtttaaaaagacaatttactgtgtttaattgtacattgccttcaaatgcttcaatagacaaaatttttggaattattggatgtggatactttgatccttgtagaagtttcaagcctcaaatatgtgagatgattgtgaatttagtctcagtgggtagagtgctgtggcaatggactaaggtgaagatgctgccaactccttctaaatttcattacatcttcaatcttcgagatctttccagaatttggcaaggaatgttgaccataaaagctgaggagtgcgcttcaatccctactctcctgtcccttttcaaacacgagtgcagcagagtaattgcagacagatttataactcctgaagatgagcagtggtttaatgcacatcttactcgtgcagttgaagaaaatattggctctgatgcagcgtcgtgtattcttcctgaaccatactttgtggattttcttcgtgagatgccagaaccaactggtgatgaacctgaagactctgtgtttgaagtacccaaaatatatgaattgatgccatcctttgactttctggctgaaaaactccagttttaccagagacagttcaatgaaatcattagaggaacatctcttgatctggtgttttttaaagatgcaatgactcatcttattaagatttcacgaataattcgaacgtcgtgtggaaatgcattgctggtgggtgttggtggttccggaaaacaaagtctttcaagattggcctcttttattgctggctatcaaatattccagataacattaaccaggtcttacaatgtgactaatctaacagatgatttaaaagctttgtacaaagttgctggtgctgatggaaaaggcatcactttcatctttactgacagtgaaataaaagatgaggcatttctagaataccttaacaacttgctatcttcaggggagatctccaacttgtttgcacgagatgagatggatgaaatcacccaaggtctgatttcagtgatgaagagggagctacctcgccatcctcctacctttgataatttgtatgaatacttcatttcaagatcaaggaagaacttacatgttgttctctgcttttctccagttggtgagaagttccgtgcccgttctttgaaatttcctggcttgatatcaggttgcactatggactggttcagccgctggccaagggaggctctgattgctgtggcctcctacttcctttcagactataatattgtctgctctagtgaaattaaaagacaagttgtagaaacaatgggcctgtttcatgacatggtttcagagagctgtgaaagttatttccaaagataccgccgaagagcacatgtgactcccaaatcttacctctcatttataaatggttataaaaacatttatgctgaaaaggtgaagttcattaatgaacaggctgaacgtatgaatattggtcttgataaactaatggaggcaagtgaatctgttgctaaactctctcaggatcttgcagtcaaggagaaggagttggcagtggcttccataaaagcagacgaagtattagcagaagtcacagtaagcgctcaggcttcagccaaaattaaaaatgaagtacaggaggtaaaggacaaagcccaaaaaattgtggatgaaattgatagtgaaaaagtgaaagctgaaagcaagcttgaggcagctaaacctgcactggaagaagcagaagcagccctgaatactatcaagccaaatgatattgccacagtcaggaaacttgcaaaaccaccacatcttattatgagaatcatggactgtgttctgttactatttcaaaagaaaattgaccctgttactatggatccagaaaaatcttgctgtaagccatcatggggagagtcattaaagttgatgagtgcaacaggattcctgtggagccttcagcagttccctaaggacactataaatgaagagactgttgagttactacagccatattttaatatggatgattatacttttgaaagtgccaaaaaagtctgtgggaatgtggctggtctcctgtcttggacacttgctatggcaatattttatggcatcaatagagaagtgttgcctctgaaggccaacctggccaagcaggaaggccggttagcagttgctaatgctgagttagggaaggcacaagccctgctggatgagaagcaagctgagctggataaagtacaggcaaaatttgatgcagcaatgaatgagaaaatggatttgcttaatgacgctgatacgtgccggaaaaagatgcaggccgcctccactctcatcgatgggctgagtggagaaaaaatccggtggacccagcaaagtaaagaattcaaagctcagattaatagacttgtaggtgatattctgctgtgcacgggattcctttcctaccttggtcctttcaatcagatatttaggaactatttgcttaaagatcaatgggaaatggagttgagagcacggaaaattcctttcacagaaaacctgaatcttatttcaatgttggtggatcctccaactattggtgagtgggggctacagggattaccaggagatgatctctcaattcagaatggcattattgtgacaaaggccaccagatacccactcctcatagacccacaaactcaaggcaaaacttggattaaatcaaaggaaaaagaaaatgatttacaggtgacatctctgaaccataaatattttcgcacacacttggaggacagcctttccttgggccgaccccttctcattgaggacattcatgaagagctggatccagccttggataatgtattagaaaagaattttattaaatctggcaccactttcaaggtgaaagtcggtgataaggaatgtgatatcatggatacatttaaactttacattactacgaagttaccaaatcctgcctttaccccagagattaatgctaaaacgtcagtcattgatttcactgttacaatgaaaggacttgagaatcagttactaaggagagtcattctaacagagaaacaggagttagaggctgagagggttaaacttttggaggatgttacttttaataagcggaagatgaaagaacttgaagataacctcctctataaattaagtgctacaaaaggctcattggtagatgacgaatctctcattggtgtacttcgaactaccaagcagacagcagctgaggtaagtgaaaagttgcatgtggctgcagaaactgagatcaagatcaacgcggctcaggaggagttccggcccgcagccacccgcggaagcatcctctacttcctcatcacagagatgagcatggtcaacatcatgtatcagacgtcattggcccagttcttgaagttatttgaccagtccatggccagatctgaaaagtcaccactacctcaaaagagaattacaaatattatcgagtacctgacatatgaagtttttacatactctgtcagaggcctatacgaaaaccacaaattcctgtttgtactcctcatgaccttaaagattgaccttcagagagggacagttaagcacagagagtttcaagctctcattaaagggggagcagctctggacctgaaagcctgtcctcccaaaccctatcgctggatccttgacatgacttggctgaatcttgtggagctgagtaaacttccacaatttgcagaaattatgaaccagatatctcgtaatgagaaggggtggaaaagctggtttgataaagatgctccagaggaggaaattatccctgatggatataatgattcactagatacctgccataaacttttacttatcaggtcttggtgcccagaccgtactgtttttcaagcaagaaagtatattgcagattctttggaggagaagtacacagaaccagttatcttaaatctggagaaaacttgggaagaaagtgatacccggacacctctgatatgcttcctgtccatgggatctgaccccaccaatcaaattgatgcattggccaagaaactgaaactggaatgtagaactatctcaatggggcaaggacaagaagtacatgctcgaaagctgattcagatgtcaatgcagcagggtggttgggtattactacaaaattgccaccttggcctggaattcatggaagaattactagagacgctaattaccactgaagccagtgatgattctttccgagtatggataactacggagccccatgatcgatttccaattacattgcttcagacctctctcaaattcactaatgagccaccccaaggtgtacgcgcaggtttgaaaagaacatttgctggaattaatcaagaccttctggacatcagtaatttacccatgtggaagccgatgctttacacagtagcatttttacactccactgtgcaggagcgacgaaaatttggccccttaggatggaatattccctacgaattcaattctgctgacttttcagccagtgttcagtttattcagaatcaccttgatgaatgcgatattaagaaaggtgtatcatggaatacggttcggtacatgatcggagaagtacaatatggaggcagagtgacagatgactttgacaaacgtctacttaattgctttgccagagtctggttcagtgagaagatgtttgaaccgtcattctgcttttatactggatataaaatccccttatgcaaaaccttagaccagtattttgaatacatccagtcactgccatccctagataaccctgaagtctttgggcttcaccctaatgctgatatcacgtatcagagtaacactgcttctgctgttcttgaaacaattaccaacattcaacccaaagagagtggaggtggtgtgggagagacccgggaggctattgtttatagattatctgaagatatgctgagtaaactccctcctgattacattcctcatgaggtgaaatctcgtttgataaagatgggccatcttaattcaatgaacatatttcttagacaagaaattgacagaatgcaaagagtcatttcaatactccgcagtagcctgagtgatctaaaattggccattgaaggaacaatcattatgagtgagaatctgagagatgctctggacaacatgtatgatgctcgtatacctcagctctggaaaagagtgtcttgggattcgtccacactgggcttctggttcactgaacttttggaaagaaatgctcagttttctacgtggatatttgaagggaggcctaatgtgttttggatgactggtttctttaatccccaaggcttcctcacagcaatgaggcaagaagtgacccgtgcccacaaaggctgggcactggacactgtgaccatccacaatgaagttctgagacagaccaaggaggagatcacgtcaccccctggggaaggtgtgtatatttatgggctctacatggatggagcagcctgggacagacggaatgggaagctcatggaatccacccccaaggtactcttcacgcagttacccgtgctccacatctttgccattaactccacggcacccaaggaccccaagctgtatgtgtgtcctatttacaagaaacccaggcgaactgatttgaccttcatcactgtggtatatttacgaacagtgttgtccccggatcactggatcctgagaggagtggcccttttgtgtgacatcaagtaagttcatttccatctgctcagggcaccagaacccacatagacagcctgtgctattgagggactcagtgatgtgtgtgtcttttctccccagtaattccttaattactctttctacattaaaaagttgatgttct

SEQ ID NO: 1012 - DNA, 14215 bp, Artificial
  cDNA Sequence
ggagcagaggctcctccctctacggaagaggctgcccctccccgttcagaagaggaagaggccccgcgccctccgacagtggaggccccggcagaagatggtttctctccttccgcagaagatgctgtttcttctgtggtggattatcgggatctcattccttctgaagaagggatagttcttccagatgatcatgaagcggatctgaatagagttcgacagaggcttgcaccgcgaccggttcagtcagtgatttcggaagtgctgtccttgccgtcttcccggaggtcctccagataccgccggagtatgagtggccttcccaatctacaggaaacattaaaagagagacaggcaagatttagagaggcaagggaaagccgaagactgaaaattgacccttcatacaaatatatatttgaaattctagcagaaaatcttggcctggacatagtaactgttgaagaattaattttggattgcccatctctggaagcatttactaatttttttgcgaaagatggttgtaagacactgaaatttttgtaccaagaaggagatgtacctggtattgaatgtggtcgaactattgctggagcaactaaaggggcaaaaatgatgaaattgtatatagacaatgcagccccggataaactaaaaggactgtgcatattttttgttcgttgccgtaatgatgttgctataaatgttaaaactattcaagaggaagcgctctttactgttctggatgcgtcgaaaggactcttaaatggaattagggatatgttggcaaatatatttctaccagctgttcttgcaacaaacaactggggtgctttaaaccagtccaagcagggagaatctgaaaaacatattttcactgaaaccatcaacagatatctttcatttttagatggtgctagaataagtattgagggaacagtgaagttaaagacaatagacaatgttaatttttccaaactgcacacctttgaagaagtaactgctgcagccagcaactcagaaactgttcatcagctggaggaagtgctgatggtatggtacaaacagatcgaacaggtacttattgagagtgagcagatgagaaaagaagctggtgattcaggtccactcactgaattggaacactggaaacgcatgtcagccaagttcaactatatcattgagcagattaaagggccaagttgtaaggctgtcataaatgtgctaaatgttgcacactccaaactgctaaagaattggcgtgatttggatgcaagaatcactgatacagcaaatgaatccaaagataatgtcagatatttgtatactttggaaaaagtgtgtcaacctctctataaccatgacctagtttccatggcacatggaatacaaaatttgattaatgccatcagaatgattcacggtgtgtcaaggtattataatacctcagagagaatgacctcattgtttatcaaggtaacaaatcaaatggtaacagcatgtaaagcatatattactgatggaggattaaaccatgtatgggatcaggaaacgccagttgtactaaagaaaattcaggactgcatttttctattcaaggaatatcaggcatcttttcataaaacaaggaaactgatttcagaatcctcaggggaaaaatcttttgaggtttcagaaatgtatatatttggaaaatttgaagctttttgcaaaagactggagaagattacagaaatgataactgttgtgcaaacatattcaaccttgagtaattctaccatagaaggaatagatattatggcaataaaattcagaaatatataccaaggggttaagaaaaagcaatatgacattctggatccaagaaggacagaatttgacacagatttcttagatttcatgacaaaaatcaatggtttagaggtacaaatacaggcatttatgaacagtagttttgggaaaatcttatcttctcagcaggctcttcagctacttcaaaggtttcagaagctgaacattccctgtctgggattagaaataaaccacacaatagagcgtattcttcagtactatgtggctgaacttgatgctactaagaagctttatcattctcagaaagatgacccccctcttgctcgcaacatgccccctatagcaggaaaaatactctgggtgaggcagctctatcgccggataagtgagcccatcaattatttctttaaaaactcagacattttatcaagtccggacggtaaagctgtcatccgtcagtataacaagatctcctatgtgctggtggaattcgaggtggtctatcacacagcctggatcagagagatttcacagttgcattacgctttacaagccacgctttttgtgcgacatccagaaacagggaagttgctggttaatttcgatcccaaaattttggaagttgttcgggaaactaagtgtatgataaaaatgaagttggatgtaccagaacaggcaaagagattgctaaaattggaaagtaaattgaaagcagacaaactgtatttgcagggtcttctgcaatattatgatgagttatgtcaggaagtgccttctgtgtttgtcaatctgatgaccccaaaaatgaaaaaggtggaatctgtgttgaggcaaggactcacagtgttaacatggtcgtctttaacactggaaagcttctttcaagaagtcgaattagttttggatatgttcaatcaacttttaaagaagatcagtgacttgtgtgaaatgcatattgatacagttctgaaggagatagccaaaactgtgttgatttctctgcctgaaagtggtgctaccaaagtagaagatatgttgaccctcaatgagacatacacaaaagaatgggctgacattctaaaccacaaaagtaagcatgtggaagaagctgtcagagaacttatatcaatatttgagcagatttatgaagtgaaatacactgggaaagtaggaaaacagtcagaacagcggaaacacgttgtttttggaagtgaaacaggagagggtgaaaacaatgactatgaagctaatattgtgaatgagtttgatactcatgataaagaagatgaatttaaaaaggagtgtaaagaggtctttgcttttttctctcatcaattactagacagtcttcaaaaagctacacggttatctctggacacaatgaaaagaagaatatttgttgcaagcctttatgggcgaaagcagtcagaagatattatttcctttataaaaagtgaagtacatcttgcaattcctaatgtggtgatgattcctagtttggatgacattcaacaagccattaaccgtatgatccagttaaccctggaggtcagcagaggagtggctcactgggggcaacagcaaatccgtcccatcaagtctgtcattcccagccccaccactactgacgtgacccatcaaaacacaggaaaactgctgaagaaggaagaaagatcttttgaagaagctattcctgcgaggaagctgaagaatttttacccgggggtagcggagcacaaggatatttctaagttggtcctgctcctttcttcctctgtaaattccctaagaaaggcagctcatgaggccctgcaggactttcagaagtacaagactctctggacagaggaccgcgatgtgaaagtgaaggaatttttggctaacaacccctctctgactgaaatcagatcagaaattctacactatgctacttttgaacaggagattgatgagttgaagcctattattgttgtaggagcacttgaattacatacagagccgatgaaattggccttatccatcgaggccaaggcatggaagatgttactctgtcgatatctgaatgaagaatacaaaaagaaaatgtcatacatgatagcatttattaatgaatacttgaaaaagttatctagacctattcgtgatttagatgatgtcagatttgcaatggaagccttgtcttgcatacgtgataatgaaattcaaatggacatgactttgggaccaattgaagaagcctatgctattttaaacagatttgaagttgaagtaaccaaagaagaatcagaagcagttgataccttaagatattctttcaacaaattgcagagcaaagctgtttcagtacaagaggacctagttcaagtgcagccaaagtttaaaagcaatctacttgagtctgtggaagtttttcgtgaggacgtgataaactttgcagaagcatatgaattggaaggacctatggttccaaatataccaccccaagaagctagcaacaggctacagatatttcaggccagtttcgatgatctgtggaggaaatttgttacgtattcatctggtgaacaactttttggattgcctgtgactgattatgaggttttacacaaaaccagaaaagaactcaacttgctgcagaagctgtatggattgtatgacaccgtaatgagcagtattagtggttattatgaaatactttggggagatgtagatattgaaaaaattaatgcagaactgctggaatttcaaaacagatgtcgtaaacttccaaaaggacttaaagattggcaagcttttttggatctcaaaaagagaattgatgatttcagtgagtcatgtcctctactggaaatgatgaccaataaggccatgaaacagagacactgggatagaatctccgagttaactggaaccccatttgatgtggaatctgattctttttgccttagaaatatcatggaagcaccactccttaaacataaggatgatattgaggatatttgcatatctgccattaaggagaaggatatcgaagccaagctgactcaggtgattgagaattggaccaaccaaaatctgagttttgcagcatttaagggaaaaggagagctcctgctcaaaggaaccgaatcgggagaaattatcactttgatggaggatagtttaatggtcttagggtctttactcagcaacagatacaatgctccatttaaaaaaaatatccagaattgggtgtataaattgtccacttcctcagatataattgaagagtggctcgtagtacagaacctttgggtttatcttgaagccgtctttgtaggtggagatattgccaaacagctgcctcaggaagcaaaacgttttcagaatattgacaagtcttggataaaaataatgcagcgagctcatgagaatcccaatgtgattaattgctgtgttggagatgaaaccatgggacaacttttacctcatttacatgagcagttggaagtatgtcagaagtcactcacagggtatttggagaagaaacgattactgtttccaagattcttctttgtatctgatccagttctcctggaaattcttggacaagccagtgattcccacaccatacagccgcatctccctgcagtatctgacaacatcaatgaggtgacatttcatgcaaaagactatgatcgcatcatggccgtcatatcaagagaaggagaaaaaattgttttggataattctgttatggccaaaggtcctgtggagatttggctactggatttgttaaaaatgcagatgtcatcattacataatataattagatccgctttctatcaaatcagtgattcaggatttcaactcttaccattcctcagccactttccagcacaggttggacttctgggaattcagatgttgtggacacacgattcagaagaggctttacgtaatgcaaaagatgacaggaaaatcatgcaagtgaccaatcagaaatttttggatattctaaatactctcattagtcagacaacacatgatctaagcaagtttgatagagtgaagttcgagactctaattaccatccatgtgcatcagagagatatttttgatgacttggtaaaaatgcatatcaaatcacctactgactttgaatggctaaaacagagtagattttattttaaggaagatttggatcaaactgtggtgtctattacagatgttgattttatttaccaaaatgaatttctgggatgtactgatcgtcttgttatcactccattaacagatagatgctatatcacgttagctcaggccttgggcatgaacatgggaggtgctcccgcaggacctgctggcactggcaaaacagaaaccacaaaagacatgggaaggtgtttgggaaaatatgtggtcgtgttcaattgctcagatcaaatggatttcagaggcctaggaaggattttcaaaggtcttgcacagtcgggttcctggggctgttttgatgagtttaacagaattgaattgcctgtattatcagtggcagcacaacaaatttatattgttttgacagcaagaaaagaaagaaagaaacagttcattttttctgatggtgattgtgttgatttaaatccagaatttggaatcttcttaacgatgaaccctggatatgctgggcgccaggaactaccagaaaacctaaaaatccagtttagaactgttgctatgatggttcctgatagacagatcattatgagagttaaacttgcaagctgtggttttcttgaaaatgttatcttggctcaaaaattttacgttctttacaaactctgtgaagagcaacttactaaacaggttcattatgactttggattgagaaatattctgtctgtattgaggactcttggatctcaaaaaagagccagaccagaagatagtgaattaagcattgtcatgagaggactaagagatatgaacctttccaaactggttgatgaagatgaacccctgttcctcagcttaatcaatgacctgttcccaggactgcaactggatagtaatacttatgcagaactgcaaaacgcagtagcccatcaggttcagatagagggtttgattaaccatccaccctggaacctgaaactcgtgcagttatatgagacgtctttggtacggcatggcttgatgactcttgggcccagtggttctggaaagacaaccgttatcacgattctaatgaaggcgcaaacagaatgcggaaggcctcatagagaaatgcgaatgaatccaaaagccattactgcacctcagatgtttggcagactggacactgctaccaatgactggacagatgggattttttctactctgtggagaaaaacattaaaagctaaaaaaggtgaaaacattttcctcattttagatggtcctgtggatgccatctggattgagaacttaaattccgttttggatgacaataaaactctgacgttagctaatggagatcgcattcccatggcccctagttgtaagcttctgtttgaagtccacaatatcgagaacgcctctcctgccacggtttctaggatgggcatggtctatatcagcagctctgctctcagctggaggccaatcttacaggcatggttgaagaaacgcactgcacaggaagctgctgtattcctgacactgtatgagaaagtctttgaagatacatacacatatatgaagctaaatctcaatcccaaaatgcagctcttggagtgcaactatattgtgcaatctctcaatcttctggaagggttaattccctccaaagaagaaggcggtgtttcctgtgtcgaacatcttcataaattatttgtgtttggcctaatgtggagtttaggagcccttctggaattagaaagcagagaaaagcttgaagccttcttacggcagcatgaaagcaagttggacttaccagaaatacctaaaggctcaaatcaaaccatgtatgagttttatgttactgattatggtgattgggagcactggaataagaaacttcagccttattattatccaactgacagtattccggaatattcatcaattttggttccaaatgttgacaatattagaacaaattttttgatagacaccattgcaaaacaacataaagctgttttgctcacaggagagcagggaactgcaaaaactgtcatggttaaggcctatttgaaaaaatatgatcctgaagtacagctatccaaaagtctaaacttttcatctgccacagaaccaatgatgtttcagagaacaattgaaagctacgtggataagcgaattggaagcacatatgggccaccaggagggagaaaaatgactgtatttattgatgatattaatatgcctgtgattaatgagtggggagatcagataactaatgagattgtgcgacagatgatggaaatggaaggaatgtacagcttggacaagcctggagacttcactactattgttgatgtgcagctcatagcagcaatgatccaccctggaggtggtcgaaatgatattccacaacgtttaaaaagacaatttactgtgtttaattgtacattgccttcaaatgcttcaatagacaaaatttttggaattattggatgtggatactttgatccttgtagaagtttcaagcctcaaatatgtgagatgattgtgaatttagtctcagtgggtagagtgctgtggcaatggactaaggtgaagatgctgccaactccttctaaatttcattacatcttcaatcttcgagatctttccagaatttggcaaggaatgttgaccataaaagctgaggagtgcgcttcaatccctactctcctgtcccttttcaaacacgagtgcagcagagtaattgcagacagatttataactcctgaagatgagcagtggtttaatgcacatcttactcgtgcagttgaagaaaatattggctctgatgcagcgtcgtgtattcttcctgaaccatactttgtggattttcttcgtgagatgccagaaccaactggtgatgaacctgaagactctgtgtttgaagtacccaaaatatatgaattgatgccatcctttgactttctggctgaaaaactccagttttaccagagacagttcaatgaaatcattagaggaacatctcttgatctggtgttttttaaagatgcaatgactcatcttattaagatttcacgaataattcgaacgtcgtgtggaaatgcattgctggtgggtgttggtggttccggaaaacaaagtctttcaagattggcctcttttattgctggctatcaaatattccagataacattaaccaggtcttacaatgtgactaatctaacagatgatttaaaagctttgtacaaagttgctggtgctgatggaaaaggcatcactttcatctttactgacagtgaaataaaagatgaggcatttctagaataccttaacaacttgctatcttcaggggagatctccaacttgtttgcacgagatgagatggatgaaatcacccaaggtctgatttcagtgatgaagagggagctacctcgccatcctcctacctttgataatttgtatgaatacttcatttcaagatcaaggaagaacttacatgttgttctctgcttttctccagttggtgagaagttccgtgcccgttctttgaaatttcctggcttgatatcaggttgcactatggactggttcagccgctggccaagggaggctctgattgctgtggcctcctacttcctttcagactataatattgtctgctctagtgaaattaaaagacaagttgtagaaacaatgggcctgtttcatgacatggtttcagagagctgtgaaagttatttccaaagataccgccgaagagcacatgtgactcccaaatcttacctctcatttataaatggttataaaaacatttatgctgaaaaggtgaagttcattaatgaacaggctgaacgtatgaatattggtcttgataaactaatggaggcaagtgaatctgttgctaaactctctcaggatcttgcagtcaaggagaaggagttggcagtggcttccataaaagcagacgaagtattagcagaagtcacagtaagcgctcaggcttcagccaaaattaaaaatgaagtacaggaggtaaaggacaaagcccaaaaaattgtggatgaaattgatagtgaaaaagtgaaagctgaaagcaagcttgaggcagctaaacctgcactggaagaagcagaagcagccctgaatactatcaagccaaatgatattgccacagtcaggaaacttgcaaaaccaccacatcttattatgagaatcatggactgtgttctgttactatttcaaaagaaaattgaccctgttactatggatccagaaaaatcttgctgtaagccatcatggggagagtcattaaagttgatgagtgcaacaggattcctgtggagccttcagcagttccctaaggacactataaatgaagagactgttgagttactacagccatattttaatatggatgattatacttttgaaagtgccaaaaaagtctgtgggaatgtggctggtctcctgtcttggacacttgctatggcaatattttatggcatcaatagagaagtgttgcctctgaaggccaacctggccaagcaggaaggccggttagcagttgctaatgctgagttagggaaggcacaagccctgctggatgagaagcaagctgagctggataaagtacaggcaaaatttgatgcagcaatgaatgagaaaatggatttgcttaatgacgctgatacgtgccggaaaaagatgcaggccgcctccactctcatcgatgggctgagtggagaaaaaatccggtggacccagcaaagtaaagaattcaaagctcagattaatagacttgtaggtgatattctgctgtgcacgggattcctttcctaccttggtcctttcaatcagatatttaggaactatttgcttaaagatcaatgggaaatggagttgagagcacggaaaattcctttcacagaaaacctgaatcttatttcaatgttggtggatcctccaactattggtgagtgggggctacagggattaccaggagatgatctctcaattcagaatggcattattgtgacaaaggccaccagatacccactcctcatagacccacaaactcaaggcaaaacttggattaaatcaaaggaaaaagaaaatgatttacaggtgacatctctgaaccataaatattttcgcacacacttggaggacagcctttccttgggccgaccccttctcattgaggacattcatgaagagctggatccagccttggataatgtattagaaaagaattttattaaatctggcaccactttcaaggtgaaagtcggtgataaggaatgtgatatcatggatacatttaaactttacattactacgaagttaccaaatcctgcctttaccccagagattaatgctaaaacgtcagtcattgatttcactgttacaatgaaaggacttgagaatcagttactaaggagagtcattctaacagagaaacaggagttagaggctgagagggttaaacttttggaggatgttacttttaataagcggaagatgaaagaacttgaagataacctcctctataaattaagtgctacaaaaggctcattggtagatgacgaatctctcattggtgtacttcgaactaccaagcagacagcagctgaggtaagtgaaaagttgcatgtggctgcagaaactgagatcaagatcaacgcggctcaggaggagttccggcccgcagccacccgcggaagcatcctctacttcctcatcacagagatgagcatggtcaacatcatgtatcagacgtcattggcccagttcttgaagttatttgaccagtccatggccagatctgaaaagtcaccactacctcaaaagagaattacaaatattatcgagtacctgacatatgaagtttttacatactctgtcagaggcctatacgaaaaccacaaattcctgtttgtactcctcatgaccttaaagattgaccttcagagagggacagttaagcacagagagtttcaagctctcattaaagggggagcagctctggacctgaaagcctgtcctcccaaaccctatcgctggatccttgacatgacttggctgaatcttgtggagctgagtaaacttccacaatttgcagaaattatgaaccagatatctcgtaatgagaaggggtggaaaagctggtttgataaagatgctccagaggaggaaattatccctgatggatataatgattcactagatacctgccataaacttttacttatcaggtcttggtgcccagaccgtactgtttttcaagcaagaaagtatattgcagattctttggaggagaagtacacagaaccagttatcttaaatctggagaaaacttgggaagaaagtgatacccggacacctctgatatgcttcctgtccatgggatctgaccccaccaatcaaattgatgcattggccaagaaactgaaactggaatgtagaactatctcaatggggcaaggacaagaagtacatgctcgaaagctgattcagatgtcaatgcagcagggtggttgggtattactacaaaattgccaccttggcctggaattcatggaagaattactagagacgctaattaccactgaagccagtgatgattctttccgagtatggataactacggagccccatgatcgatttccaattacattgcttcagacctctctcaaattcactaatgagccaccccaaggtgtacgcgcaggtttgaaaagaacatttgctggaattaatcaagaccttctggacatcagtaatttacccatgtggaagccgatgctttacacagtagcatttttacactccactgtgcaggagcgacgaaaatttggccccttaggatggaatattccctacgaattcaattctgctgacttttcagccagtgttcagtttattcagaatcaccttgatgaatgcgatattaagaaaggtgtatcatggaatacggttcggtacatgatcggagaagtacaatatggaggcagagtgacagatgactttgacaaacgtctacttaattgctttgccagagtctggttcagtgagaagatgtttgaaccgtcattctgcttttatactggatataaaatccccttatgcaaaaccttagaccagtattttgaatacatccagtcactgccatccctagataaccctgaagtctttgggcttcaccctaatgctgatatcacgtatcagagtaacactgcttctgctgttcttgaaacaattaccaacattcaacccaaagagagtggaggtggtgtgggagagacccgggaggctattgtttatagattatctgaagatatgctgagtaaactccctcctgattacattcctcatgaggtgaaatctcgtttgataaagatgggccatcttaattcaatgaacatatttcttagacaagaaattgacagaatgcaaagagtcatttcaatactccgcagtagcctgagtgatctaaaattggccattgaaggaacaatcattatgagtgagaatctgagagatgctctggacaacatgtatgatgctcgtatacctcagctctggaaaagagtgtcttgggattcgtccacactgggcttctggttcactgaacttttggaaagaaatgctcagttttctacgtggatatttgaagggaggcctaatgtgttttggatgactggtttctttaatccccaaggcttcctcacagcaatgaggcaagaagtgacccgtgcccacaaaggctgggcactggacactgtgaccatccacaatgaagttctgagacagaccaaggaggagatcacgtcaccccctggggaaggtgtgtatatttatgggctctacatggatggagcagcctgggacagacggaatgggaagctcatggaatccacccccaaggtactcttcacgcagttacccgtgctccacatctttgccattaactccacggcacccaaggaccccaagctgtatgtgtgtcctatttacaagaaacccaggcgaactgatttgaccttcatcactgtggtatatttacgaacagtgttgtccccggatcactggatcctgagaggagtggcccttttgtgtgacatcaagtaagttcatttccatctgctcagggcaccagaacccacatagacagcctgtgctattgagggactcagtgatgtgtgtgtcttttctccccagtaattccttaattactctttctacattaaaaagttga

SEQ ID NO: 1013 - DNA, 12904 bp, Artificial
  cDNA Sequence
ggagcagaggctcctccctctacggaagaggctgcccctccccgttcagaagaggaagaggccccgcgccctccgacagtggaggccccggcagaagatggtttctctccttccgcagaagatgctgtttcttctgtggtggattatcgggatctcattccttctgaagaagggatagttcttccagatgatcatgaagcggatctgaatagagttcgacagaggcttgcaccgcgaccggttcagtcagtgatttcggaagtgctgtccttgccgtcttcccggaggtcctccagataccgccggagtatgagtggccttcccaatctacaggaaacattaaaagagagacaggcaagatttagagaggcaagggaaagccgaagactgaaaattgacccttcatacaaatatatatttgaaattctagcagaaaatcttggcctggacatagtaactgttgaagaattaattttggattgcccatctctggaagcatttactaatttttttgcgaaagatggttgtaagacactgaaatttttgtaccaagaaggagatgtacctggtattgaatgtggtcgaactattgctggagcaactaaaggggcaaaaatgatgaaattgtatatagacaatgcagccccggataaactaaaaggactgtgcatattttttgttcgttgccgtaatgatgttgctataaatgttaaaactattcaagaggaagcgctctttactgttctggatgcgtcgaaaggactcttaaatggaattagggatatgttggcaaatatatttctaccagctgttcttgcaacaaacaactggggtgctttaaaccagtccaagcagggagaatctgaaaaacatattttcactgaaaccatcaacagatatctttcatttttagatggtgctagaataagtattgagggaacagtgaagttaaagacaatagacaatgttaatttttccaaactgcacacctttgaagaagtaactgctgcagccagcaactcagaaactgttcatcagctggaggaagtgctgatggtatggtacaaacagatcgaacaggtacttattgagagtgagcagatgagaaaagaagctggtgattcaggtccactcactgaattggaacactggaaacgcatgtcagccaagttcaactatatcattgagcagattaaagggccaagttgtaaggctgtcataaatgtgctaaatgttgcacactccaaactgctaaagaattggcgtgatttggatgcaagaatcactgatacagcaaatgaatccaaagataatgtcagatatttgtatactttggaaaaagtgtgtcaacctctctataaccatgacctagtttccatggcacatggaatacaaaatttgattaatgccatcagaatgattcacggtgtgtcaaggtattataatacctcagagagaatgacctcattgtttatcaaggtaacaaatcaaatggtaacagcatgtaaagcatatattactgatggaggattaaaccatgtatgggatcaggaaacgccagttgtactaaagaaaattcaggactgcatttttctattcaaggaatatcaggcatcttttcataaaacaaggaaactgatttcagaatcctcaggggaaaaatcttttgaggtttcagaaatgtatatatttggaaaatttgaagctttttgcaaaagactggagaagattacagaaatgataactgttgtgcaaacatattcaaccttgagtaattctaccatagaaggaatagatattatggcaataaaattcagaaatatataccaaggggttaagaaaaagcaatatgacattctggatccaagaaggacagaatttgacacagatttcttagatttcatgacaaaaatcaatggtttagaggtacaaatacaggcatttatgaacagtagttttgggaaaatcttatcttctcagcaggctcttcagctacttcaaaggtttcagaagctgaacattccctgtctgggattagaaataaaccacacaatagagcgtattcttcagtactatgtggctgaacttgatgctactaagaagctttatcattctcagaaagatgacccccctcttgctcgcaacatgccccctatagcaggaaaaatactctgggtgaggcagctctatcgccggataagtgagcccatcaattatttctttaaaaactcagacattttatcaagtccggacggtaaagctgtcatccgtcagtataacaagatctcctatgtgctggtggaattcgaggtggtctatcacacagcctggatcagagagatttcacagttgcattacgctttacaagccacgctttttgtgcgacatccagaaacagggaagttgctggttaatttcgatcccaaaattttggaagttgttcgggaaactaagtgtatgataaaaatgaagttggatgtaccagaacaggcaaagagattgctaaaattggaaagtaaattgaaagcagacaaactgtatttgcagggtcttctgcaatattatgatgagttatgtcaggaagtgccttctgtgtttgtcaatctgatgaccccaaaaatgaaaaaggtggaatctgtgttgaggcaaggactcacagtgttaacatggtcgtctttaacactggaaagcttctttcaagaagtcgaattagttttggatatgttcaatcaacttttaaagaagatcagtgacttgtgtgaaatgcatattgatacagttctgaaggagatagccaaaactgtgttgatttctctgcctgaaagtggtgctaccaaagtagaagatatgttgaccctcaatgagacatacacaaaagaatgggctgacattctaaaccacaaaagtaagcatgtggaagaagctgtcagagaacttatatcaatatttgagcagatttatgaagtgaaatacactgggaaagtaggaaaacagtcagaacagcggaaacacgttgtttttggaagtgaaacaggagagggtgaaaacaatgactatgaagctaatattgtgaatgagtttgatactcatgataaagaagatgaatttaaaaaggagtgtaaagaggtctttgcttttttctctcatcaattactagacagtcttcaaaaagctacacggttatctctggacacaatgaaaagaagaatatttgttgcaagcctttatgggcgaaagcagtcagaagatattatttcctttataaaaagtgaagtacatcttgcaattcctaatgtggtgatgattcctagtttggatgacattcaacaagccattaaccgtatgatccagttaaccctggaggtcagcagaggagtggctcactgggggcaacagcaaatccgtcccatcaagtctgtcattcccagccccaccactactgacgtgacccatcaaaacacaggaaaactgctgaagaaggaagaaagatcttttgaagaagctattcctgcgaggaagctgaagaatttttacccgggggtagcggagcacaaggatatttctaagttggtcctgctcctttcttcctctgtaaattccctaagaaaggcagctcatgaggccctgcaggactttcagaagtacaagactctctggacagaggaccgcgatgtgaaagtgaaggaatttttggctaacaacccctctctgactgaaatcagatcagaaattctacactatgctacttttgaacaggagattgatgagttgaagcctattattgttgtaggagcacttgaattacatacagagccgatgaaattggccttatccatcgaggccaaggcatggaagatgttactctgtcgatatctgaatgaagaatacaaaaagaaaatgtcatacatgatagcatttattaatgaatacttgaaaaagttatctagacctattcgtgatttagatgatgtcagatttgcaatggaagccttgtcttgcatacgtgataatgaaattcaaatggacatgactttgggaccaattgaagaagcctatgctattttaaacagatttgaagttgaagtaaccaaagaagaatcagaagcagttgataccttaagatattctttcaacaaattgcagagcaaagctgtttcagtacaagaggacctagttcaagtgcagccaaagtttaaaagcaatctacttgagtctgtggaagtttttcgtgaggacgtgataaactttgcagaagcatatgaattggaaggacctatggttccaaatataccaccccaagaagctagcaacaggctacagatatttcaggccagtttcgatgatctgtggaggaaatttgttacgtattcatctggtgaacaactttttggattgcctgtgactgattatgaggttttacacaaaaccagaaaagaactcaacttgctgcagaagctgtatggattgtatgacaccgtaatgagcagtattagtggttattatgaaatactttggggagatgtagatattgaaaaaattaatgcagaactgctggaatttcaaaacagatgtcgtaaacttccaaaaggacttaaagattggcaagcttttttggatctcaaaaagagaattgatgatttcagtgagtcatgtcctctactggaaatgatgaccaataaggccatgaaacagagacactgggatagaatctccgagttaactggaaccccatttgatgtggaatctgattctttttgccttagaaatatcatggaagcaccactccttaaacataaggatgatattgaggatatttgcatatctgccattaaggagaaggatatcgaagccaagctgactcaggtgattgagaattggaccaaccaaaatctgagttttgcagcatttaagggaaaaggagagctcctgctcaaaggaaccgaatcgggagaaattatcactttgatggaggatagtttaatggtcttagggtctttactcagcaacagatacaatgctccatttaaaaaaaatatccagaattgggtgtataaattgtccacttcctcagatataattgaagagtggctcgtagtacagaacctttgggtttatcttgaagccgtctttgtaggtggagatattgccaaacagctgcctcaggaagcaaaacgttttcagaatattgacaagtcttggataaaaataatgcagcgagctcatgagaatcccaatgtgattaattgctgtgttggagatgaaaccatgggacaacttttacctcatttacatgagcagttggaagtatgtcagaagtcactcacagggtatttggagaagaaacgattactgtttccaagattcttctttgtatctgatccagttctcctggaaattcttggacaagccagtgattcccacaccatacagccgcatctccctgcagtatctgacaacatcaatgaggtgacatttcatgcaaaagactatgatcgcatcatggccgtcatatcaagagaaggagaaaaaattgttttggataattctgttatggccaaaggtcctgtggagatttggctactggatttgttaaaaatgcagatgtcatcattacataatataattagatccgctttctatcaaatcagtgattcaggatttcaactcttaccattcctcagccactttccagcacaggttggacttctgggaattcagatgttgtggacacacgattcagaagaggctttacgtaatgcaaaagatgacaggaaaatcatgcaagtgaccaatcagaaatttttggatattctaaatactctcattagtcagacaacacatgatctaagcaagtttgatagagtgaagttcgagactctaattaccatccatgtgcatcagagagatatttttgatgacttggtaaaaatgcatatcaaatcacctactgactttgaatggctaaaacagagtagattttattttaaggaagatttggatcaaactgtggtgtctattacagatgttgattttatttaccaaaatgaatttctgggatgtactgatcgtcttgttatcactccattaacagatagatgctatatcacgttagctcaggccttgggcatgaacatgggaggtgctcccgcaggacctgctggcactggcaaaacagaaaccacaaaagacatgggaaggtgtttgggaaaatatgtggtcgtgttcaattgctcagatcaaatggatttcagaggcctaggaaggattttcaaaggtcttgcacagtcgggttcctggggctgttttgatgagtttaacagaattgaattgcctgtattatcagtggcagcacaacaaatttatattgttttgacagcaagaaaagaaagaaagaaacagttcattttttctgatggtgattgtgttgatttaaatccagaatttggaatcttcttaacgatgaaccctggatatgctgggcgccaggaactaccagaaaacctaaaaatccagtttagaactgttgctatgatggttcctgatagacagatcattatgagagttaaacttgcaagctgtggttttcttgaaaatgttatcttggctcaaaaattttacgttctttacaaactctgtgaagagcaacttactaaacaggttcattatgactttggattgagaaatattctgtctgtattgaggactcttggatctcaaaaaagagccagaccagaagatagtgaattaagcattgtcatgagaggactaagagatatgaacctttccaaactggttgatgaagatgaacccctgttcctcagcttaatcaatgacctgttcccaggactgcaactggatagtaatacttatgcagaactgcaaaacgcagtagcccatcaggttcagatagagggtttgattaaccatccaccctggaacctgaaactcgtgcagttatatgagacgtctttggtacggcatggcttgatgactcttgggcccagtggttctggaaagacaaccgttatcacgattctaatgaaggcgcaaacagaatgcggaaggcctcatagagaaatgcgaatgaatccaaaagccattactgcacctcagatgtttggcagactggacactgctaccaatgactggacagatgggattttttctactctgtggagaaaaacattaaaagctaaaaaaggtgaaaacattttcctcattttagatggtcctgtggatgccatctggattgagaacttaaattccgttttggatgacaataaaactctgacgttagctaatggagatcgcattcccatggcccctagttgtaagcttctgtttgaagtccacaatatcgagaacgcctctcctgccacggtttctaggatgggcatggtctatatcagcagctctgctctcagctggaggccaatcttacaggcatggttgaagaaacgcactgcacaggaagctgctgtattcctgacactgtatgagaaagtctttgaagatacatacacatatatgaagctaaatctcaatcccaaaatgcagctcttggagtgcaactatattgtgcaatctctcaatcttctggaagggttaattccctccaaagaagaaggcggtgtttcctgtgtcgaacatcttcataaattatttgtgtttggcctaatgtggagtttaggagcccttctggaattagaaagcagagaaaagcttgaagccttcttacggcagcatgaaagcaagttggacttaccagaaatacctaaaggctcaaatcaaaccatgtatgagttttatgttactgattatggtgattgggagcactggaataagaaacttcagccttattattatccaactgacagtattccggaatattcatcaattttggttccaaatgttgacaatattagaacaaattttttgatagacaccattgcaaaacaacataaagctgttttgctcacaggagagcagggaactgcaaaaactgtcatggttaaggcctatttgaaaaaatatgatcctgaagtacagctatccaaaagtctaaacttttcatctgccacagaaccaatgatgtttcagagaacaattgaaagctacgtggataagcgaattggaagcacatatgggccaccaggagggagaaaaatgactgtatttattgatgatattaatatgcctgtgattaatgagtggggagatcagataactaatgagattgtgcgacagatgatggaaatggaaggaatgtacagcttggacaagcctggagacttcactactattgttgatgtgcagctcatagcagcaatgatccaccctggaggtggtcgaaatgatattccacaacgtttaaaaagacaatttactgtgtttaattgtacattgccttcaaatgcttcaatagacaaaatttttggaattattggatgtggatactttgatccttgtagaagtttcaagcctcaaatatgtgagatgattgtgaatttagtctcagtgggtagagtgctgtggcaatggactaaggtgaagatgctgccaactccttctaaatttcattacatcttcaatcttcgagatctttccagaatttggcaaggaatgttgaccataaaagctgaggagtgcgcttcaatccctactctcctgtcccttttcaaacacgagtgcagcagagtaattgcagacagatttataactcctgaagatgagcagtggtttaatgcacatcttactcgtgcagttgaagaaaatattggctctgatgcagcgtcgtgtattcttcctgaaccatactttgtggattttcttcgtgagatgccagaaccaactggtgatgaacctgaagactctgtgtttgaagtacccaaaatatatgaattgatgccatcctttgactttctggctgaaaaactccagttttaccagagacagttcaatgaaatcattagaggaacatctcttgatctggtgttttttaaagatgcaatgactcatcttattaagatttcacgaataattcgaacgtcgtgtggaaatgcattgctggtgggtgttggtggttccggaaaacaaagtctttcaagattggcctcttttattgctggctatcaaatattccagataacattaaccaggtcttacaatgtgactaatctaacagatgatttaaaagctttgtacaaagttgctggtgctgatggaaaaggcatcactttcatctttactgacagtgaaataaaagatgaggcatttctagaataccttaacaacttgctatcttcaggggagatctccaacttgtttgcacgagatgagatggatgaaatcacccaaggtctgatttcagtgatgaagagggagctacctcgccatcctcctacctttgataatttgtatgaatacttcatttcaagatcaaggaagaacttacatgttgttctctgcttttctccagttggtgagaagttccgtgcccgttctttgaaatttcctggcttgatatcaggttgcactatggactggttcagccgctggccaagggaggctctgattgctgtggcctcctacttcctttcagactataatattgtctgctctagtgaaattaaaagacaagttgtagaaacaatgggcctgtttcatgacatggtttcagagagctgtgaaagttatttccaaagataccgccgaagagcacatgtgactcccaaatcttacctctcatttataaatggttataaaaacatttatgctgaaaaggtgaagttcattaatgaacaggctgaacgtatgaatattggtcttgataaactaatggaggcaagtgaatctgttgctaaactctctcaggatcttgcagtcaaggagaaggagttggcagtggcttccataaaagcagacgaagtattagcagaagtcacagtaagcgctcaggcttcagccaaaattaaaaatgaagtacaggaggtaaaggacaaagcccaaaaaattgtggatgaaattgatagtgaaaaagtgaaagctgaaagcaagcttgaggcagctaaacctgcactggaagaagcagaagcagccctgaatactatcaagccaaatgatattgccacagtcaggaaacttgcaaaaccaccacatcttattatgagaatcatggactgtgttctgttactatttcaaaagaaaattgaccctgttactatggatccagaaaaatcttgctgtaagccatcatggggagagtcattaaagttgatgagtgcaacaggattcctgtggagccttcagcagttccctaaggacactataaatgaagagactgttgagttactacagccatattttaatatggatgattatacttttgaaagtgccaaaaaagtctgtgggaatgtggctggtctcctgtcttggacacttgctatggcaatattttatggcatcaatagagaagtgttgcctctgaaggccaacctggccaagcaggaaggccggttagcagttgctaatgctgagttagggaaggcacaagccctgctggatgagaagcaagctgagctggataaagtacaggcaaaatttgatgcagcaatgaatgagaaaatggatttgcttaatgacgctgatacgtgccggaaaaagatgcaggccgcctccactctcatcgatgggctgagtggagaaaaaatccggtggacccagcaaagtaaagaattcaaagctcagattaatagacttgtaggtgatattctgctgtgcacgggattcctttcctaccttggtcctttcaatcagatatttaggaactatttgcttaaagatcaatgggaaatggagttgagagcacggaaaattcctttcacagaaaacctgaatcttatttcaatgttggtggatcctccaactattggtgagtgggggctacagggattaccaggagatgatctctcaattcagaatggcattattgtgacaaaggccaccagatacccactcctcatagacccacaaactcaaggcaaaacttggattaaatcaaaggaaaaagaaaatgatttacaggtgacatctctgaaccataaatattttcgcacacacttggaggacagcctttccttgggccgaccccttctcattgaggacattcatgaagagctggatccagccttggataatgtattagaaaagaattttattaaatctggcaccactttcaaggtgaaagtcggtgataaggaatgtgatatcatggatacatttaaactttacattactacgaagttaccaaatcctgcctttaccccagagattaatgctaaaacgtcagtcattgatttcactgttacaatgaaaggacttgagaatcagttactaaggagagtcattctaacagagaaacaggagttagaggctgagagggttaaacttttggaggatgttacttttaataagcggaagatgaaagaacttgaagataacctcctctataaattaagtgctacaaaaggctcattggtagatgacgaatctctcattggtgtacttcgaactaccaagcagacagcagctgaggtaagtgaaaagttgcatgtggctgcagaaactgagatcaagatcaacgcggctcaggaggagttccggcccgcagccacccgcggaagcatcctctacttcctcatcacagagatgagcatggtcaacatcatgtatcagacgtcattggcccagttcttgaagttatttgaccagtccatggccagatctgaaaagtcaccactacctcaaaagagaattacaaatattatcgagtacctgacatatgaagtttttacatactctgtcagaggcctatacgaaaaccacaaattcctgtttgtactcctcatgaccttaaagattgaccttcagagagggacagttaagcacagagagtttcaagctctcattaaagggggagcagctctggacctgaaagcctgtcctcccaaaccctatcgctggatccttgacatgacttggctgaatcttgtggagctgagtaaacttccacaatttgcagaaattatgaaccagatatctcgtaatgagaaggggtggaaaagctggtttgataaagatgctccagaggaggaaattatccctgatggatataatgattcactagatacctgccataaacttttacttatcaggtcttggtgcccagaccgtactgtttttcaagcaagaaagtatattgcagattctttggaggagaagtacacagaaccagttatcttaaatctggagaaaacttgggaagaaagtgatacccggacacctctgatatgcttcctgtccatgggatctgaccccaccaatcaaattgatgcattggccaagaaactgaaactggaatgtagaactatctcaatggggcaaggacaagaagtacatgctcgaaagctgattcagatgtcaatgcagcaggtatgtgacaagagactgctcctgctgcaacattattgctagaaaccccacaatcatggatgttaccacattcttctcgtgatgctcaatcctggtttttccatttttgtttatcattacctgtgaattttaaacctcagtctagtttcctcctgatattcgcatggaaagcttattccattttctatagtatatgctccattttaccttcaccaattttttgttcgttttatgatttgggagacacaccttctgatttctaagaatgcatctctagcagtcttggaatttcatgatcaatatgaataggtagtacttaaggagtgacagattgagacagttaaatttccattttcagttaaaggcagactttcatttttcattaacggatcatttcaggcaaagaaggaatatt

SEQ ID NO: 1014 - DNA, 10985 bp, Artificial
  cDNA Sequence
gtggcgcgagcttctgaaactaggcggcagaggcggagccgctgtggcactgctgcgcctctgctgcgcctcgggtgtcttttgcggcggtgggtcgccgccgggagaagcgtgaggggacagatttgtgaccggcgcggtttttgtcagcttactccggccaaaaaagaactgcacctctggagcggacttatttaccaagcattggaggaatatcgtaggtaaaaatgcctattggatccaaagagaggccaacattttttgaaatttttaagacacgctgcaacaaagcagatttaggaccaataagtcttaattggtttgaagaactttcttcagaagctccaccctataattctgaacctgcagaagaatctgaacataaaaacaacaattacgaaccaaacctatttaaaactccacaaaggaaaccatcttataatcagctggcttcaactccaataatattcaaagagcaagggctgactctgccgctgtaccaatctcctgtaaaagaattagataaattcaaattagacttaggaaggaatgttcccaatagtagacataaaagtcttcgcacagtgaaaactaaaatggatcaagcagatgatgtttcctgtccacttctaaattcttgtcttagtgaaagtcctgttgttctacaatgtacacatgtaacaccacaaagagataagtcagtggtatgtgggagtttgtttcatacaccaaagtttgtgaagggtcgtcagacaccaaaacatatttctgaaagtctaggagctgaggtggatcctgatatgtcttggtcaagttctttagctacaccacccacccttagttctactgtgctcatagtcagaaatgaagaagcatctgaaactgtatttcctcatgatactactgctaatgtgaaaagctatttttccaatcatgatgaaagtctgaagaaaaatgatagatttatcgcttctgtgacagacagtgaaaacacaaatcaaagagaagctgcaagtcatggatttggaaaaacatcagggaattcatttaaagtaaatagctgcaaagaccacattggaaagtcaatgccaaatgtcctagaagatgaagtatatgaaacagttgtagatacctctgaagaagatagtttttcattatgtttttctaaatgtagaacaaaaaatctacaaaaagtaagaactagcaagactaggaaaaaaattttccatgaagcaaacgctgatgaatgtgaaaaatctaaaaaccaagtgaaagaaaaatactcatttgtatctgaagtggaaccaaatgatactgatccattagattcaaatgtagcaaatcagaagccctttgagagtggaagtgacaaaatctccaaggaagttgtaccgtctttggcctgtgaatggtctcaactaaccctttcaggtctaaatggagcccagatggagaaaatacccctattgcatatttcttcatgtgaccaaaatatttcagaaaaagacctattagacacagagaacaaaagaaagaaagattttcttacttcagagaattctttgccacgtatttctagcctaccaaaatcagagaagccattaaatgaggaaacagtggtaaataagagagatgaagagcagcatcttgaatctcatacagactgcattcttgcagtaaagcaggcaatatctggaacttctccagtggcttcttcatttcagggtatcaaaaagtctatattcagaataagagaatcacctaaagagactttcaatgcaagtttttcaggtcatatgactgatccaaactttaaaaaagaaactgaagcctctgaaagtggactggaaatacatactgtttgctcacagaaggaggactccttatgtccaaatttaattgataatggaagctggccagccaccaccacacagaattctgtagctttgaagaatgcaggtttaatatccactttgaaaaagaaaacaaataagtttatttatgctatacatgatgaaacatcttataaaggaaaaaaaataccgaaagaccaaaaatcagaactaattaactgttcagcccagtttgaagcaaatgcttttgaagcaccacttacatttgcaaatgctgattcaggtttattgcattcttctgtgaaaagaagctgttcacagaatgattctgaagaaccaactttgtccttaactagctcttttgggacaattctgaggaaatgttctagaaatgaaacatgttctaataatacagtaatctctcaggatcttgattataaagaagcaaaatgtaataaggaaaaactacagttatttattaccccagaagctgattctctgtcatgcctgcaggaaggacagtgtgaaaatgatccaaaaagcaaaaaagtttcagatataaaagaagaggtcttggctgcagcatgtcacccagtacaacattcaaaagtggaatacagtgatactgactttcaatcccagaaaagtcttttatatgatcatgaaaatgccagcactcttattttaactcctacttccaaggatgttctgtcaaacctagtcatgatttctagaggcaaagaatcatacaaaatgtcagacaagctcaaaggtaacaattatgaatctgatgttgaattaaccaaaaatattcccatggaaaagaatcaagatgtatgtgctttaaatgaaaattataaaaacgttgagctgttgccacctgaaaaatacatgagagtagcatcaccttcaagaaaggtacaattcaaccaaaacacaaatctaagagtaatccaaaaaaatcaagaagaaactacttcaatttcaaaaataactgtcaatccagactctgaagaacttttctcagacaatgagaataattttgtcttccaagtagctaatgaaaggaataatcttgctttaggaaatactaaggaacttcatgaaacagacttgacttgtgtaaacgaacccattttcaagaactctaccatggttttatatggagacacaggtgataaacaagcaacccaagtgtcaattaaaaaagatttggtttatgttcttgcagaggagaacaaaaatagtgtaaagcagcatataaaaatgactctaggtcaagatttaaaatcggacatctccttgaatatagataaaataccagaaaaaaataatgattacatgaacaaatgggcaggactcttaggtccaatttcaaatcacagttttggaggtagcttcagaacagcttcaaataaggaaatcaagctctctgaacataacattaagaagagcaaaatgttcttcaaagatattgaagaacaatatcctactagtttagcttgtgttgaaattgtaaataccttggcattagataatcaaaagaaactgagcaagcctcagtcaattaatactgtatctgcacatttacagagtagtgtagttgtttctgattgtaaaaatagtcatataacccctcagatgttattttccaagcaggattttaattcaaaccataatttaacacctagccaaaaggcagaaattacagaactttctactatattagaagaatcaggaagtcagtttgaatttactcagtttagaaaaccaagctacatattgcagaagagtacatttgaagtgcctgaaaaccagatgactatcttaaagaccacttctgaggaatgcagagatgctgatcttcatgtcataatgaatgccccatcgattggtcaggtagacagcagcaagcaatttgaaggtacagttgaaattaaacggaagtttgctggcctgttgaaaaatgactgtaacaaaagtgcttctggttatttaacagatgaaaatgaagtggggtttaggggcttttattctgctcatggcacaaaactgaatgtttctactgaagctctgcaaaaagctgtgaaactgtttagtgatattgagaatattagtgaggaaacttctgcagaggtacatccaataagtttatcttcaagtaaatgtcatgattctgttgtttcaatgtttaagatagaaaatcataatgataaaactgtaagtgaaaaaaataataaatgccaactgatattacaaaataatattgaaatgactactggcacttttgttgaagaaattactgaaaattacaagagaaatactgaaaatgaagataacaaatatactgctgccagtagaaattctcataacttagaatttgatggcagtgattcaagtaaaaatgatactgtttgtattcataaagatgaaacggacttgctatttactgatcagcacaacatatgtcttaaattatctggccagtttatgaaggagggaaacactcagattaaagaagatttgtcagatttaacttttttggaagttgcgaaagctcaagaagcatgtcatggtaatacttcaaataaagaacagttaactgctactaaaacggagcaaaatataaaagattttgagacttctgatacattttttcagactgcaagtgggaaaaatattagtgtcgccaaagagtcatttaataaaattgtaaatttctttgatcagaaaccagaagaattgcataacttttccttaaattctgaattacattctgacataagaaagaacaaaatggacattctaagttatgaggaaacagacatagttaaacacaaaatactgaaagaaagtgtcccagttggtactggaaatcaactagtgaccttccagggacaacccgaacgtgatgaaaagatcaaagaacctactctattgggttttcatacagctagcgggaaaaaagttaaaattgcaaaggaatctttggacaaagtgaaaaacctttttgatgaaaaagagcaaggtactagtgaaatcaccagttttagccatcaatgggcaaagaccctaaagtacagagaggcctgtaaagaccttgaattagcatgtgagaccattgagatcacagctgccccaaagtgtaaagaaatgcagaattctctcaataatgataaaaaccttgtttctattgagactgtggtgccacctaagctcttaagtgataatttatgtagacaaactgaaaatctcaaaacatcaaaaagtatctttttgaaagttaaagtacatgaaaatgtagaaaaagaaacagcaaaaagtcctgcaacttgttacacaaatcagtccccttattcagtcattgaaaattcagccttagctttttacacaagttgtagtagaaaaacttctgtgagtcagacttcattacttgaagcaaaaaaatggcttagagaaggaatatttgatggtcaaccagaaagaataaatactgcagattatgtaggaaattatttgtatgaaaataattcaaacagtactatagctgaaaatgacaaaaatcatctctccgaaaaacaagatacttatttaagtaacagtagcatgtctaacagctattcctaccattctgatgaggtatataatgattcaggatatctctcaaaaaataaacttgattctggtattgagccagtattgaagaatgttgaagatcaaaaaaacactagtttttccaaagtaatatccaatgtaaaagatgcaaatgcatacccacaaactgtaaatgaagatatttgcgttgaggaacttgtgactagctcttcaccctgcaaaaataaaaatgcagccattaaattgtccatatctaatagtaataattttgaggtagggccacctgcatttaggatagccagtggtaaaatcgtttgtgtttcacatgaaacaattaaaaaagtgaaagacatatttacagacagtttcagtaaagtaattaaggaaaacaacgagaataaatcaaaaatttgccaaacgaaaattatggcaggttgttacgaggcattggatgattcagaggatattcttcataactctctagataatgatgaatgtagcacgcattcacataaggtttttgctgacattcagagtgaagaaattttacaacataaccaaaatatgtctggattggagaaagtttctaaaatatcaccttgtgatgttagtttggaaacttcagatatatgtaaatgtagtatagggaagcttcataagtcagtctcatctgcaaatacttgtgggatttttagcacagcaagtggaaaatctgtccaggtatcagatgcttcattacaaaacgcaagacaagtgttttctgaaatagaagatagtaccaagcaagtcttttccaaagtattgtttaaaagtaacgaacattcagaccagctcacaagagaagaaaatactgctatacgtactccagaacatttaatatcccaaaaaggcttttcatataatgtggtaaattcatctgctttctctggatttagtacagcaagtggaaagcaagtttccattttagaaagttccttacacaaagttaagggagtgttagaggaatttgatttaatcagaactgagcatagtcttcactattcacctacgtctagacaaaatgtatcaaaaatacttcctcgtgttgataagagaaacccagagcactgtgtaaactcagaaatggaaaaaacctgcagtaaagaatttaaattatcaaataacttaaatgttgaaggtggttcttcagaaaataatcactctattaaagtttctccatatctctctcaatttcaacaagacaaacaacagttggtattaggaaccaaagtgtcacttgttgagaacattcatgttttgggaaaagaacaggcttcacctaaaaacgtaaaaatggaaattggtaaaactgaaactttttctgatgttcctgtgaaaacaaatatagaagtttgttctacttactccaaagattcagaaaactactttgaaacagaagcagtagaaattgctaaagcttttatggaagatgatgaactgacagattctaaactgccaagtcatgccacacattctctttttacatgtcccgaaaatgaggaaatggttttgtcaaattcaagaattggaaaaagaagaggagagccccttatcttagtgggagaaccctcaatcaaaagaaacttattaaatgaatttgacaggataatagaaaatcaagaaaaatccttaaaggcttcaaaaagcactccagatggcacaataaaagatcgaagattgtttatgcatcatgtttctttagagccgattacctgtgtaccctttcgcacaactaaggaacgtcaagagatacagaatccaaattttaccgcacctggtcaagaatttctgtctaaatctcatttgtatgaacatctgactttggaaaaatcttcaagcaatttagcagtttcaggacatccattttatcaagtttctgctacaagaaatgaaaaaatgagacacttgattactacaggcagaccaaccaaagtctttgttccaccttttaaaactaaatcacattttcacagagttgaacagtgtgttaggaatattaacttggaggaaaacagacaaaagcaaaacattgatggacatggctctgatgatagtaaaaataagattaatgacaatgagattcatcagtttaacaaaaacaactccaatcaagcagtagctgtaactttcacaaagtgtgaagaagaacctttagatttaattacaagtcttcagaatgccagagatatacaggatatgcgaattaagaagaaacaaaggcaacgcgtctttccacagccaggcagtctgtatcttgcaaaaacatccactctgcctcgaatctctctgaaagcagcagtaggaggccaagttccctctgcgtgttctcataaacagctgtatacgtatggcgtttctaaacattgcataaaaattaacagcaaaaatgcagagtcttttcagtttcacactgaagattattttggtaaggaaagtttatggactggaaaaggaatacagttggctgatggtggatggctcataccctccaatgatggaaaggctggaaaagaagaattttatagggctctgtgtgacactccaggtgtggatccaaagcttatttctagaatttgggtttataatcactatagatggatcatatggaaactggcagctatggaatgtgcctttcctaaggaatttgctaatagatgcctaagcccagaaagggtgcttcttcaactaaaatacagatatgatacggaaattgatagaagcagaagatcggctataaaaaagataatggaaagggatgacacagctgcaaaaacacttgttctctgtgtttctgacataatttcattgagcgcaaatatatctgaaacttctagcaataaaactagtagtgcagatacccaaaaagtggccattattgaacttacagatgggtggtatgctgttaaggcccagttagatcctcccctcttagctgtcttaaagaatggcagactgacagttggtcagaagattattcttcatggagcagaactggtgggctctcctgatgcctgtacacctcttgaagccccagaatctcttatgttaaagatttctgctaacagtactcggcctgctcgctggtataccaaacttggattctttcctgaccctagaccttttcctctgcccttatcatcgcttttcagtgatggaggaaatgttggttgtgttgatgtaattattcaaagagcataccctatacagtggatggagaagacatcatctggattatacatatttcgcaatgaaagagaggaagaaaaggaagcagcaaaatatgtggaggcccaacaaaagagactagaagccttattcactaaaattcaggaggaatttgaagaacatgaagaaaacacaacaaaaccatatttaccatcacgtgcactaacaagacagcaagttcgtgctttgcaagatggtgcagagctttatgaagcagtgaagaatgcagcagacccagcttaccttgagggttatttcagtgaagagcagttaagagccttgaataatcacaggcaaatgttgaatgataagaaacaagctcagatccagttggaaattaggaaggccatggaatctgctgaacaaaaggaacaaggtttatcaagggatgtcacaaccgtgtggaagttgcgtattgtaagctattcaaaaaaagaaaaagattcagttatactgagtatttggcgtccatcatcagatttatattctctgttaacagaaggaaagagatacagaatttatcatcttgcaacttcaaaatctaaaagtaaatctgaaagagctaacatacagttagcagcgacaaaaaaaactcagtatcaacaactaccggtttcagatgaaattttatttcagatttaccagccacgggagccccttcacttcagcaaatttttagatccagactttcagccatcttgttctgaggtggacctaataggatttgtcgtttctgttgtgaaaaaaacaggacttgcccctttcgtctatttgtcagacgaatgttacaatttactggcaataaagttttggatagaccttaatgaggacattattaagcctcatatgttaattgctgcaagcaacctccagtggcgaccagaatccaaatcaggccttcttactttatttgctggagatttttctgtgttttctgctagtccaaaagagggccactttcaagagacattcaacaaaatgaaaaatactgttgagaatattgacatactttgcaatgaagcagaaaacaagcttatgcatatactgcatgcaaatgatcccaagtggtccaccccaactaaagactgtacttcagggccgtacactgctcaaatcattcctggtacaggaaacaagcttctgatgtcttctcctaattgtgagatatattatcaaagtcctttatcactttgtatggccaaaaggaagtctgtttccacacctgtctcagcccagatgacttcaaagtcttgtaaaggggagaaagagattgatgaccaaaagaactgcaaaaagagaagagccttggatttcttgagtagactgcctttacctccacctgttagtcccatttgtacatttgtttctccggctgcacagaaggcatttcagccaccaaggagttgtggcaccaaatacgaaacacccataaagaaaaaagaactgaattctcctcagatgactccatttaaaaaattcaatgaaatttctcttttggaaagtaattcaatagctgacgaagaacttgcattgataaatacccaagctcttttgtctggttcaacaggagaaaaacaatttatatctgtcagtgaatccactaggactgctcccaccagttcagaagattatctcagactgaaacgacgttgtactacatctctgatcaaagaacaggagagttcccaggccagtacggaagaatgtgagaaaaataagcaggacacaattacaactaaaaaatatatctaagcatttgcaaaggcgacaataaattattgacgcttaacctttccagtttataagactggaatataatttcaaaccacacattagtacttatgttgcacaatgagaaaagaaattagtttcaaatttacctcagcgtttgtgtatcgggcaaaaatcgttttgcccgattccgtattggtatacttttgcttcagttgcatatcttaaaactaaatgtaatttattaactaatcaagaaaaacatctttggctgagctcggtggctcatgcctgtaatcccaacactttgagaagctgaggtgggaggagtgcttgaggccaggagttcaagaccagcctgggcaacatagggagacccccatctttacaaagaaaaaaaaaaggggaaaagaaaatcttttaaatctttggatttgatcactacaagtattattttacaatcaacaaaatggtcatccaaactcaaacttgagaaaatatcttgctttcaaattggcactg

SEQ ID NO: 1015 - DNA, 842 bp, Artificial
  cDNA Sequence
aatctaaaagtaaatctgaaagagctaacatacagttagcagcgacaaaaaaaactcagtatcaacaactaccggtttcagatgaaattttatttcagatttaccagccacgggagccccttcacttcagcaaatttttagatccagactttcagccatcttgttctgaggtggacctaataggatttgtcgtttctgttgtgaaaaaaacaggacttgcccctttcgtctatttgtcagacgaatgttacaatttactggcaataaagttttggatagaccttaatgaggacattattaagcctcatatgttaattgctgcaagcaacctccagtggcgaccagaatccaaatcaggccttcttactttatttgctggagatttttctgtgttttctgctagtccaaaagagggccactttcaagagacattcaacaaaatgaaaaatactgttgagagacagagtcttgctttgtcacccccaggctggagtacaatagcacaatctcggatcactgcagtgtctgcctcctgggctcaagcgattctcgtgccttagcctcccaagtagctgggactacagaatattgacatactttgcaatgaagcagaaaacaagcttatgcatatactgcatgcaaatgatcccaagtggtccaccccaactaaagactgtacttcagggccgtacactgctcaaatcattcctggtacaggaaacaagcttctgatgtcttctcctaattgtgagatatattatcaaagtcctttatcactttgtatggccaaaaggaagtctgtttccacacctgtctcagcccagatgacttcaaagtcttgt

SEQ ID NO: 1016 - DNA, 1449 bp, Artificial
  cDNA Sequence
atgagtaaaaatgctgatgatcatcaggtcaaggatagtctggagcagttaagatgttactttacatgggaggtatcaattaaagatgatgaaatgcctgatttggaaaacagagtcttggaccagattgggtttctagactaaatacagtgtgggaatacacaatacacaacctactagcctatgtgaaacacccgaaaggccagaatgaggaagtgctggagaacttgaaagaagctgaagacttaatccagaaagaagatgccaatcagatttgagaagcctggtaacctggggcaactttgcctgggtgtattaccacatgggcagactggcagaaacccagacttacctggacaaggtagagaacatttgcaagaagttttcaagtcctttctgtcacagaatggaatgtccagagatggactgtgaggaagaacgggccttgctggaatgtggagggaagaattatgaacaggccaaggcctgctttgaaaaggatctggcagtggctgctgaaaaccctgaactcaacactgggtatgaaatcaccgcctgtcgcctggatggctttaaattagcaacgggggatcacaagtcattttctttgcctaccctaaggcaggctgtcaggctaaatgtagatgatagatatagtaaggttcttcttgccctgaagctttgggatgaaggacaggaagctgaaggagaaaagtactttgaaggagctctggccaatacgtccatgcagacctttgtctttggatatgtctttggatatgtcttctcttcttactgaagagaagactttgtggatgaagctcttgagctcttaaaaacctccttgcaggcaactcccacttctgccttcctgcatcaccatatagggctttgtgacaggacacaaaagatccaaatgaaggaagctaccaacaagcagcctagagggcagaacagagaaaaggtagacaaaatgataagatcacctgtatttcatcttcaatctgctgtggaacaaaagcccacatttgaggttgcctatatagaactggcaggaaagtatatagaagcaggcaatcacagaaaagctgaagacacttttcaaaaagtgttgtgcatgaaaccagtggtagaagaaataatgcaagacatatatttgcactatggtagatttcaggaatttcaaaagaaatctgatgtcagtgcaattatccgttatttaaaagcaataaaaatagaaaaaggcataattttcaagggataaaagtgtcaattctttggagaaactggttttaaggaaacttcagagaaatgcgttagacctggaaagcttaagcctccttaggtttctgtacaaattgaaaggaaacatgaatgaagctctagagtactgtgagtgggccctgagactggctgctgagttttagaactctgtgggacagggtcctt

SEQ ID NO: 1017 - DNA, 1145 bp, Artificial
  cDNA Sequence
gcggccgccccggccgcccccgcgggggacacctcctcgccgccacagctttaggaaacacctctacctcctgcgaggcctcccgggctccgggaaaactacactggccagggacgactggagtgagcactggcctgggagtctgaagattgtgccttcagacctacttcgtcacttactagctggcgactttggtcagtcatctagtttttccgggccttatgttccttacatgtgactactaaaaggctactagattataggatttattaaagatccttctgactcttaatttccagtggtcagattaaaaatagtttgctaataatggctatgttaaagagctctgaccttggagtcaatttatggctccacatccaagctctaccattcactagttttgcttttcacccaacccctctgtgcctcggtttccttttctgttaaatggggatatctgttctgtttgcctctgagggttttgtgaacattaaatgtgtgtgggaggactttttaaacttaaagtgctatatacattttaagaggtgttagttactgctccgttgttggtcagctgagataaatcttcagtgttccctggatcctggctctggagtgaagaaggtagcttggcagttgactttgagtcctcccgtttcgctgggcattggcagttctgggagcagagcagccttggcatgccatggggtggattgtgtgtttatagaaaagtctgggacgtaagcgaggaaatgggccacagctcagcggaagggaggccggtggtgaggatggaatggtggagaggcaggctcaggtgtggcccaccaggagctgccttccccacttttttgggaggtagggtggggaagaagaaaagagcaaattgtttaaaaatacacatgtatatagaaaatagtaaaactgtaaggttatctgtgtgttgttggattctgggaaattcacattttctctattctctgtattttccaaattttctataacgaatatgtatttcttagaataaaaatttttttcttcaaaatttggaggaaatcgctttttacaaatgtgggttcatctttttctgcttaaccttttttctcatttgattaaagaactaataaaaatgtttttgaaattaa

SEQ ID NO: 1018 - DNA, 1423 bp, Artificial
  cDNA Sequence
cccggccgcccccgcgggggacacctcctcgccgccacagctttaggaaacacctctacctcctgcgaggcctcccgggctccgggaaaactacactggccagacaattgcagcatgactttcccagggccctgattttcagcacggatgattttttcttcagggaagatggtgcctatgagttcaatcctgacttcctggaggaagctcatgaatggaaccaaaaaagaggtgacaaattccttcccaaactcctgggaaaccctgatgtgcacatagattgtagctgctgcagaatgaataaattttatggaaggagtttaaccgaaagttctgccaatttttcccccaaaacagaacaccagagcataacctccttagattccagagaaagaaaattattgattgatagtgggctctgaagttgtgtgatgaggagatgagggcatcctgtaataaaaatgacgaatagagattacgctcaccttccctctgattgttgcatgttgttcactgttatgtaacattgtgttgcagcaagaaaagcaatgaggaatggcatatcccccattattattgataataccaacctccacgcctgggaaatgaagccctatgcagtcatggtaggaagaagtatcattctgaattttcagttatggacattttgtgagaaagttgaagcatctgttctttcctctttttctgatgttccatgatttcatatttgctaacagtggttctcccagggagaaggtaacgaggttttattttagtgtttctctgctgttcaatggctgaagtttgctgagatgctaatctcacttgaggatacaatttaaaaatagtccttggcaaatggtctttggtgtgaatccttgataacttttctgtcttaattactttcctacggcaaggcatacagagaagcacccaccgaaatgttcagatcaatactaatactgaattagatggcgctcgtagtggagctacaggtcacaacaggacggttctgcctctggtgagccgggaatttccacactgtgtgctgttgctccctgggagttccagggcaacagaatattttagtctaaagacagatttagggccaggtgtggtggctcacgcctgtaatcccagcaatttggggggccgaggtgggcggatcacttgagtccaggagttcgagaccagcctggccaccatggtgaaaacccatctctactaaaaatacaaaaatagccggggcatggtggcgggcgcctgtaatcctagctacttgggaggctgaggcaggagaatagcttgaacctgggaggcggaggttgcagtgacctgagatcacaccactgctctccagcctgggtgacaagagtgaaattccatctcaaaaaaagaaaattaaataaaaaataaaaacaga

SEQ ID NO: 1019 - DNA, 764 bp, Artificial
  cDNA Sequence
atggtactgctgaagatcatgatcacggagaaaagtcagagtgctcagtgccaacccaagggattctttccagagacgtacccgttggataccaaaattagtttggataatctgttcaaccattcttgataagttatctgaataataaaaaaactcaacagaggagggacgactggagtgagcactggcctgggagtctgaagattgtgccttcagacctacttcgtcacttactagctggcgactttggtcagtcatctagtttttccgggccttatgttccttacatgtgactactaaaaggctactagattataggatttattaaagatccttctgactcttaatttccagtggtcagattaaaaatagtttgctaataatggctatgttaaagagctctgaccttggagtcaatttatggctccacatccaagctctaccattcactagttttgcttttcacccaacccctctgtgcctcggtttccttttctgttaaatggggatatctgttctgtttgcctctgagggttttgtgaacattaaatgtgtgtgggaggactttttaaacttaaagtgctatatacattttaagaggtgttagttactgctccgttgttggtcagctgagataaatcttcagtgttccctggatcctggctctggagtgaagaaggtagcttggcagttgactttgagtcctcccgtttcgctgggcattggcagttctgggagcagagcagccttggcatgccatgggg

SEQ ID NO: 1020 - DNA, 2141 bp, Artificial
  cDNA Sequence
cgtgacttcagtaaagggaacccggggctctcgcagccagccctcctgcccatggaggacagtttccttcaatcttttgggaggctgagcctccagccccagcagcagcagcagcggcagcggccgccccggccgcccccgcgggggacacctcctcgccgccacagctttaggaaacacctctacctcctgcgaggcctcccgggctccgggaaaactacactggccagacaattgcagcatgactttcccagggccctgattttcagcacggatgattttttcttcagggaagatggtgcctatgagttcaatcctgacttcctggaggaagctcatgaatggaaccaaaaaagagcaagaaaagcaatgaggaatggcatatcccccattattattgataataccaacctccacgcctgggaaatgaagccctatgcagtcatggtatttcagaccgaacaaaagaatcttttcaggctggaaatggacatggtagttttcaggccagaaatgaagaaacattcatggtgtctcaagagaaaaaatccaccgaatgaaagaacggtatgaacacgatgttacttttcacagtgtgcttcatgcagaaaagccaagcagaatgaacagaaaccaggacaggaataatgcattgccttccaacaatgccagatactggaattcctacacagagtttccaaaccggagggcccacggtggatttacaaatgagagctcctatcacagaaggggcggttgtcaccatggatattagaggcctatcttacagccaggcagaattttcctaagtcagtttctacttcagtttttgttattttttgttgcattttagtcagagctccaattccagtgtaaatagctgaactcaaaagtttctgagcaaagtcattatattcactttcttcaccaaaatttgttaaagtgcttctatatgcatggtctgatgctgggaattctgcagatttgagtaaacagtctctttctctagggtaagaatttgaaaccaaaacttgagaacacacccaagaatatatttacataggttcatagatgaaataaagtgtttatattatatataagcttcagtaccatttgctctgaagtgatctatttattttttcaggaaattcatctccatcggtaaagttgggaaggtggagagaagtggtgggggggcattgctacttatcaaagtgccattgctactttgataatctatgtatctaaaaatgtgagatgtgcgactcttatgatactgattttcctttaatgttaatatgccagaaagcatacatctaagggaacattgtccttcaaagtagacactttgggaagttatttctttattttaatgatgtatcattgttaaaaatgctgtcaaatccttaatagctacaggagctactgagggaaatcagtgtcattatttaaagtcacgccttgtgtttttactactttattcagcaggattaaacctgaataacttttggctgttgtgctaatagtgtaaataaaataagcctgccttcataaaacactaacttttaaaaggaataaacgacttctaaaattatgcctattaacatgtgtaattagtcggcagctcaaatgtttgggagtgcaagaaattaggcaccccaggatataggtcatacagggatatataaaagccatgctcattacaaaatgagcagttgatgttttatgtggcattaagacaatcaagtcctcacaactctggaatgtcttcttatactgatgctgaatttatgaatccaaattaatttccaacaggttggaatcagatttaatgtgagatcatgatagacaagaccacagaggacgtatgctctatttcttgttggccaacagcttctttctaatgttctgtgaaaaattattttaagtgtcttatataatggtgcttttatggttattaaaaattgtaaatggtatcacatttatatggatttgtcattggatctttttttggttcaacaataaaaaaatttaattacctaaatgccaagaaactcaacaatataccagtttttctgtatcacaggcttatttaccagtcttttttttaataaataggaatcgtaaaggtaatgacaaaa

SEQ ID NO: 1021 - DNA, 1046 bp, Artificial
  cDNA Sequence
cgtgacttcagtaaagggaacccggggctctcgcagccagccctcctgcccatggaggacagtttccttcaatcttttgggaggctgagcctccagccccagcagcagcagcagcggcagcggccgccccggccgcccccgcgggggacacctcctcgccgccacagctttaggaaacacctctacctcctgcgaggcctcccgggctccgggaaaactacactggccagacaattgcagcatgactttcccagggccctgattttcagcacggatgattttttcttcagggaagatggtgcctatgagttcaatcctgacttcctggaggaagctcatgaatggaaccaaaaaagagcaagaaaagcaatgaggaatggcatatcccccattattattgataataccaacctccacgcctgggaaatgaagccctatgcagtcatggcacttgaaaataactatgaagttatattccgagaacctgacactcgctggaaattcaacgttcaagagttagcaagaagaaacattcatggtgtctcaagagaaaaaatccaccgaatgaaagaacggtatgaacacgatgttacttttcacagtgtgcttcatgcagaaaagccaagcagaatgaacagaaaccaggacaggaataatgcattgccttccaacaatgccagatactggaattcctacacagagtttccaaaccggagggcccacggtggatttacaaatgagagctcctatcacagaaggggcggttgtcaccatggatattagaggcctatcttacagccaggcagaattttcctaagttggaatcagatttaatgtgagatcatgatagacaagaccacagaggacgtatgctctatttcttgttggccaacagcttctttctaatgttctgtgaaaaattattttaagtgtcttatataatggtgcttttatggttattaaaaattgtaaatggtatcacatttatatggatttgtcattggatctttttttggttcaacaataaaaaaatttaattacctaaa

SEQ ID NO: 1022 - DNA, 2107 bp, Artificial
  cDNA Sequence
atgctcagaatggagcagtggacaaaggagacaaaaatccctgccttcatggaacatgtattctatcagagaaaaaaaattctcaaggaaaaaaggcaattttagcatctgctctgctctgttctctcaaaaaataagcaaaggatttcacagtgttctaggtacttgggaatcatcagtgaacaaaacaaagatcctgcccttgtggaccttatgtgccagaggctcctgaccaccataaagatagaactggggcttaaccctcatcacttctgaagctgatggaatgacaattgcagcatgactttcccagggccctgattttcagcacggatgattttttcttcagggaagatggtgcctatgagttcaatcctgacttcctggaggaagctcatgaatggaaccaaaaaagagcaagaaaagcaatgaggaatggcatatcccccattattattgataataccaacctccacgcctgggaaatgaagccctatgcagtcatggcacttgaaaataactatgaagttatattccgagaacctgacactcgctggaaattcaacgttcaagagttagcaagaagaaacattcatggtgtctcaagagaaaaaatccaccgaatgaaagaacggtatgaacacgatgttacttttcacagtgtgcttcatgcagaaaagccaagcagaatgaacagaaaccaggacaggaataatgcattgccttccaacaatgccagatactggaattcctacacagagtttccaaaccggagggcccacggtggatttacaaatgagagctcctatcacagaaggggcggttgtcaccatggatattagaggcctatcttacagccaggcagaattttcctaagtcagtttctacttcagtttttgttattttttgttgcattttagtcagagctccaattccagtgtaaatagctgaactcaaaagtttctgagcaaagtcattatattcactttcttcaccaaaatttgttaaagtgcttctatatgcatggtctgatgctgggaattctgcagatttgagtaaacagtctctttctctagggtaagaatttgaaaccaaaacttgagaacacacccaagaatatatttacataggttcatagatgaaataaagtgtttatattatatataagcttcagtaccatttgctctgaagtgatctatttattttttcaggaaattcatctccatcggtaaagttgggaaggtggagagaagtggtgggggggcattgctacttatcaaagtgccattgctactttgataatctatgtatctaaaaatgtgagatgtgcgactcttatgatactgattttcctttaatgttaatatgccagaaagcatacatctaagggaacattgtccttcaaagtagacactttgggaagttatttctttattttaatgatgtatcattgttaaaaatgctgtcaaatccttaatagctacaggagctactgagggaaatcagtgtcattatttaaagtcacgccttgtgtttttactactttattcagcaggattaaacctgaataacttttggctgttgtgctaatagtgtaaataaaataagcctgccttcataaaacactaacttttaaaaggaataaacgacttctaaaattatgcctattaacatgtgtaattagtcggcagctcaaatgtttgggagtgcaagaaattaggcaccccaggatataggtcatacagggatatataaaagccatgctcattacaaaatgagcagttgatgttttatgtggcattaagacaatcaagtcctcacaactctggaatgtcttcttatactgatgctgaatttatgaatccaaattaatttccaacaggttggaatcagatttaatgtgagatcatgatagacaagaccacagaggacgtatgctctatttcttgttggccaacagcttctttctaatgttctgtgaaaaattattttaagtgtcttatataatggtgcttttatggttattaaaaattgtaaatggtatcacatttatatggatttgtcattggatctttttttggttcaacaataaaaaaatttaattacc

SEQ ID NO: 1023 - DNA, 541 bp, Artificial
  cDNA Sequence
gcggccgccccggccgcccccgcgggggacacctcctcgccgccacagctttaggaaacacctctacctcctgcgaggcctcccgggctccgggaaaactacactggccagacaattgcagcatgactttcccagggccctgattttcagcacggatgattttttcttcagggaagatggtgcctatgagttcaatcctgacttcctggaggaagctcatgaatggaaccaaaaaagagcaagaaaagcaatgaggaatggcatatcccccattattattgataataccaacctccacgcctgggaaatgaagccctatgcagtcatggcacttgaaaataactatgaagttatattccgagaacctgacactcgctggaaattcaacgttcaagagttagcaagaagaaacattcatggtgtctcaagagaaaaaatccaccgaatgaaagaacggttggaatcagatttaatgtgagatcatgatagacaagaccacagaggacgtatgctctatttcttgttggccaacagcttcttt

SEQ ID NO: 1024 - DNA, 488 bp, Artificial
  cDNA Sequence
gcggccgccccggccgcccccgcgggggacacctcctcgccgccacagctttaggaaacacctctacctcctgcgaggcctcccgggctccgggaaaactacactggccagacaattgcagcatgactttcccagggccctgattttcagcacggatgattttttcttcagggaagatggtgcctatgagttcaatcctgacttcctggaggaagctcatgaatggaaccaaaaaagagcaagaaaagcaatgaggaatggcatatcccccattattattgataataccaacctccacgcctgggaaatgaagccctatgcagtcatggcacttgaaaataactatgaagttatattccgagaacctgacactcgctggaaattcaacgttcaagagttagcaaggcagatagtgtcttcaaagtggatctgtggactactccatcagaattgcctcaggtggctattaaaatccgagttcatggacc

SEQ ID NO: 1025 - DNA, 2550 bp, Artificial
  cDNA Sequence
aggatggttcacatttgagtaaagacaggggagtttgttttcagaatgacatactagtctgcaggatgaatttcataactgacattgcaccttggactgcaactaggactttcactggaatcagagaaagagttttgaagaaaactgggcataggctcagcaaaaccaaacagaagaggaacagaaaaagaaacaaaaagcagaacagtcagaatagaatcatggaggaaaactcattagaattcttaagtgatcttacaccgggagatcaggacccatctcagagtgaagaggaagacattgaaaagaccagaagagaatcagaatatcccttcattgatggtctacaaaatgaagtcggagattttgtgactggatataaagaaaaaagatggaaaaataaagatcctaaagacagtttccaaaacgttatgtctatagttgaattagacaacacaccaaagaattacctctctaaggaaggtgataacttgtttgtaagtttgttactgaggccaaatgaaatctccgttacttgtccaatactgactcaaaacctttcctgtgtaacaactgatgactgctctggcatgaaggtagaaaagcatattagaaataggcataccatagcattagacacccaggacctttctgcggaaacttcatgcttatttatgaagaagagagaaatagtagataaaaatctctcacatgaacccattctgtgccatcaacatggaatcagaatgtcagataaagttttaagagaggaacaagtgtatacaactaaaatcaatcactgggcttttttcacaaccaatttatctgatgaagatttacagctgggctctgacagacagccctattttggtagctggcctgcaggacctcataagtttatatgtgaacagagaccaaagaaagatagagcatgtaagttggctggtcctgacagcagggggcaatggattcaaatgatcttcacttcggtggcagcatcagaaccaggaaacaatccagaaatattgacagacaaactactgataggaaatgaagatttttcacctccacctgaaactatggattcattcatagaaacaaacctcttcagaagctgcttacctcaaccggatataccaaagaatgccttagaatcaacaaaaaataagaaaaggaggaagaaaaggattttcaatttggtaccaaattttgacttattaggacagagtcgtatcggtgtaaaagaaagggagaaatgtgacctgttaacaaaaaaccatggactaaaaattactttgggagaagaaaaagatagaatttcagaaaggaacagtgaagaggagaataaacaaaaacttatgacctttgatcatcatccattgtggttttaccttgatattatcaaagctacccctttaaatattgatggacagcgttattctcattgcctgtcatttaacagactaaggtgctctgcatctttatacaaaaattatattccttcttttgtgctacataatttatctagtatttggaagccatcttttacaaacaagaaactgtttttgactttcgaatctcagacaagagtaggtaataaactaaatgatgcagggtttatttctccagaaattttacatagtcatcctgatacttcgtgctctttgggagtcacttctgattttcactttttaaatgaaaggtttgatagaaagctgaaaagatgggaagaacctaaggaattaccagctgaggacagccaagacttaacaagcactgactaccgttcccttgagctaccattatcacaagggtttgcctttcaattagtaaagctttttggatctccaggcgttccaatggaatccttgttgcctgatgactatgtggttccccttgactggaagacactaaagatgatctacttgcaatggaagatgtcagtggagaaaagacagaagaagattggttgaaaaatgaaaattccttgaactttgagttctgctgtcttcatggtactgctgaagatcatgatcacggagaaaagtcagagtgctcagtgccaacccaagggattctttccagagacgtacccgttggataccaaaattagtttggataatctgttcaaccattcttgataagttatctgaataataaaaaaactcaacagaggaggtaacaatttgaacattttattgtctaatttgaagatgtatgccatactttgtttgatagaagaaagtaaggcacagaaaacttgagtaccttatttttaaaactgcattaggattaaaaggttagcccctatatccaagtattggtctgagatcccatttctagaattctgaaatccaaaaagctctgaaaatcaatagttatttttccaaatgtattcattgtggtaaaatacaccaatataaaatttaccatcttaaccacttttaagtgtgttataaatacattcatgctaccatcactagcatccatctctggaactcttttcatcttgcaaaactgcaattctatacccattaaacaatgacccat

SEQ ID NO: 1026 - DNA, 139 bp, Artificial
  cDNA Sequence
taagatcacttaagaattctaatgagttttcctccatgattctattctgactgttctgctttttgtttctttttctgttcctcttctgtttggttttgctgagcctatgcccagttttcttcaaaactctttctctgaa

SEQ ID NO: 1027 - DNA, 2825 bp, Artificial; identical to SEQ ID NO: 65
  cDNA Sequence

SEQ ID NO: 1028 - DNA, 455 bp, Artificial
  cDNA Sequence
tttgtgaaccagcagtttcaagaggaaaagttaaataaattgcagaagttacttattcttttaagaggtctgcctggttctgggaaaacaacattgtctcgaattctgcttggtcagaatcgtgatggcattgtgttcagcactgatgactattttcaccatcaagatgggtacaggtataatgttaatcaacttggtgatgcccatgactggaaccagaacagagcaaaacaagctatcgatcagggaagatctccagttataatagataacactaatatacaagcttgggaaatgaagccatatgtggaagtggaggaataaacatggtgtgtctcgaaagaagattgctcagatgttggatcgttatgaatatcaaatgtccatttctattgtaatgaattcagtggaaccatcacacaaaagcacacaaagacctcctccacaggggagac

SEQ ID NO: 1029 - DNA, 716 bp, Artificial
  cDNA Sequence
agttttggcctgggtaaccgagaggtgaccgccatcttgcgtacggagaggttcgtgtcttcctaaaagaaggttttattgggaggtaaaggtcaatgcgtaggggtagagtaagatgtcttatggtgaaattgaaggtaaattcttgggacctagagaagaagtaacgagtgagccacgctgtaaaaaattgaagtcaaccacagagtcgtatgtttttcacaatcatagtaatgctgattttcacagaatccaagagaaaactggaaatgattgggtccctgtgaccatcattgatgtcagaggacatagttatttgcaggagaacaaaatcaaaactacagatttgcatagacctttgcatgatgagatgcctggtaatagaccagatgttattgaatccattgattcacaggttttacaggaagcacgtcctccattagtatccgcagacgatgagatatatagcacaagtaaagcatttataggacccatttacaaaccccctgagaaaaagaaacgtaatgaagggaggaatgaggcacatgttctaaatggtataaatgacagaggaggacaaaaagagaaacagaaatttaactctgaaaaatcagagattgacaatgaattattccagttttacaaagaaattgaagagcttgaaaaggaaaaagatggttttgagaacagttgtaaagaatctgaaccttctcagg

SEQ ID NO: 1030 - DNA, 1568 bp, Artificial
  cDNA Sequence
acccccttaagaaccatttgctgcaaaaacttcatcagcacggccaagtacagcatgtggtcatttctccctgagtttttgtatctgcaatttaccaaacctgccaatgctttcttgttcattaatgtattgcagcaaattccagatgtgtctccaacaggaaaatatacaactctcttgcctctgatttcagggaccaaagaggttatagaagattgtaaatgacatatggcagacaaaatagttaatacaaagaactgagagttccttcctacagacatagtcctgatgtcttccagtgaacctcagttgattgttatatagcaacgcctaatctggatggagagacagatctaaagctacagcaggctttgccagaaacaggttgaatgcaatcagaaaaccgtttgttcagcctatctggaaaaatagacctaatcgtcatttcttagcttagatggaaccttgagcctaagtggtaaaagctctgttccaattgggcctgaccaggtcttgttaagaggtatacagctgagaaatactcagcggattattggcatagttgtttgcactggatttgaaacaaaattcatgcagaattccgtcaaatcacctctcaagagatcaaaggttgagaaagtgatcaatgtgtcagtctcccttttgttcttgctgctcttggtcatgtccttgattccagctcccaagtcattgtctgacatactggtgttcatcatcttgtaccagaacctcatccccattagtctgctggttgctgtgggaaaattgtgaaatatattcaggcccagcttatacactggaatgaagatatgcattataaagtaaataacgtctacgccatggccagaacattcaatctcaacgaagaacttgggcaggtaaaacatctattttctaataaaacaggaatattatgacatttaagaagcgtaccactgcaggtgtaatttacggtcagacaccttcttccatcctagagtcctgtgaatttaatgaccccaaattattggagaactttgagaatggtcatcccacaaaaaactatataacgcaatttcttaccctgttatctgtgtgccacactgttattcctgagagatggaaataatataatctaccaggcttcctccccagccaaagcagctttagtgaaaggagcaaaagaatatggcttgttctttatacaagaacaccatactctgtcaccacagaagctacgggagaaaaatgcttttgaaattcttaatgtcctggagttctctagtaatagaaaaagaatgtctctaattgtctgaacccttatgggacggctctggctctactgcaaaggggctgatagagtgatttatgagagactttcagaagattctctatttgttcaggagacattaacccatctggaatattttgccacagaaggtctgagaattctctgtgttgtgtatagagatttaactgagaatgaatataatgggtgatttcggaagtacaaaaaagcgagtacaactgtacaagacagaattcaaagggtagaaaaatggtatgat

SEQ ID NO: 1031 - DNA, 107 bp, Artificial
  cDNA Sequence
ttgctgtcttactaggaaacatttgatatttcttcagtcacacctctgtctcccctgtggaggaggaggtctttgtgtgcttttgtgtgatggttccactgaattca

SEQ ID NO: 1032 - DNA, 3513 bp, Artificial
  cDNA Sequence
tgcacacctgtaatcccagctattcggctgaggcacgagaatcatttgaacccaggacacggagattgcagtgagccaagatcacaccactgcactccagcctgggcaacagaacgagattctgtcttaaatgaatgagtgaatgaatgaagtgaattacaaaaaattttaaaatacaaaccaaatgttttgttaaattcaacagacataattatgtgtcagctgcatgcagtggctcatgcctgtaatcccaacactttgggaggaattacagggaccaggagtttgagactagcttggccaacatagtgaaaccccatctctaccaaaaaatataaaaattagccaagtatggtggcatatgcctatattctagctactcaggaggctgagatgggagagtcgcttaaacccaggaggtggaggttgaaatgagctgagatcatgccactgcactccagcccaggtgacagagggagactctctcaaagaaaaaggaaaaaaaattactgtgtctaatttctataaaatttttttttttacttattctcaatttctgtacttgtggatcagtagcaaacttcatggactggcatcagtatgaatgacatttgagtagcactgtttggtgtgcagcatactagagtagtgagagaaggaaacatctgtggacattgtatcaactgggaggccaccgaacattttgtcatgtttgttgaataacttatgcagcctcaggcagcctgtcagggcagtggtgtggcaaagccataatatttgtatggggctcattctactgagaggcatatctgctgttctgatagtgtagtctcctccatttttcctccagcactctgctctttgggaggcactgcagggtggctgtgactttggtcaggtgtagcttatgtttggccatctcttggttgatccagtttatttgtcttagtttcagtgatggccagagggttacaaaggatttggaatggagcatgtctcagggtgatgtgaactctgttgttgcctggatttccagatcatgtgacagagaatcagctggatcatttcagctgtccaggttatcagttagaataaagtttttaaaaactaaaatcttgggagcaaggaggcctctctgatgtaaagaaagatgagtagactggtttatcccttctatgcagttagtacatgagagtaccctggtcctttaagagccagagttctttggggtttttgtttgttttcccccattaaaaagcactagcatttattaggggaaaatgaggttctcctcaactcatgttttccctctctgtattgtggaaaatctgaacctcactctgaaagtgaatacatccatttgaaagggatggcaggttaccaagagtgtcatttaatgaaacccctctttttcttgaccaaaagagaccttgttttctttgagaagcaggagttcactttaatttttatgaacatctcacaccacttccacctaaccctacctactgtaatatgggctggcctgtcaagtcttgggcaagaatagtgataagatgctatcaggtcagaacccatattgttagagtagctgaaagattcaggagttcttattttgaactcttgcatgtagaatcattacaagatgtctcttaaatgcagttagagtgagaggaaagctggagctgtgggtggggaacatgtcagaggtggggctcagcaggaagtgggaccagtgcctgctggatgtggtagataagtaccggttttggattagggattgttttctcacttaccttctttaaaaaaagaatgtggccattagcctttggttctggcatggcattaggaatggcttattccagcagtcagcatgatttccaggttccatgtcttctacatggaaaacatgtcaaaggacaggagcagtgaccacctgacaacatcgcagtgggaggaaaagagaaatcatgtttattcctcaggaatgctgaagtaccctggagtaagctgtcattcttattataacaatgttattagtaatgctttaaactccagcacacttgttatgtatttgaaaccaagtctgtttcttgttttgtattttctctctggaaattgtaaggcggtggtcttaaatacattaaacaaaaataggaaaaaaagcagttaaaatttgatggcatatcagccagctgacccaattcttggcacagtcaacaagtatctttgatttgttttcagcagggctaagtcatcagatatgtcagaaggggtaaaaaaaaaaaacacctgtcttttagtcatttctttgctgtcccaaaaatctaagtattatagtgagtaacattagcttgcagtttttaatagttcatcaataagtctgaatccttgtcagttgccacactggctacccagaaaatttcaggcagttatatgcctcaggcagttatatgaaggtttatttccttcttatacattaaaaatagtgtgaaacatgattgaaaatacactgttttagtctcttgattttgtatccactttcaacattttaatatgaaaccttgacagagactttgctgtaattttggtcttgaggggcggggggactcatccaactcacagtacccagcagtctgagttcttcagataggcataaagaaacgagaagttacataatttttgttgaatgggtatggtgatgttggcaaatgattaagcctaagaaaaactgtttgtgtaccagcacctgtaatcccagctactcgggagggtgaggcaggagaatcacttcaacccaggaggcagaggctacagtgagctgagatcgtaccacagcactgcatcctgggcgacagagtgagtgagactctgtctcaaaaaaaaaaaaaaaaaaaacagaaaagctacaaaacattcacacattttgttgttttctatgtctctgtataaatgatgagctttaaagttaatcctcaattttaaatatacaaaatttttaatttgtacttttgataccatgcacttttggaaattttttattttttgagagcatgatacttatttcttacgctcatgtttgaaaaggtttagaaatgtggttgctaaattagttttaaaacaacaactgtgactgttttacctgtgtccaacatgttgagaactcaaaaagtagtaaatcgggctgtcttaatagtgcgcctgttactaatggaatttacttaaaaagtaagtttgccatatgaaagggtattaatatccttttcaagcataacatacaaatgaattttcatcttaaatatattaacttctgataagaaaacagatgctaggcctaaagatatttgctacataggaaaaatgatttttaaaaaatttgtctggggtgcctgtagtcccagctactcgggaggctgaggcaggggaatggcgtgaatccgggaggcgggtcttgcagtgagcagagatcgcgccaccgcactccagcctcgccgacaaagcgagactctgtgtcaa

SEQ ID NO: 1033 - DNA, 1889 bp, Artificial
  cDNA Sequence
ggagtagcgagtcggcaacccggaggggtagaaatatttctgtcatggctcattcaaagactaggaccaatgatggaaaaattacatatccgcctggggtcaaggaaatatcagataaaatatctaaagaggagatggtgagacgattaaaggtgagtaaaattctattcttttttacatctgtgtagggcagaggtcccctgtggaaatcacatggggctataatgtatcttgttggggtaacttaaaaaagcaaagcaaagcagcaaatggcatagaaaagatctaagggagtagagtatataaggtacagtggggattatttggctatgattaaagggacagcaattaggtgaagcttagattttctaggatctcctatacttgggtataaagaacaagtctacaatactcatattccttattgtctatacaaagttgtctcctttcttctatatagtttctaaagacaaccactttaagggagttttaggtctttatactgagtaattaggctgtgtactactttcttgtaagttattttcaaagtaggtcaaagggcttcactttaagcttcttcctctgcttctgacatgtagtaatgaatcaagattgctggtgaacttctatggatgaggctagggcctcttcatatgtgtttgaataatattttcaccttttcctttagggtggtggtgatctctgtaattgttaaaatggataaagaagcatagtgttcaaggagaatgttaagctggtctattagttagtttagatggtctttatttttgagcatttccgatcgaggttgtatctacctagatatttatgttgcttgatatattattatttatctggatgtcagggctgaaaaatgttcccaaattaatcattgaagatccaggggcttaaaaacaaatactcttctttattgctacatggtgtatagaatttttataaagagaaaaagatgctaatactatcataaatttcacataaagtcttaatattgtacatgtatgtgtttatacttaaagtatcagaatgtcagatatcagatgtttattcaaaggaaaatcatctttgagcagattaaatttactaataggtggatattttatctagttgggaactggtgtgtattttattaagaatagtcaagctatgaatcccttctatatatgacatgtttcattttctatgtatttaccttctcttgacctattgcatttttagagaaactaatacatttattaccttatatttgtttatactaagtgagcattcctgttgtttgttgagaaactaatcttgaactcagagcctacacttaaaactgatcagcattagtgtcttttagagatgttattttctcagatttctttcctaatttggaggactcatgagttattaatgagttttataacagcatttgagttgtagacagtagtgaggaattcccattttctggaccttgaacaaactttgtggttattgttggtggaatgattgcctcagtactcatatttaatgtttgtaatatgctttcattattttgtagacatttatgtctagcagtaatccagttatacttttttctcatttattttcctaatttatagttccatttttagcatcctccttcttagaaaaatatgaaaaaattatgtaggatgatatgtacaaatacccatgtaagttttatacattataacaatttgttaacgtgtaaggtgatactgtttataaaattttttttcctgtaacattttattcaaaatatgcttaatctcttatcttttgttaagagagctacagaaataaatagttacatgcatgcagttcttttttaccctttgtggtttttcctaaacatataggcaatcaaa

SEQ ID NO: 1034 - DNA, 466 bp, Artificial
  cDNA Sequence
tatccagtaatttcaatacagtgtattgactagtctaccttttccctgattacttgaaatattacctttttcatatgctaaatccttaattcagtctttttttctgggcttgttcaattcttacagtttgtttattccagcgtcagtactacatggttttaattattgttggttcttaatattttaacataatgatttgtttaaatgtacttttgtaatactgaaataatctgtattacagcgtgaaataactaagaagttgggcaaccccaaacagcctacaaatcctttcctggaaatgatcaagtttctcttggagaggatagcacctgtgcacatagataccgaatctatcagtgctcttattaaacaagtgaacaaatcaatagatggaacagcagatgatgaagatgagggtgttccaactgatcaagccatcagagcaggtcttgaactgcttaaggta

SEQ ID NO: 1035 - DNA, 2862 bp, Artificial
  cDNA Sequence
gctggctgcggaaggggagggggggggagaaggcgattggatgcggcggcggcggcggatcccggagagccccggagtgagcggagtagcgagtcggcaacccggaggggtagaaatatttctgtcatggctcattcaaagactaggaccaatgatggaaaaattacatatccgcctggggtcaaggaaatatcagataaaatatctaaagaggagatggtgagacgattaaagatggttgtgaaaacttttatggatatggaccaggactctgaagaagaaaaggagctttatttaaacctagctttacatcttgcttcagatttttttctcaagcatcctgataaagatgttcgcttactggtagcctgctgccttgctgatattttcaggatttatgctcctgaagctccttacacatcccctgataaactaaaggatatatttatgtttataacaagacagttgaaggggctagaggatacaaagagcccacaattcaataggtatttttatttacttgagaacattgcttgggtcaagtcatataacatatgctttgagttagaagatagcaatgaaattttcacccagctatacagaaccttattttcagttataaacaatggccacaatcagaaagtccatatgcacatggtagaccttatgagctctattatttgtgaaggtgatacagtgtctcaggagcttttggatacggttttagtaaatctggtacctgctcataagaatttaaacaagcaagcatatgatttggcaaaggctttactgaagaggacagctcaagctattgagccatatattaccaatttttttaatcaggttctgatgcttgggaaaacatctatcagcgatttgtcagagcatgtctttgacttaattttggagctctacaatattgatagtcatttgctgctctctgttttaccccagcttgaatttaaattaaagagcaatgataatgaggagcgcctacaagttgttaaactactggcaaaaatgtttggggcaaaggattcagaattggcttctcaaaacaagccactttggcagtgctacttgggcaggtttaatgatatccatgtaccaatccgcctggaatgtgtgaaatttgctagccattgtctcatgaaccatcctgatttagcaaaagacttaacagagtatcttaaagtgaggtcacatgaccctgaggaagctattagacatgatgttattgtgtcaatagttacagctgctaaaaaggatattcttctggtcaatgatcacttacttaattttgtgagagagagaacattagacaaacgatggagagtacgcaaagaagccatgatgggacttgcccaaatttataagaaatatgctttacagtcagcagctggaaaagatgctgcaaaacagatagcatggatcaaagacaaattgctacatatatattatcaaaatagtattgatgatcgactacttgttgaacggatctttgctcaatacatggttcctcacaatttagaaactacagaacggatgaaatgcttatattacttgtatgccacactggatttaaatgctgtgaaagcattgaatgaaatgtggaaatgtcaaaatctgctccgacatcaagtaaaggatttgcttgacttgattaagcaacccaaaacagatgccagtgtcaaggccatattttcaaaagtgatggttattacaagaaatttacctgatcctggtaaggctcaggatttcatgaagaaattcacacaggtgttagaagatgatgagaaaataagaaagcagttagaagtacttgttagtccaacatgctcctgcaagcaggctgaaggttgtgtgcgtgaaataactaagaagttgggcaaccccaaacagcctacaaatcctttcctggaaatgatcaagtttctcttggagaggatagcacctgtgcacatagataccgaatctatcagtgctcttattaaacaagtgaacaaatcaatagatggaacagcagatgatgaagatgagggtgttccaactgatcaagccatcagagcaggtcttgaactgcttaaggtactctcatttacacatcccatctcatttcattctgctgaaacatttgaatcattactggcttgtctgaaaatggatgatgaaaaagtagcagaagctgcactacaaattttcaaaaacacaggaagcaaaattgaagaggattttccacacatcagatcagccttgcttcctgttttacatcacaaatctaaaaaaggacccccccgtcaagccaaatatgccattcattgtatccatgcgatattttctagtaaagagacccagtttgcacagatatttgagcctctgcataagagcctagatccaagcaacctggaacatctcataacaccattggttactattggtcatattgctctccttgcacctgatcaatttgctgctcctttgaaatctttggtagctactttcattgtgaaagatcttctcatgaatgatcggcttccagggaaaaagacaactaaactttgggttccagatgaagaagtatctcctgagacaatggtcaaaattcaggctattaaaatgatggttcgatggctacttggaatgaaaaataatcacagtaaatcaggaacttctaccttaagattgctaacaacaatattgcatagtgatggagacttgacagaacaggggaaaattagtaaaccagatatgtcacgtctgagacttgctgctgggagtgctattgtgaagctggcacaagaaccctgttaccatgaaatcatcacattagaacaatatcagctatgtgcattagctatcaac

SEQ ID NO: 1036 - DNA, 2801 bp, Artificial
  cDNA Sequence
ccggagagccccggagtgagcggagtagcgagtcggcaacccggaggggtagaaatatttctgtcatggctcattcaaagactaggaccaatgatggaaaaattacatatccgcctggggtcaaggaaatatcagataaaatatctaaagaggagatggtgagacgattaaagatggttgtgaaaacttttatggatatggaccaggactctgaagaagaaaaggagctttatttaaacctagctttacatcttgcttcagatttttttctcaagcatcctgataaagatgttcgcttactggtagcctgctgccttgctgatattttcaggatttatgctcctgaagctccttacacatcccctgataaactaaaggatatatttatgtttataacaagacagttgaaggggctagaggatacaaagagcccacaattcaataggtatttttatttacttgagaacattgcttgggtcaagtcatataacatatgctttgagttagaagatagcaatgaaattttcacccagctatacagaaccttattttcagttataaacaatggccacaatcagaaagtccatatgcacatggtagaccttatgagctctattatttgtgaaggtgatacagtgtctcaggagcttttggatacggttttagtaaatctggtacctgctcataagaatttaaacaagcaagcatatgatttggcaaaggctttactgaagaggacagctcaagctattgagccatatattaccaatttttttaatcaggttctgatgcttgggaaaacatctatcagcgatttgtcagagcatgtctttgacttaattttggagctctacaatattgatagtcatttgctgctctctgttttaccccagcttgaatttaaattaaagagcaatgataatgaggagcgcctacaagttgttaaactactggcaaaaatgtttggggcaaaggattcagaattggcttctcaaaacaagccactttggcagtgctacttgggcaggtttaatgatatccatgtaccaatccgcctggaatgtgtgaaatttgctagccattgtctcatgaaccatcctgatttagcaaaagacttaacagagtatcttaaagtgaggtcacatgaccctgaggaagctattagacatgatgttattgtgtcaatagttacagctgctaaaaaggatattcttctggtcaatgatcacttacttaattttgtgagagagagaacattagacaaacgatggagagtacgcaaagaagccatgatgggacttgcccaaatttataagaaatatgctttacagtcagcagctggaaaagatgctgcaaaacagatagcatggatcaaagacaaattgctacatatatattatcaaaatagtattgatgatcgactacttgttgaacggatctttgctcaatacatggttcctcacaatttagaaactacagaacggatgaaatgcttatattacttgtatgccacactggatttaaatgctgtgaaagcattgaatgaaatgtggaaatgtcaaaatctgctccgacatcaagtaaaggatttgcttgacttgattaagcaacccaaaacagatgccagtgtcaaggccatattttcaaaagtgatggttattacaagaaatttacctgatcctggtaaggctcaggatttcatgaagaaattcacacaggtgttagaagatgatgagaaaataagaaagcagttagaagtacttgttagtccaacatgctcctgcaagcaggctgaaggttgtgtgcgtgaaataactaagaagttgggcaaccccaaacagcctacaaatcctttcctggaaatgatcaagtttctcttggagaggatagcacctgtgcacatagataccgaatctatcagtgctcttattaaacaagtgaacaaatcaatagatggaacagcagatgatgaagatgagggtgttccaactgatcaagccatcagagcaggtcttgaactgcttaaggtactctcatttacacatcccatctcatttcattctgctgaaacatttgaatcattactggcttgtctgaaaatggatgatgaaaaagtagcagaagctgcactacaaattttcaaaaacacaggaagcaaaattgaagaggattttccacacatcagatcagccttgcttcctgttttacatcacaaatctaaaaaaggacccccccgtcaagccaaatatgccattcattgtatccatgcgatattttctagtaaagagacccagtttgcacagatatttgagcctctgcataagagcctagatccaagcaacctggaacatctcataacaccattggttactattggtcatattgctctccttgcacctgatcaatttgctgctcctttgaaatctttggtagctactttcattgtgaaagatcttctcatgaatgatcggcttccagggaaaaagacaactaaactttgggttccagatgaagaagtatctcctgagacaatggtcaaaattcaggctattaaaatgatggttcgatggctacttggaatgaaaaataatcacagtaaatcaggaacttctaccttaagattgctaacaacaatattgcatagtgatggagacttgacagaacaggggaaaattagtaaaccagatatgtcacgtctgagacttgctgctgggagtgctattgtgaagctggcacaagaaccctgttaccatgaaatcatcacattagaacaatatcagctatgtgcattagctatcaac

SEQ ID NO: 1037 - DNA, 695 bp, Artificial
  cDNA Sequence
gagagccccggagtgagcggagtagcgagtcggcaacccggaggggtagaaatatttctgtcatggctcattcaaagactaggaccaatgatggaaaaattacatatccgcctggggtcaaggaaatatcagataaaatatctaaagaggagatggtgagacgattaaagatggttgtgaaaacttttatggatatggaccaggactctgaagaagaaaaggagctttatttaaacctagctttacatcttgcttcagatttttttctcaagcatcctgataaagatgttcgcttactggtagcctgctgccttgctgatattttcaggatttatgctcctgaagctccttacacatcccctgataaactaaaggcaagtactgatttaaataactccaagattgaccgatactttgatttatctttctaactaaaatgggagttaaggtatttagatgatttccttggattctttgacattagctacagtaatcttttgctaaacttaatgtttttttttttttttagaacttatttttgaaaaactttctggtcttgaggttaagaagtagattaatacagtgtgtattttttttatatcatgtcatcattagctctgtttctttcattataattttgggggcaattccttttcacttttgaaaatccatattgaagaccatggccattattt

SEQ ID NO: 1038 - DNA, 2436 bp, Artificial
  cDNA Sequence
gatgaatgctatcaagtaagacaagtgtttgcccagaaacttcacaaaggcctttcccgtttacggcttccacttgagtatatggcaatctgtgccctttgtgcaaaagatcctgtaaaggagagaagagctcatgctaggcaatgtttggtgaaaaatataaatgtaaggcgggagtatctgaagcagcatgcagctgttagtgaaaaattattgtctcttctaccagagtatgttgttccatatacaattcaccttttggcacatgacccagattatgtcaaagtacaggatattgaacaacttaaagatgttaaagaatgtctttggtttgttctggaaatattaatggctaaaaatgaaaataacagtcacgcttttatcagaaagatggtagaaaatattaaacaaacaaaagatgcccaaggaccagatgatgcaaaaatgaatgaaaaactgtacactgtgtgtgatgttgccatgaatatcatcatgtcaaagagtactacatacagtttggaatctcctaaagacccggtactaccagctcgtttcttcactcaacctgacaagaatttcagtaacaccaaaaattatctgcctcctgaaatgaaatcatttttcactcctggaaaacctaaaacaaccaatgttctaggagctgttaacaagccactttcatcagcaggcaagcaatctcagaccaaatcatcacgaatggaaactgtaagcaatgcaagcagcagctcaaatccaagctctcctggaagaataaaggggaggcttgatagttctgaaatggatcacagtgaaaatgaagattacacaatgtcttcacctttgccggggaaaaaaagtgacaagagagacgactctgatctttctgaattggagaagcctagaggcaggaaaaaaacgcccgtcacagaacaggaggagaaattaggtatggatgacttgactaagttggtacaggaacagaaacctaaaggcagtcagcgaagtcggaaaagaggccatacggcttcagaatctgatgaacagcagtggcctgaggaaaagaggctcaaagaagatatattagaaaatgaagatgaacagaatagtccgccaaaaaagggtaaaagaggccgaccaccaaaacctcttggtggaggtacaccaaaagaagagccaacaatgaaaacttctaaaaaaggaagcaaaaaaaaatctggacctccagcaccagaggaggaggaagaagaagaaagacaaagtggaaatacggaacagaagtccaaaagcaaacagcaccgagtgtcaaggagagcacagcagagagcagaatctcctgaatctagtgcaattgaatccacacagtccacaccacagaaaggacgaggaagaccatcaaaaacgccatcaccatcacaaccaaaaaaaaatgtgtaagttgtaaatattacatttcaaaccaatttcaaattattttgcaaaagttcctaaatttgtaaacatacatattgctgtatttaaattccatatatttagccccattacactaggtacggcggcgaagtgctaaaagggaacggcgatgaacaaatgtaattaataactttctctgtgaaagctttggaaaaatctttttttttttttttggtcaagcttgaggctgaataaagcctttgatgcacaaaatgggactgctgaagagtggacagttggaccttactttggtgaccccatacatttgtggtcacatgctttagccatacacatggtaacattgactatggagtcttgtgaaagtgtaatgtgcgatggctatgtagacataaagaagaaacttgtaaatatcttttttcttttttttaatgtttctgatttctgaagtgcttgtatagcttttatctgcggctttaaactgacagtacccgactgtttattggatctattgatttgaaaagaatttgttaggatagatcttaagcagtaatctgtcagtgtttgtatttgtattctctgcaattttactgtgaaaaaaaatttgttttcaacaattggtgtcattttcttgatgtcactatttgttggagagttaaatggtctcttccctttgtgtatcttacctagtgtttactcctgggcacccttaatcttcagaggtgctaaattgtctgccattacaccagaaggatgcctctgataggaggacaaccatgcaaattgtgaaatagtcctgaagttcttggattactttacacctcagtattgatttgtcccagaattttctggcctttcatggcaatgaaaattttaagaagaaagatttaaagtattttaattttaaagagtgtgttataaaataatgtactgaattctttatcccattttatcatcctttcagtttttattaatctactgtatcaataaaattctgtaatttgaatg

SEQ ID NO: 1039 - DNA, 4569 bp, Artificial
  cDNA Sequence
gatgaatgctatcaagtaagacaagtgtttgcccagaaacttcacaaaggcctttcccgtttacggcttccacttgagtatatggcaatctgtgccctttgtgcaaaagatcctgtaaaggagagaagagctcatgctaggcaatgtttggtgaaaaatataaatgtaaggcgggagtatctgaagcagcatgcagctgttagtgaaaaattattgtctcttctaccagagtatgttgttccatatacaattcaccttttggcacatgacccagattatgtcaaagtacaggatattgaacaacttaaagatgttaaagaatgtctttggtttgttctggaaatattaatggctaaaaatgaaaataacagtcacgcttttatcagaaagatggtagaaaatattaaacaaacaaaagatgcccaaggaccagatgatgcaaaaatgaatgaaaaactgtacactgtgtgtgatgttgccatgaatatcatcatgtcaaagagtactacatacagtttggaatctcctaaagacccggtactaccagctcgtttcttcactcaacctgacaagaatttcagtaacaccaaaaattatctgcctcctgaaatgaaatcatttttcactcctggaaaacctaaaacaaccaatgttctaggagctgttaacaagccactttcatcagcaggcaagcaatctcagaccaaatcatcacgaatggaaactgtaagcaatgcaagcagcagctcaaatccaagctctcctggaagaataaaggggaggcttgatagttctgaaatggatcacagtgaaaatgaagattacacaatgtcttcacctttgccggggaaaaaaagtgacaagagagacgactctgatctttctgaattggagaagcctagaggcaggaaaaaaacgcccgtcacagaacaggaggagaaattaggtatggatgacttgactaagttggtacaggaacagaaacctaaaggcagtcagcgaagtcggaaaagaggccatacggcttcagaatctgatgaacagcagtggcctgaggaaaagaggctcaaagaagatatattagaaaatgaagatgaacagaatagtccgccaaaaaagggtaaaagaggccgaccaccaaaacctcttggtggaggtacaccaaaagaagagccaacaatgaaaacttctaaaaaaggaagcaaaaaaaaatctggacctccagcaccagaggaggaggaagaagaagaaagacaaagtggaaatacggaacagaagtccaaaagcaaacagcaccgagtgtcaaggagagcacagcagagagcagaatctcctgaatctagtgcaattgaatccacacagtccacaccacagaaaggacgaggaagaccatcaaaaacgccatcaccatcacaaccaaaaaaaaatgtccgtgtaggacgctccaaacaagcagctactaaggaaaatgattcaagtgaagaagtagatgtgtttcagggtagctctcctgtcgatgatattccacaggaagaaacagaggaggaggaagtttctacagtaaatgtacggcggcgaagtgctaaaagggaacggcgatgaacaaatgtaattaataactttctctgtgaaagctttggaaaaatctttttttttttttttggtcaagcttgaggctgaataaagcctttgatgcacaaaatgggactgctgaagagtggacagttggaccttactttggtgaccccatacatttgtggtcacatgctttagccatacacatggtaacattgactatggagtcttgtgaaagtgtaatgtgcgatggctatgtagacataaagaagaaacttgtaaatatcttttttcttttttttaatgtttctgatttctgaagtgcttgtatagcttttatctgcggctttaaactgacagtacccgactgtttattggatctattgatttgaaaagaatttgttaggatagatcttaagcagtaatctgtcagtgtttgtatttgtattctctgcaattttactgtgaaaaaaaatttgttttcaacaattggtgtcattttcttgatgtcactatttgttggagagttaaatggtctcttccctttgtgtatcttacctagtgtttactcctgggcacccttaatcttcagaggtgctaaattgtctgccattacaccagaaggatgcctctgataggaggacaaccatgcaaattgtgaaatagtcctgaagttcttggattactttacacctcagtattgatttgtcccagaattttctggcctttcatggcaatgaaaattttaagaagaaagatttaaagtattttaattttaaagagtgtgttataaaataatgtactgaattctttatcccattttatcatcctttcagtttttattaatctactgtatcaataaaattctgtaatttgaatgagtttttaatagtctagaatgttattgtgtatagatatttcctcttgaacgttatgttcagaaaatgcaaattacactataatataaaacctgatatatacacattagaaatattccagttctccgtaacagtgtaaagttaatcagaaagaaaaaattttattgatgcagtgtgtctttataaagctgttcttgaaagccaagtgttttgtattttatagtgagttgcatgtttttgaaaaaaagtgctgaaaatgggatgtgctgttttctgtaaattcatatttagccatagtatatgatagattgccccataacatagtttttcatcaagagtttattattgtactttattttggagccaaaaaattgattctggggggtgggggcagcgtagaagtggtatatccaagtatatcagctactgtagttgtcacagtcttgtgaactttgaatgaaattccactttgtccagattgggagaagtggaaatttatttggatttagagcaggtctttttttttcttcattgtaatctgcaaaatgtagaaataaattacttaaggcagtatcctttatacagttgtataaactgtattttgaaccaaaacatataggttactacttaatgcttacctaatttcattttagtattttaggtgctgttatgttttttcatggttaacaccagaggggaaaaaatcatattctaacttattaaatttatcacattgaatagtggaacattttcatatgatacaccattatgtttaagatatatttccaagattggttataatagatggggcatataataaagaagctactattttggaaaatgacattttactatttgccaatgtatattgcaattgatgtgattatttttcttttaaagatttgtttgtgtttatgaaacagccatttattttttaaaaagtgttttgaattgtgtcttaatctctccatattcaactattcttcatttacaacaatagtgacaccagtaattatgagaggctgtcatatatcaaagcagctcaggtgggatcaacatacattggttttgaaatgtttccttagctcggttctcccaaacacataatttctgtttcagcagtacaaaggcatgttttaaaatctataacataaagaataaggaatagctttgtatttttgtcattgattaaattgcaccagaaatgtttatggaaatattaagaacattttataaaacatacgaaaaagtgattgtgaaggatttttatttgcatgattatagttaagcaaatttcatttcacatttttgtaatgctgtacagcagttcacaaaaaaatgttcattgtagattttgttatgttcaatgccaatgagtctgtaattttacgacctgtctgttctttttttgggtggattacgatgtaaatttttcttttctttctttctttttttttttttttgtgtagaaaaataggtgcaataatgatcaaagttttgatgtcttgagtctccatcttaggggattatcttacgtttaagcttaacatttcatgtagtaagatttggagagccacatactttacagtaaaattaagtgtgtataaaacattaattgctaacaattgttagcaaactatttcagtgataatgttcattttgaaaatatgtactgtataacattaagaaaatatttaactccctgtaacaagttccattatgaaaatcttattcctcagtgaggttatcttgctgcactctgtagcaaatttgtttaatctacattataataaaatttcttgctgcagtgcaacaggaggctttttcagtgatcttcactgtatatgtaaattacaaatgtggctgtaaaacttattccaggtattaaaggttaaattgctttctatatcttcttataacttgtaagtctgatttttaagatttccttttgtccacttgtaagaatgtcaggaatttaagaatttgtttaaattaggcatatctctgccatcacatagtattatgtcaccataatgaacaattgctatttaaatagataaccaattttcagacacatttttggatttctgtgaagttgaataaacataaaagctaa

SEQ ID NO: 1040 - DNA, 903 bp, Artificial
  cDNA Sequence
ttctgcccatgggcacaggcaattggtctcaactgcgcatggtttgccctgtaatgccctccaaatgaccagctgaaaagattgatagtctagagcagaggacctgcggcacctgatccacagaccagacagttaggaggcttctttgtcctcccagaagtgcaggcaaagttttggtgttcatcaaatgagtgatcaatgacaggttatcacacctactgcaaaaatatatggcacttccctctccacctccacagtgggctgtgaaaattaattgagttcaggctgtgaaaaacttaagctgctacatgaaatgcaaaatcattaagcttcagagattgtaacattctgcttgtggccttgggactgaaacaccagatgtcatgcccaataatgacttcacttttcatccaacttcaacaactcaagattgagcgcattttgggttttgaccttgcactgctatactgagattcagcagaagttaactacccgcaagactccctccagagaactgaggcctcaggatcatcttcaacaccttcacccagagtacggagacaaaacccttgccacatagacctgccacaccacaataccaggtggagatgcaccgttgcttgagttggtccaccaagaaagttgccatagaagcctgaagttacgacagcttataaggaagtggttatcgattatgacggatggagaaaatggcaaacgtggctgaaagtggacatttttgccttgacaactccatctgctcctcctctatgaaagctccatccagggccaggcgcggtggctcgtgcctgtaatcaacactttgggaggccaagagatgcccaggtcccaaatgtaataattccatggtatgatgggttgctgctgcacctgtctgatttg

SEQ ID NO: 1041 - DNA, 1019 bp, Artificial
  cDNA Sequence
actgaggaggaactggatgagggcgaccacaaggagccagatgagaccctgtcggagaggctgtggggcctgaaggagatgttccggagaggggccagtccgagggcagagccactttccatctctcccctcttcgtggctcaaaaaatgtactggttttccagggcagccttgtggattggaacctctttcttcatgattctggttcttgttgtcatctttgagacagagaagttgcaaatggggcaaccgcagcagcagcagcagcggcagatacgtctccggcgccacacggctgtccagaagaatgccaggggccctccttcacttcctggaaagatctagatggtgactgctatatttgagctgtctcggtgggagaattttaaattcaatagtgtttgaattcctgattattttgattttttttttaactttggtacatggatttatctaaacctggtggagagaattctcctcacattgtctcacaaagagagcttaactcgcaactgtactctccacgctctcctgacttacttctgtcgtcactctgatgccagagtgcagccatgcagtggttattccagccctggccaccacctccctcaccccccaactcctatcaatcaattgctcctaactggaagatttcctcactatctgattgtgaggtagcaactgatgctagtggaagggtggtacccctgaccattaacaactgctttaaaaagagagagagaaaagagcgtgtatacactatgaaacacacaaaatgcattacaatcgtaacataaagcagccactatgagtccttatgtatgttggacaggagggaggccggctgcagctttagccacaagatgagggctgtgaaggacagaaatgcgagctcatttcctctgcacattttgtctattagaactgtgtgtgtaaataataataataataaagccagtgctcactttttgtatttaaatattaaaaatgaattccaactgaaagtgaaaataaataaa

SEQ ID NO: 1042 - DNA, 5006 bp, Artificial
  cDNA Sequence
cgcgcagcatgcccgccagcgccccgccgcgccgcccgcggccgccgccgccgtcgctgtcgctgctgctggtgctgctgggcctgggcggccgccgcctgcgtgcggagccgggcgacggcgcgcagacctgggcccgtttctcgcggcctcctgcccccgaggccgcgggcctcttccagggcaccttccccgacggcttcctctgggccgtgggcagcgccgcctaccagaccgagggcggctggcagcagcacggcaagggtgcgtccatctgggatacgttcacccaccaccccctggcacccccgggagactcccggaacgccagtctgccgttgggcgccccgtcgccgctgcagcccgccaccggggacgtagccagcgacagctacaacaacgtcttccgcgacacggaggcgctgcgcgagctcggggtcactcactaccgcttctccatctcgtgggcgcgagtgctccccaatggcagcgcgggcgtccccaaccgcgaggggctgcgctactaccggcgcctgctggagcggctgcgggagctgggcgtgcagcccgtggtcaccctgtaccactgggacctgccccagcgcctgcaggacgcctacggcggctgggccaaccgcgccctggccgaccacttcagggattacgcggagctctgcttccgccacttcggcggtcaggtcaagtactggatcaccatcgacaacccctacgtggtggcctggcacggctacgccaccgggcgcctggcccccggcatccggggcagcccgcggctcgggtacctggtggcgcacaacctcctcctggctcatgccaaagtctggcatctctacaatacttctttccgtcccactcagggaggtcaggtgtccattgccctaagctctcactggatcaatcctcgaagaatgaccgaccacagcatcaaagaatgtcaaaaatctctggactttgtactaggttggtttgccaaacccgtatttattgatggtgactatcccgagagcatgaagaataacctttcatctattctgcctgattttactgaatctgagaaaaagttcatcaaaggaactgctgacttttttgctctttgctttggacccaccttgagttttcaacttttggaccctcacatgaagttccgccaattggaatctcccaacctgaggcaactgctttcctggattgaccttgaatttaaccatcctcaaatatttattgtggaaaatggctggtttgtctcagggaccaccaagagagatgatgccaaatatatgtattacctcaaaaagttcatcatggaaaccttaaaagccatcaagctggatggggtggatgtcatcgggtataccgcatggtccctcatggatggtttcgagtggcacagaggttacagcatcaggcgtggactcttctatgttgactttctaagccaggacaagatgttgttgccaaagtcttcagccttgttctaccaaaagctgatagagaaaaatggcttccctcctttacctgaaaatcagcccctagaagggacatttccctgtgactttgcttggggagttgttgacaactacattcaagtagataccactctgtctcagtttaccgacctgaatgtttacctgtgggatgtccaccacagtaaaaggcttattaaagtggatggggttgtgaccaagaagaggaaatcctactgtgttgactttgctgccatccagccccagatcgctttactccaggaaatgcacgttacacattttcgcttctccctggactgggccctgattctccctctgggtaaccagtcccaggtgaaccacaccatcctgcagtactatcgctgcatggccagcgagcttgtccgtgtcaacatcaccccagtggtggccctgtggcagcctatggccccgaaccaaggactgccgcgcctcctggccaggcagggcgcctgggagaacccctacactgccctggcctttgcagagtatgcccgactgtgctttcaagagctcggccatcacgtcaagctttggataacgatgaatgagccgtatacaaggaatatgacatacagtgctggccacaaccttctgaaggcccatgccctggcttggcatgtgtacaatgaaaagtttaggcatgctcagaatgggaaaatatccatagccttgcaggctgattggatagaacctgcctgccctttctcccaaaaggacaaagaggtggctgagagagttttggaatttgacattggctggctggctgagcccattttcggctctggagattatccatgggtgatgagggactggctgaaccaaagaaacaattttcttcttccttatttcactgaagatgaaaaaaagctaatccagggtacctttgactttttggctttaagccattataccaccatccttgtagactcagaaaaagaagatccaataaaatacaatgattacctagaagtgcaagaaatgaccgacatcacgtggctcaactcccccagtcaggtggcggtagtgccctgggggttgcgcaaagtgctgaactggctgaagttcaagtacggagacctccccatgtacataatatccaatggaatcgatgacgggctgcatgctgaggacgaccagctgagggtgtattatatgcagaattacataaacgaagctctcaaagcccacatactggatggtatcaatctttgcggatactttgcttattcgtttaacgaccgcacagctccgaggtttggcctctatcgttatgctgcagatcagtttgagcccaaggcatccatgaaacattacaggaaaattattgacagcaatggtttcccgggcccagaaactctggaaagattttgtccagaagaattcaccgtgtgtactgagtgcagtttttttcacacccgaaagtctttactggctttcatagcttttctattttttgcttctattatttctctctcccttatattttactactcgaagaaaggcagaagaagttacaaatagttctgaacatttttctattcattcattttgaaataattatgcagacacatcagctgttaaccatttgcacctctaagtgttgtgaaactgtaaatttcatacatttgacttctagaaaacatttttgtggcttatgacagaggttttgaaatgggcataggtgatcgtaaaatattgaataatgcgaatagtgcctgaatttgttctctttttgggtgattaaaaaactgacaggcactataatttctgtaacacactaacaaaagcatgaaaaataggaaccacaccaatgcaacatttgtgcagaaatttgaatgacaagattaggaatattttcttctgcacccacttctaaatttaatgtttttctggaagtagtaattgcaagagttcgaatagaaagttatgtaccaagtaaccatttctcagctgccataataatgcctagtggcttcccctctgtcaaatctagtttcctatggaaaagaagatggcagatacaggagagacgacagagggtcctaggctggaatgttcctttcgaaagcaatgcttctatcaaatactagtattaatttatgtatctggttaatgacatacttggagagcaaattatggaaatgtgtattttatatgatttttgaggtcctgtctaaaccctgtgtccctgagggatctgtctcactggcatcttgttgagggccttgcacataggaaacttttgataagtatctgcggaaaaacaaacatgaatcctgtgatattgggctcttcaggaagcataaagcaattgtgaaatacagtataccgcagtggctctaggtggaggaaaggaggaaaaagtgcttattatgtgcaacattatgattaatctgattatacaccatttttgagcagatcttggaatgaatgacatgacctttccctagagaataaggatgaaataatcactcattctatgaacagtgacactactttctattctttagctgtactgtaatttctttgagttgatagttttacaaattcttaataggttcaaaagcaatctggtctgaataacactggatttgtttctgtgatctctgaggtctattttatgtttttgctgctacttctgtggaagtagctttgaactagttttactttgaactttcacgctgaaacatgctagtgatatctagaaagggctaattaggtctcatcctttaatgccccttaaataagtcttgctgattttcagacagggaagtctctctattacactggagctgttttatagataagtcaatattgtatcaggcaagataaaccaatgtcataacaggcattgccaacctcactgacacagggtcatagtgtataataatatactgtactatataatatatcatctttagaggtatgattttttcatgaaagataagcttttggtaatattcattttaaagtggacttattaaaattggatgctagagaatcaagtttattttatgtatatatttttctgattataagagtaatatatgttcattgtaaaaatttttaaaacacagaaactatatgcaaagaaaaaataaaaattatctataatctcagaacccagaaatagccactattaacatttcctacgtattttattttacatagatcatattgtatatagttagtatctttattaatttttattatgaaactttcctttgtcattattagtcttcaaaagcatgatttttaatagttgttgagtattccaccacaggaatgtatcacaacttaaccgttcccgtttgttagactagtttcttattaatgttgatgaatgttgtttaaaaataattttgttgctacatttactttaatttccttgactgtaaagagaagtaattttgctccttgataaagtattatattaataataaatctgcctgcaactttttgccttctttcataatcata

SEQ ID NO: 1043 - DNA, 3214 bp, Artificial
  cDNA Sequence
cgcgcagcatgcccgccagcgccccgccgcgccgcccgcggccgccgccgccgtcgctgtcgctgctgctggtgctgctgggcctgggcggccgccgcctgcgtgcggagccgggcgacggcgcgcagacctgggcccgtttctcgcggcctcctgcccccgaggccgcgggcctcttccagggcaccttccccgacggcttcctctgggccgtgggcagcgccgcctaccagaccgagggcggctggcagcagcacggcaagggtgcgtccatctgggatacgttcacccaccaccccctggcacccccgggagactcccggaacgccagtctgccgttgggcgccccgtcgccgctgcagcccgccaccggggacgtagccagcgacagctacaacaacgtcttccgcgacacggaggcgctgcgcgagctcggggtcactcactaccgcttctccatctcgtgggcgcgagtgctccccaatggcagcgcgggcgtccccaaccgcgaggggctgcgctactaccggcgcctgctggagcggctgcgggagctgggcgtgcagcccgtggtcaccctgtaccactgggacctgccccagcgcctgcaggacgcctacggcggctgggccaaccgcgccctggccgaccacttcagggattacgcggagctctgcttccgccacttcggcggtcaggtcaagtactggatcaccatcgacaacccctacgtggtggcctggcacggctacgccaccgggcgcctggcccccggcatccggggcagcccgcggctcgggtacctggtggcgcacaacctcctcctggctcatgccaaagtctggcatctctacaatacttctttccgtcccactcagggaggtcaggtgtccattgccctaagctctcactggatcaatcctcgaagaatgaccgaccacagcatcaaagaatgtcaaaaatctctggactttgtactaggttggtttgccaaacccgtatttattgatggtgactatcccgagagcatgaagaataacctttcatctattctgcctgattttactgaatctgagaaaaagttcatcaaaggaactgctgacttttttgctctttgctttggacccaccttgagttttcaacttttggaccctcacatgaagttccgccaattggaatctcccaacctgaggcaactgctttcctggattgaccttgaatttaaccatcctcaaatatttattgtggaaaatggctggtttgtctcagggaccaccaagagagatgatgccaaatatatgtattacctcaaaaagttcatcatggaaaccttaaaagccatcaagctggatggggtggatgtcatcgggtataccgcatggtccctcatggatggtttcgagtggcacagaggttacagcatcaggcgtggactcttctatgttgactttctaagccaggacaagatgttgttgccaaagtcttcagccttgttctaccaaaagctgatagagaaaaatggcttccctcctttacctgaaaatcagcccctagaagggacatttccctgtgactttgcttggggagttgttgacaactacattcaagtaagtcagctgacaaaaccaatcagcagtctcaccaagccctatcactagtagataccactctgtctcagtttaccgacctgaatgtttacctgtgggatgtccaccacagtaaaaggcttattaaagtggatggggttgtgaccaagaagaggaaatcctactgtgttgactttgctgccatccagccccagatcgctttactccaggaaatgcacgttacacattttcgcttctccctggactgggccctgattctccctctgggtaaccagtcccaggtgaaccacaccatcctgcagtactatcgctgcatggccagcgagcttgtccgtgtcaacatcaccccagtggtggccctgtggcagcctatggccccgaaccaaggactgccgcgcctcctggccaggcagggcgcctgggagaacccctacactgccctggcctttgcagagtatgcccgactgtgctttcaagagctcggccatcacgtcaagctttggataacgatgaatgagccgtatacaaggaatatgacatacagtgctggccacaaccttctgaaggcccatgccctggcttggcatgtgtacaatgaaaagtttaggcatgctcagaatgggaaaatatccatagccttgcaggctgattggatagaacctgcctgccctttctcccaaaaggacaaagaggtggctgagagagttttggaatttgacattggctggctggctgagcccattttcggctctggagattatccatgggtgatgagggactggctgaaccaaagaaacaattttcttcttccttatttcactgaagatgaaaaaaagctaatccagggtacctttgactttttggctttaagccattataccaccatccttgtagactcagaaaaagaagatccaataaaatacaatgattacctagaagtgcaagaaatgaccgacatcacgtggctcaactcccccagtcaggtggcggtagtgccctgggggttgcgcaaagtgctgaactggctgaagttcaagtacggagacctccccatgtacataatatccaatggaatcgatgacgggctgcatgctgaggacgaccagctgagggtgtattatatgcagaattacataaacgaagctctcaaagcccacatactggatggtatcaatctttgcggatactttgcttattcgtttaacgaccgcacagctccgaggtttggcctctatcgttatgctgcagatcagtttgagcccaaggcatccatgaaacattacaggaaaattattgacagcaatggtttcccgggcccagaaactctggaaagattttgtccagaagaattcaccgtgtgtactgagtgcagtttttttcacacccgaaagtctttactggctttcatagcttttctattttttgcttctattatttctctctcccttatattttactactcgaagaaaggcagaagaagttacaaatagttctgaacatttttctattcattcattttgaaataattatgcagacacatcagctgttaaccatttgcacctctaagtgttgtgaaactgtaaatttcatacatttgacttctagaa

SEQ ID NO: 1044 - DNA, 5813 bp, Artificial
  cDNA Sequence
ctcacagacaacagccaagcacagaggaaatattagctggcagagataacgaagagaaaacactcggtgacagatgcaccatctgtcagtttctgaggagcagttttcaagaaagctgaaaatgaattgaagaagagaggggttttgtttgaaaggtacagcacagcctaaggacaattttaaacaaaaaattgaggcaaaagaagcatgtgactggctccgtgctgccgggttcccgcaatacgctcagttatatgaggattcacaatttcccatcaacattgtggctgtcaagaatgatcatgattttcttgaaaaggaccttgtagaacctctttgcagacgactaaatacgttgaacaagtgtgcctcaatgaaacttgatgtgaacttccaaaggaaaaagggtgacgactccgatgaggaagatctttgtatcagcaacaaatggactttccaaagaaccagtcgcaggtggtctcgtgtggacgacctctacacgctgctccctcgaggagacagaaatgggtcaccgggaggcacggggatgaggaacacgaccagcagtgagagcgtcctcacagacctgagcgagcctgaggtctgctccattcacagcgaaagcagtggaggcagcgacagtcgcagccagccgggccagtgctgtacagacaacccggtcatgctggatgccccactcgtcagcagcagcctcccacagccccccagagatgtcctcaaccaccccttccaccccaagaatgagaagcccacgagggctagggccaaatcatttttgaaacgcatggaaacactccgagggaagggagcccacgggaggcataaggggtctgggcggacaggtggcctggtgatcagtgggcccatgttgcagcaggagccagagtcctttaaggctatgcagtgcatccaaataccaaatggagatctccagaattcgccgccacctgcctgcagaaaagggctcccatgctctggcaagtcgagtggcgagagcagcccgtcggagcacagcagcagcggggtgagcacgccctgcctgaaggaacgcaagtgccacgaggccaacaagcgcgggggcatgtacttggaggacctagatgtgctggcggggacagcactgccggatgcaggggaccaaagccgtatgcatgaatttcactcccaagagaatttggtggtgcatattcccaaggatcacaaaccaggaacattccccaaggcactttctattgaaagcctctctcccacagatagtagcaatggggttaattggaggaccggtagcatctccctgggcagagagcaggtccctggtgccagggagccccggctcatggcgtcctgccacagagccagccgagtcagtatctatgacaatgtccctggctcccatctgtatgccagcacaggagatcttttggacttggagaaagatgaccttttccctcacttggatgacattctgcagcatgtcaatgggctccaagaggtagtcgatgactggtccaaagatgtcttgcctgaactgcaaactcatgatacattggttggggaacctggcttatccacctttccatctcctaatcagatcaccttagattttgaaggtaactctgtctcagaaggtcggacgacacccagtgatgtggaaagagatgtaacatctcttaatgaatctgagcctcctggggtcagagacaggagggattctggtgtaggggcctctctgaccaggccaaacaggcgactccgatggaacagtttccagctgtcgcaccagccccggccggccccagcatcgccccacatcagcagccagacggccagccagctgagcctgctccagcgcttctcactgctccgcctcacggccatcatggagaagcactccatgtccaacaagcacggctggacatggtcagttccaaagttcatgaagaggatgaaagttcccgactacaaagacaaggctgtctttggcgttcctctcatagtccacgtccaaagaacgggacagcccctgcctcaaagtattcagcaagcactgagatatctacgcagcaactgcctcgatcaggtgggtctttttcgcaaatcaggagtgaagtctcgaatccatgcccttcgccaaatgaatgaaaacttccctgagaacgtcaactatgaagaccagtctgcttatgatgtggcggatatggtgaaacagttcttccgggacctccctgagcctcttttcaccaacaagctcagtgagacctttctccatatctatcagtatgtctccaaagagcagcggctgcaggccgtgcaggctgccatcctgctactggccgatgagaacagggaggtcctgcagacgctcttgtgtttcctgaacgacgtcgtcaacttggtggaagagaatcagatgacgcccatgaacctggcagtgtgtctggccccctccctctttcatcttaatttattgaagaaagaaagctctccacgagtcatacagaagaaatatgccactgggaagccagatcaaaaggacctcaacgagaatctggcagcagctcaggggctagcgcacatgatcatggaatgcgacagactttttgaggttccacacgagttggtggcccagtctcgtaactcgtatgtggaggctgagatccacgtgccaaccctggaagaattggggacacagctggaggagagtggggcaactttccacacttacctgaaccatctcatccagggcctccagaaagaagccaaggagaagttcaaaggatgggtcacgtgctccagcacggacaatacagatcttgctttcaaaaaggtgggcgacgggaacccgctgaagctgtggaaggcttctgtggaggtggaagcacccccctcagtggtcctgaaccgcgtgctgagagagcgccacctgtgggacgaggactttgtgcagtggaaggttgtggaaactctagacaggcaaacagagatctaccagtatgtgctgaacagcatggctccccatccttccagagactttgtggttctcaggacctggaaaactgatttgcccaaaggaatgtgtaccctggtgtccctctccgtggagcatgaggaagcccagctcctgggtggtgtgcgagcagtggtgatggactcgcagtacttgatagaaccgtgtggctctggcaagtcaagactgactcacatctgcaggatagacctgaaaggtcactccccagaatggtacagcaaaggctttggacatctgtgtgcagcagaagttgccaggattagaaactctttccagcccctcattgctgagggcccagaaactaaaatctgagttttgcccagtgtgacatcaaactcagggaagaggaagctaaagtgacgagtgtggcagagagtgtgcatgtgagaaagcgagagaaagaggaactgaaggacgcggttaatgcctaaaaatggaaacgttaagaagttggaatgttggagatgcaagaatttccaagaactttcttagccttcctggagatggctacatccctactaatataattttaaaatgagaactttatatatattacttaaaattaaatggactattccttgtgcattgcctaatttgctatttaaaggcttctaagaagcgtatacctaactgtaaataaatgtatgtatagcatatgtacatatgtgtgtatatctccatctttactgtatatatgtaaaataccaattttatatagaattgtgtgttttgaaaatgacggtgtctgactcagtgagtcccttcctcacacagttctttccaagtggctctgggccccatctctccactgtcctgtaagctgtgcagaacctgctgctaacaccaaggtgtgaacatgccctgatgcctaaccaaagatgagttaaccaaaggaaaataacattaaaggagacttatgtgttaacgctttgtttctgctattcaaaaactgagagtggagatctgggataaagcaaggaaataataattactcctccttaaagcaaatgggggggtgagaagtcattaccaaatttaaagctagatgaggagttgccactgggcccagtaagatggaatttcagtgagatatggaccaccggagtcagcgagagtgactgaaacagaagcgatacctctcgctcccatgcccatcactacagaccccaagtcaagatgaatatcatagcctttacttcttcacagccaaagggagcccctgtgttgtctcaagtttttataaatacatttcataatgttattaaatgtcattctatttgaccagtggcctatttggtcacagttaattggtgttttcttattgcactgaattcaactccagacaccatacaaagggagatgatggccattccgttcaaatcctagatcgttacagcttcagggaattcatattttgttatgtgtaggatactcttaaaatgtaattcattaaacttttacaatctgaaagacagggtttttaactaacatgagaccaaaactatgttctttgattagttttagatagtataatcgggtttattaattcttctgtgtttcttcactagccagtccaagctacctatgcatttgacccaaccttatttattattgtacagatgaagcgaattgactccctttagccaactgctaatggatcgaatgtgctttttattgtaattcaacagctatagagagaaagataacttattgtgtgtttgatttcagggagagagattttctttggtcatccataatagagattgataagatttagcaactggtgttggagaaaaaaagaaaagcaaatgagtgttttcaggtttttttgcattatatgcatttatgtaatgtttctgttatcagcaatgtgcaattattttattgagaggaataaaaaagctttctatgagtttggtatggtgcgaggaaaatcttacagtttgaattatgacctagaaatttttcattcccatatctacctaagaaggaagcagtaaatccataatttaccttttgggcaatgctttgtgagcaaaacaaagtcacttctgccataacatcttgaatttaaccatatatgccagattactttatatgcatcaacaagatcaccagtgaagtttaatctagctaaacactggtcctgctcctgagatgggatcctatgtgtttggaaaacgtgataggcacacgaggatgagtggctttgtatcgcccagagaggtgcttgtccagatttcacatgcacatgaattgcctggggatcttgtgaaactgcagactctgctccaagtaatctgggctgggcctgagattctgcatttctaaggagtctcagggatgcctatgctgctggcctaaaaccacactcagaaacgaggacctagaagatccctaaaacagaataagaacaaatgtgattgtatttctgattctccctctcttcgaattatctgacttttttgtttttgtgcacatagtaatcatatcaccgctgcataacaacacagtgcatctttttaaaacaaggaaaagggaaaaaaaggagaaaaaacgatgcatcaagcttgtttgtcaaataccacagtattttattcattgttatcttgccaatggaaataaagtatgatattgcatttaaatattatatttatacctcatgtatatttttacctcaattgttgatatcaatcatcaattgtaaataaataattgccaaggcaaataaatttatatatattaaatatttcctattttctat

SEQ ID NO: 1045 - DNA, 575 bp, Artificial
  cDNA Sequence
ttgactgagactggagacagacggcaacagccacaggcagactgaggtggcaataggaaatctgccgagatgttcagtcaggtgcccaggaccccagcctcaggctgctactacctaaattccatgacacctgagggccaggagatgtacttgcgatttgatcagactacaagacgctctccttacaggatgagccggattctagcacgccatcagctagtgactaaaattcaacaagagaaattgaggcaaaagaagcatgtgactggctccgtgctgccgggttcccgcaatacgctcagttatatgaggattcacaatttcccatcaacattgtggctgtcaagaatgatcatgattttcttgaaaaggaccttgtagaacctctttgcagaccaggtactcaggatgacttttatatgcctaagctttcaggaagaatgtgtaagaagatacaaaatcagggaggagattgaggggaagagagagactttatattcttgttattcacttctctatgtatatttcaggtgtttgtattgcattattaaaaacattagcaatgttttaaaaaa

SEQ ID NO: 1046 - DNA, 978 bp, Artificial
  cDNA Sequence
cggaaacatgagagaggactatcatctgctccttgctctgaatttctttgaacctccatgctggaaccctcctcagttctccatgcaaacgttaaccaggcccctttgtggtgcttggtgctgcgctggtgcagagaatgcaaagacactgtctgtggtgggaaacagaaaagcagagtgaaccacacattccagcgccgggaaattgaggcaaaagaagcatgtgactggctccgtgctgccgggttcccgcaatacgctcagttatatgaggattcacaatttcccatcaacattgtggctgtcaagaatgatcatgattttcttgaaaaggaccttgtagaacctctttgcagacgactaaatacgttgaacaagtgtgcctcaatgaaacttgatgtgaacttccaaaggaaaaagggtgacgactccgatgaggaagatctttgtatcagcaacaaatggactttccaaagaaccagtcgcaggtggtctcgtgtggacgacctctacacgctgctccctcgaggagacagaaatgggtcaccgggaggcacggggatgaggaacacgaccagcagtgagagcgtcctcacagacctgagcgagcctgaggtctgctccattcacagcgaaagcagtggaggcagcgacagtcgcagccagccgggccagtgctgtacagacaacccggtcatgctggatgccccactcgtcagcagcagcctcccacagccccccagagatgtcctcaaccaccccttccaccccaagaatgagaagcccacgagggctagggccaaatcatttttgaaacgcatggaaacactccgagggaagggagcccacgggaggcataaggggtctgggcggacaggtggcctggtgatcagtgggcccatgttgcagcaggagccagagtcctttaaggctatgcagtgcatccaaataccaaatggagatctccagaattcgccg

SEQ ID NO: 1047 - DNA, 653 bp, Artificial
  cDNA Sequence
aaattgaggcaaaagaagcatgtgactggctccgtgctgccgggttcccgcaatacgctcagttatatgaggattcacaatttcccatcaacattgtggctgtcaagaatgatcatgattttcttgaaaaggaccttgtagaacctctttgcagacgactaaatacgttgaacaagtgtgcctcaatgaaacttgatgtgaacttccaaaggaaaaagaagagaaaagggaccctttaaggattcgagatgaccttccctgcctctgtaagagtcaggtggaggagtattctcgagcttagctgcacgcctcactggaagactaacaacccagccaagagcatttcaggagacaggacaccagcacttctgccgcctgcagctcgggctctccactcccgcggcattcccagcggcccattcctgcttccaaacaggcaggcccggccacgtagctccagttaacgtctaaatttctatgtgactatggatgcgttgccttttgcagctgtggattcgtgtgggttcctgtttccagtgtaaagatatggccaaattccgtcttttgaaaaaagcccttctttatggaatgtctggttggcatctgtctctgaggaatatataatttcagtgaagaatgttctcatttttaga

SEQ ID NO: 1048 - DNA, 582 bp, Artificial
  cDNA Sequence
ccctttctaaaccctgcttggccatcgagagcgtgggatccaaagttcaattgcaagggttgggactcagctctgcctcccatgagctgcgaggcctcagcaattactgacttctttgtgcctttcctgctgttctggttgtttttgttgatgatgactctgggtgcgtgttcacacgaggaatgtggagcttacacagtgcttcccagctggctctttctatgtctgctcctccaatgacctggcatccacttttcctcagatgtctccaaagagcagcggctgcaggccgtgcaggctgccatcctgctactggccgatgagaacagggaggtcctgcagacgctcttgtgtttcctgaacgacgtcgtcaacttggtggaagagaatcagatgacgcccatgaacctggcagtgtgtctggccccctccctctttcatcttaatttattgaagaaagaaagctctccacgagtcatacagaagaaatatgccactgggaagccagatcaaaaggacctcaacgagaatctggcagcagctcaggggctagcgcacatgatcatggaatgcgacagactt

SEQ ID NO: 1049 - DNA, 723 bp, Artificial
  cDNA Sequence
gagctgtcctgggctgggtgccttgctctttgactgagactggagacagacggcaacagccacaggcagactgaggtggcaataggaaatctgccgagatgttcagtcaggtgcccaggaccccagcctcaggctgctactacctaaattccatgacacctgagggccaggagatgtacttgcgatttgatcagactacaagacgctctccttacaggatgagccggattctagcacgccatcagctagtgactaaaattcaacaagataggaaagtctactgacctccttccctgaaaatttggatcctcatattagcattccattccacttgctgtacttttagttggaaggtctaaggcagacaaagctgcttaaatatttttatcactgacttcctagaagaaggaggaaaaaatcttggcaagaagaagggaaatcagtcttgcagaatatcttgaagaagcctgcgaaggaattccactgactgtgttcattatctattggtcccaatactgagtggaggccgggtacggtggctcatgcctgtaatcccagcactttgggaggccaaggccgacctttagccaaatatttagtcatcaattaatgtgaacttcctgggtgattatagggtatctagtataatgagaaagttgttttgtcccaaaaggggatcaggaagctaaattttaaaataacataaatctagagttaagtttg

SEQ ID NO: 1050 - DNA, 452 bp, Artificial
  cDNA Sequence
ttgacataaataaggtagtagtttaaagggaaagtaatgattagcaaaacttatgaagacaggagcgatcaacgcacattaaatagtgtgtaaattacctaatcctaggcttgctgaatcttcagacacgtatatacataatatatttttgtgtcacaaaccagtcactctgtgttttctatatgaagagaaaataggtttgtgttaagaaatgatctctgaatgttcaagaaaataatactatgggcttgcttacatgggcagaaggaagatctccagtccgcggggaacggcagcacttttaaaactttgagattgatgagtggttaattagaccctcagccactcctatggtaagtcatgatggatgccaagacagcagtaaggggttgtgattttctttgttttcttccttgtgcaccaaagacacagagatggagctggtctcttgt

SEQ ID NO: 1051 - DNA, 601 bp, Artificial
  cDNA Sequence
cccagccaccctcttgagaaaggggagaatggccatcagcaatgcagagttcattttataagcatctctcttgtatgtgatctctcatttccttttgaagataaaaggcgagtgatgagtgtccccttggtctagttttcctgtcttctttctgttgtctttcacctaaaaacctagctatgaaaaagcaaggactcagctgggcacatggtgcattagaattcacattccatctgaataatattaaatctccctcttggcatcctgtttatgctaatctttttcgggacttaatgatgtttatcaggacttccatttcctcttctttagaaatgtgctcagctaatgaaggaaggttggttttcttgagaaagaaagattcataagaagagtatgcagcagattcttattctgagcattgcaggttcagcctctcactgcggtgacttcatattcatcaggaataggtataatctattctgtgcacagttgatttagggcagaaataaaagctcagacaacaaagcaaggctcctcttacacactactatgtctgaatacaaatggttcataattgaaggctaaacttcctcatctcacc

SEQ ID NO: 1052 - DNA, 546 bp, Artificial
  cDNA Sequence
ggagactctaagacttctgaagagtttcttgcttctttcctgtggggcagtgactccacttcccagcagtaatggaatatcctgaattagctacattaatgttagaaccatttggacctcacccaggacttcaactacattatgaaggcacaaggcaaatacccatctctgtacaccctgtgctactgtgtcatgtgctgctccaggcaactccaatggattggccaccctggccaatgtgttctagtatgttacgtttatgttcccctgctttctacaatcctgttcaaagagttgctgacttaaccacagagaggattccagaacctgagacacagaataaacttgagcaatcatagtccatccacttcattgtctcatcaaaaaccaaaggtccagtgaagctctggaactcaacgctgtaaaggagcgaaggagcttctatacagagcctggatgcctgtctccttatcctacttcagtggacttgactgcaatccggattatgctgttttctaagcatttaaaataaaataaaaagtataa

SEQ ID NO: 1053 - DNA, 466 bp, Artificial
  cDNA Sequence
tgagtggccaagtatgatttcacttataatcacaagagtcagtgtgacttgaagttgggctgtaatctcaaacttgtcactaaggagataggtgacctgcaacaggtgaatttaacctctctgaagttccatcagctcttctaaaatgaatgacttggacaagatcatctataagacatccatgtgctctaatacttcatgactctggacaggatagagctcacactgggcagcaggaaagtgacgggaaaggtcagcactggagtaggagcctggactcaaatcccccctgccacgcccctgccatggagccctgggaagccacatgatgtttcctatcctcatttgtctcattaatgcaatagagatcacggcaccagctttgtctcctgtgagggacttttgttacaatctgttgattttaaaccactgttatattacattcatagactaacacttagctgta

SEQ ID NO: 1054 - DNA, 945 bp, Artificial
  cDNA Sequence
ctagcgcggcgtttctggtggccaggcatcccggtcctcgcgcgtggcgcagcctcccagcgccggaccgacccatgtcgcgcccgcattgggtcccgggaccccggcgggagtgccgcgtccgtcctttccagtcgccgggagtctgagtcgcgggccacgcgggagtggcggtggagagcccgccggtcgttatgaggacggatctaaaatgaccagcaaacggaaaccttgccaaacgcagctcaggagatccatcagtgagcagttgcgggactccacggccagagcctgggatctgctgtggaagaacgtccgggagaggcggctggcaggactatctcttgagctgggcagtgaccaccacatggggcagaagaaagttctagagaagaaggtctgatgcctagaaagaaggaaaggacaccactggtgaagcgggagatttaaccttctttgaactcctcccttttttccttacttgaactgtaaagcaagtggtttgctaggtgttctgcccttaaacccatgcacccacatcctcatcagcctgaaagcattctggggaagatgcccagaatctatagcaccttgagagaaggtcactagcaagctaaattagaagtggagattatggatgattccaacactcaatgttgtaagcatacaatgttcattccacattttctctccaacacagtggccacatttagtgtgcacctaagaaataaacagacttttttggtttggacccagaaataaattgtggtaacccagcagttttgactgttgatgtttaaaaacctgtacatgcactgtagacctcaattaataacaattagtaactttccctgttatcatgctaaattgtatattctacatgatggatggtgttagagaaatttttgtggtctagtaaacttttgttgcttcataacttcagaa

SEQ ID NO: 1055 - DNA, 844 bp, Artificial
  cDNA Sequence
gacagatgagactttcatgcaagaaaataaatcctgcacatttgatgtactgctttaaacttaaagacctctttggacccgaaattgtaaggattctataaacctggagagtaatcctaagaaaaatcatcagaagaaaggaatttgtagaactaaaactgcaaacatccagaatcttgatggtgtgccaagccaaatgtcaactggaactcaaccaaaaactaaagtgctctctgataacagacccaaagaaagagtgggttcaagcaattcttctgcctcagcctcccaagtagctgggattacaggtgtacgccattgtgtccggaattggtgggttcttggtctcactgacttcaagaatgaagccgtggaccctcgcgcatgtccctgaaatggagcgaaggatacaccaaaggaagagttgctacatcccatctctcctgggaaaggaacatgctgcagggagagagttgcgagagctcttcacccttctaccctgcagcaaaggaaaatgggtctcctcaaggaaggcatttccccacagcaaagctgcaagcaacatgaaataatgcaccatgactatgggttcttggcaaaggattcctggcctggtacagttagaaattgggctctattctcaagcaaagggttccaacaaaaaaataccgcagcaagcagaccgtggaatgtgcttctccactcttccatacggggtgatggcacagaatcagagttgaacatgggagggaagtggaagggataaaaatgtaatggaattgcagagttgttggcattcagatgtgtaggtggtgggtggcaagtcctgcttattgcctgtggt

SEQ ID NO: 1056 - DNA, 420 bp, Artificial
  cDNA Sequence
atgtactgctttaaacttaaagacctctttggacccgaaattgtaaggttaaccacctgggacggtaaactaccgaagtctgcttctgcttccaaaggagaaccgcagtgaaagtggtggacatgtcctaccatctgtaagctcaagatcctctagagaactgcaggattcagggtgctctactgacagtacctggggcagccggatcaggaaagagtttgtctagccacagttgtcccttgcagtcagctacagaagacccagtgctgtgagaaaatcagacagaagtatttccaagactttccatgtctgactaaccaaggtaaaatcaggaactaacctaacagcttctgcaccatggcagaagagtttgcagaaatgtacctgttttacttttcaatagattatattttaacactt

SEQ ID NO: 1057 - DNA, 355 bp, Artificial
  cDNA Sequence
aatttgtagaactaaaactgcaaacatccagaatcttgatggtgtgccaagccaaatgtcaactggaactcaaccaaaaactaaacctttactgatcacatgtttcctctgtcttgaatggatagcagcatcgactgttgcaataaattctccactccgcagacctgggcagcccacacctgtgccagaaattatgcaccagatggcaactgaaaatgactggatatctatgagaagaggatatttagagaaaatacacatttacaagtaaagcaagatttttaaatcaacaattcctgtactgaaatgttacatttgttaaataaataaatatatcttggactgcagaaataca

SEQ ID NO: 1058 - DNA, 385 bp, Artificial
  cDNA Sequence
agtcataagagaaaaagcattttgtttgaactccacccactgaccttttgtggtttggcagggccagctgctggcaggctcccccagtgctgaatgctccgcgctccactgtgctgggcctgctgaaaaagcagacagcgctccctctcccccagaatcaggagccaaatgccacaccgattgtgcaacttgtctctggttaccaggaaaacgtaaagaaatgccaatgaagcagaaaggtcgacaaaattctttccaacgcttgaacaaaaaaggtatttttagggccctagatttatggaagtcaattcttccactcctcgccaggctttcaaacctcctattctttgcactacattatttgaataaaccgtaaataccctta

SEQ ID NO: 1059 - DNA, 382 bp, Artificial
  cDNA Sequence
ttacagaatcatcagggaacactggaagcacaggagcgtaatgtcctcgaggttcatccatgttgtagcatttgtcagaattttcttcctcttgaaggctgaagagcagtccgttgtatgtacataccgcattttgtttatccattcatccattgatagacacttgagttgcttccacatttttgctattgcgcataatgctgccatgaacatgggcatcagttgcagctgttttttctccaagaaaatgacatcctgagctaagccagactgtctctcgcttacccctcaactgtgccatttatgagaaaattcaaactttgtctaatgctacaagctgggaaactatgtctacaaccaaaataaaggatttaaatcttga

SEQ ID NO: 1060 - DNA, 2385 bp, Artificial
  cDNA Sequence
ggtagtgacgtcacgagatttggagctcgcgggaaaacttgtctctgcgttgtggggaggacgcgcgctcgcgcgggattttcaagcgtaggcccccgggaactcgagctgccatgagcctctgggtggacaagtatcggccctgctccttgggacggctggactatcacaaggagcaggcggcccagctgcggaacctggtgcagtgtggtgactttcctcatctgttagtgtacggaccatcaggtgctggaaaaaagacaagaattatgtgtattctacgtgaactttatggtgttggagtggaaaaattgagaattgaacatcagaccatcacaactccatctaaaaaaaaaattgaaattagcaccattgcaagtaactaccaccttgaagttaatcctagtgatgctggaaatagtgaccgagtagtcattcaggagatgttgaaaacagtggcacaatcacaacaacttgaaacaaactctcaaagggattttaaagtggtattattgacagaagttgacaaactcaccaaagatgctcagcatgccttgcgaagaaccatggaaaaatatatgtctacctgcagattgatcttgtgctgcaattctacatctaaagtgatcccacctattcgtagtaggtgcttggcggttcgtgtgcctgctcccagcattgaagatatttgccacgtgttatctactgtgtgtaagaaggaaggtctgaatcttccttcacaactggctcatagacttgcagagaagtcttgtagaaatctcagaaaagccctgcttatgtgtgaagcctgcagagtgcaacaatatccttttactgcagatcaagaaatccctgagacagattgggaggtgtatctgagggagactgcaaatgctattgtcagtcagcaaactccacaaaggctccttgaagttcgtggaaggctgtatgagcttctaactcattgtattcctcctgagataataatgaagggccttctctcagaactgttacataattgtgatggacaactgaaaggggaggtggcacaaatggcagcttactatgagcatcgtctacagctgggtagcaaagccatttatcacttggaagcgtttgtggccaaattcatggcactttataagaagttcatggaggatggattggaaggcatgatgttctgacttctgtcagttattcttgcaaagatttctcagtatcagtatttacatacagcttatattaaaagagctgtgggtaaattaactgaacttaatcatgtcgtatttgcgtttttttggtaataacttctctgtgaactattaatcatcctctgagttaaataattgctcctatactattgaagtatgtagttttgtacataacttagagactttagagtctaagaaaatgatcttaatttactttaagcattggttattcaagtattcattgttgatcctcctattctcttccgtctaatctctcacctgctaaaggagatttacacattagaaagcaaagattattttcatttatccagatgaccattttctgccacaggtaacatgattgtttgacacaccattatatttaattctagtttctctcaatgaataattgtatttttgtaggaaatgtaagatttcattctgaaacataattattggtatggacaaaattgcagataccatttctgttgaggctgcagatttccaacttttatttcagtggttcagattagtattaggtcggtactaagaaataagcatgttttcactaatttaagtacttgagactcttgaagaaaattcagaatgaagttctggagaaaggtatgttactgtagtaattactctttgaacaggttttgtgttttgtcattagctctgccctttttaattaaatattttggttcatggaccaaagggtttacttgacaaatttgtgtgacagactccgaacaattcctttactacgaagtataatttataaaataaaatatacccattttaagggtacagtttgatttttgaccagtgaaactatgatcccaatcaaggtatagatgccgtcaccccaaaaagttccctccatatccctttgcagtcagttcatccctaccctggcccagatgatcactgatcttgtcattatagatgagttttgccagttcaagaatttaatggaatcagatattgtaagcattcttgtgtaatacttcattctctctcattattgagattcatccatattgttgaatgtttcactagttaatgtttattgttcaatatttttgtatatacttttaaagcctattcacttgctgatggatctttggtttgtttccaggtttggttattatgaataaagttgctgtgaata

SEQ ID NO: 1061 - DNA, 882 bp, Artificial
  cDNA Sequence
atggctgtgccactcgcacatggcaatcttggcaaatctaccagggatcccttcaccgaagctatggacttggtgtaatgaaactttatttaaaaacaaaatctggaatttacaagttcgggttcagtccacactgagaccaccaaagtgatgggcagcctggaaaccaagtacagaagcattgagtgtggtccggcatttatggggaaatggaacactgacaacatgtgaggcaccaagactgccatgaagatcagcttgcatgtggactgaagctgaccttccattcatctttcttacctaacactggggaaaaaacgtgctaaaatcaagacagggtacgatcgggagcccatctgcctgggctgcaacgtggatttggacatcactgggcctttaatctggggcatgctggtgccgggttaggaaggttggctggctggcaaccaaatgaattttgagactgcagagtcctgagtaacccagagcaactttgtggttggctacaagactgatgaattctagcttcacacatgtgaatgacaggacaagagttcagtggctccatttaccagaaggtgaacaagaaattggagagcgctgtcaatctctcctggacagcaggaaacaataacactcatttcagaatagcagccaagtatcagattgactccgaagactgctttgcaggtaaagtgaacacatccaacctggaggtgtttctactccagttcatcaacacctcttttacaccaagctgataggtgtaggatacactcacaaccctaaagccaggtatcaaacagacactgtcagctctcctggatggcaagaacatcaatgtcagtggccacaagctcagtctaggactggattcaagcc

SEQ ID NO: 1062 - DNA, 394 bp, Artificial
  cDNA Sequence
tacaagaaatgcaatcagggggagcagaatgacgcagaggagtctggaagctcaggattgcattaagcgactttcccatactgtgaggagatgtggtggggaccattaactgttggaaggattccttttaaggatgcattatatcaagagctagatatcagagccacttgggagaaataagaaacaggtgtagaaacagtcgcagattggcatgagctgtggagaaagagtctggattctgggttgctgtgtcacacacagcccacttgcaggatgacagtggaagaatgagtcatgatctctgcaagcgcccatcaagaacagcctgagaggtctggaaagtgctcaccccaggacccttcatgtccttattaaaattgtatggcagaaaaaa

SEQ ID NO: 1063 - DNA, 413 bp, Artificial
  cDNA Sequence
cattatatcaagagctagatatcagagccacttgggagaaataagaaacaggtgtagaaacaggattggtagacaacatgttcatgcaaatgatatgaagaagattggcacctggaaaatcaaggaagaggtggggccgtgtaggcagagacttaattttctcaagtgaatgaagaaaaaagcacatggtgaggctgattctgtggggatgtatttgagctagaagattcaggagggaaaattagttctaagacaaagatggagacatcaataagattgggaaatactcagacgtcagaagaatttgggtttgaatcagaattcctttacatactttctaagtttcaagttaagcagcaattcagtgtttcaaaccttacgattgataaacaaaaaataaaatgaaattcacc

SEQ ID NO: 1064 - DNA, 463 bp, Artificial
  cDNA Sequence
gtgtgggaggcctccatcaatgaacactggatcatcaagtgtagtgatggtgacttccagcaactccagggctcagccaagcagcagccatgcaaggttgtccccttgaaaggcctgtgggagagagtggtgcccccttgctggatgttcactttgatgggatcccgtagtacacatgcccacttttggaagagacctggcacatacgcccgttcaacttcactaagaaccacacctttcacctgctgaagctgggtgatgtctcttcacctactgcaatctcacttcctgggggaactgatgaagtccaagcatcttggacatcaccaccgtgtttgagagacacagattcctatgctggtggaaggagaacattggcagggaggcgatgatgctggtcccaccagctgactgcagctactggtcttcccatggatgatcaagcccctggtcatcaagcact

SEQ ID NO: 1065 - DNA, 10783 bp, Artificial
  cDNA Sequence
gcggcgtcggggcttcacaacaacagtggtggccgtagcagcggccgggccgggctgaggcgcaggcggggagcgggcccggcgccgcggcgctggtggatgctggggctccgaggcgacggccggggggcgggggccgaggcaggtataacggtaccggcggcggcagcgccgctgctcttcccttctcctcaggaggggggccaatggctagcgagaagccgggcccgggcccggggctcgagcctcagcccgtggggctcattgccgtcggggccgctggcggaggcggcgggggcagcggtggtggcggcaccgggggcagcgggatgggggagctaaggggggcgtccggctccggctcggtgatgctccccgcggggatgattaacccttcggtgccgatccgcaacatccggatgaaattcgcagtgttgattggactcatacaggtcggagaggtcagcaacagggacatcgtggagacggtgctcaacctgctggttggtggagaatttgacttggagatgaactttattatccaggatgctgagagtataacatgtatgacagagcttttggagcactgtgatgtaacatgtcaagcagaaatatggagcatgtttacagccattctacgaaaaagtgttcggaatttacagactagcacagaagttgggctaattgaacaagtattgctgaaaatgagtgctgtagatgacatgatagcagatcttctagttgatatgttgggggttcttgccagctacagcatcactgtcaaggagttgaagcttttgttcagcatgcttcgaggagaaagtggaatctggccaagacatgcagtaaaattattatcagttcttaatcagatgccacagagacacggtcctgatacttttttcaatttccctggttgtagcgctgcggcaattgccttgcctcctattgcaaagtggccttatcagaatggcttcaccttaaacacttggtttcgtatggatccattaaataatattaatgttgataaggataaaccttatctttattgttttcgtactagcaaaggagttggttactctgctcattttgttggcaactgtttaatagtcacatcattgaagtccaaaggaaaaggttttcagcattgtgtgaaatatgattttcaaccacgcaagtggtacatgatcagcattgtccacatttacaatcgatggaggaacagtgaaattcggtgttatgttaatggacaactggtatcttatggtgatatggcttggcatgttaacacaaatgatagctatgacaagtgctttcttggatcatcagaaactgctgatgcaaatagggtattctgtggtcaacttggtgccgtgtatgtgttcagtgaagcactcaacccagcacagatatttgcaattcatcagttaggacctggatataagagtaccttcaagtttaaatctgagagtgatattcatttggcagaacatcataaacaggtgttatatgatgggaaacttgcaagtagcattgcctttacatataatgctaaggccactgatgctcagctctgcctggaatcatcaccaaaagagaatgcatcaatttttgtgcattccccacatgctctaatgcttcaggatgtgaaagcgatagtaacacattcaattcatagtgcaattcattcaattggagggattcaagtgctttttccactttttgcccaattggataataggcagctcaatgacagtcaagtggaaacaactgtctgtgctactctgttggcattcctggttgaactacttaaaagttcagtagccatgcaagaacagatgctgggtggaaaaggctttttagtcattggctacttacttgaaaagtcatcaagagttcatataactagagctgtcctggagcaatttttatcttttgcaaaataccttgatggtttatctcatggagcacctttgctgaagcagctttgtgatcacattttatttaacccagccatctggatacatacacctgcaaaggttcagctttccctatacacatatttgtctgctgaatttattggaactgctaccatctacaccaccatacgcagagtaggaacagtattacagctaatgcacaccttaaaatattactactgggttattaatcctgctgacagtagtggcattacacctaaaggattagatggtccccggccatcacaaaaagaaattatatcactgagggcatttatgctactttttctgaaacagctgatactaaaggatcgaggggtcaaggaagatgaacttcagagtatattaaattacctacttacgatgcatgaggatgaaaatattcatgatgtgctacagttactggtggctttaatgtcggaacacccagcctcaatgataccagcatttgatcaaagaaatggaataagggtgatctacaaattattggcttctaaaagtgaaagtatttgggttcaagctttgaaggttctgggatactttctgaagcatttaggtcacaagagaaaagttgaaattatgcacacccatagtcttttcactcttcttggagaaaggctgatgttgcatacaaacactgtgactgtcaccacatacaacacactttatgagatcttgacagaacaagtatgtactcaggtcgtacacaaaccacatccagagccagattctacagtgaaaattcagaatccaatgattcttaaagtggtggcaactttgttaaaaaactctacaccaagtgcagagctgatggaagttcgtcgtttatttttatctgatatgataaaacttttcagtaacagccgtgaaaatagaagatgcttattgcagtgttcagtgtggcaggattggatgttttctcttggctatatcaatcctaaaaattctgaggaacagaagattaccgaaatggtctacaatatcttccggattcttttgtatcatgcaataaaatatgaatggggaggctggagagtctgggtggataccctctcaatagcccattccaaggtcacttatgaagctcataaggaatacctagccaaaatgtatgaggaatatcaaagacaagaggaggaaaacattaaaaagggaaagaaagggaatgtgagcaccatctctggtctttcatcacagacaacaggagcaaaaggtggaatggaaattcgagagatagaagatctttcacaaagccagagcccagaaagtgagaccgattaccctgtcagcacagatactcgagacttactcatgtcaacaaaagtgtcagatgatattcttggaaattcagatagaccaggaagtggtgtacatgtggaagtacatgatcttttagtagatataaaagcagagaaagtggaagcaacagaagtaaagctcgatgatatggatttatcaccggagactttagtaggtggagagaatggtgcccttgtggaggttgaatctctgttggataatgtatatagtgctgctgttgagaaactccagaacaatgtacatggaagtgttggtatcattaaaaaaaatgaagaaaaggataatggtccattgataacattagcagatgagaaagaagaccttcccaatagtagtacatcatttctctttgataaaatacccaaacaggaggaaaaactacttcctgaactttctagcaatcacattattccaaatattcaggacacacaagtacatcttggtgttagtgatgatcttggattgcttgctcacatgaccggtagcgtagacttaacttgtacatccagtataatagaagaaaaagaattcaaaatccatacaacttcagatggaatgagcagtatttctgaaagagacttagcgtcatcaactaaggggctggagtatgctgaaatgactgctacaactctggaaactgagtcttctagtagcaaaattgtaccaaatattgatgcaggaagtataatttcagatactgaaaggtctgacgatggcaaagaatcaggaaaagaaatccgaaaaatccaaacaactactacgacacaagctgtgcagggtcggtctatcacccaacaagaccgagatctccgagttgatttaggatttcgaggaatgccaatgactgaggaacagcgacgccagtttagcccaggtccacggactacaatgtttcgtattcctgagtttaaatggtctccaatgcaccagcggcttctcactgatttactatttgcattagaaactgatgtacatgtttggaggagccattctacaaagtctgtaatggattttgtcaatagcaatgaaaatattatttttgtacataacacaattcacctcatttcccaaatggtagacaacatcatcattgcttgtggaggaattttacctttgctctctgctgctacatcaccaactacggaattggaaaatattgaagtgacacaaggcatgtcagctgagacagcagtaactttcctcagccggctgatggctatggttgatgtacttgtgtttgcaagctctctaaattttagtgagattgaagctgagaaaaacatgtcttctggaggtttaatgcgacagtgcctaagattagtttgttgtgttgctgtgagaaactgtttagaatgtcggcaaagacagagagacaggggaaataaatcttcccatggaagcagtaaacctcaggaagttcctcaaagtgtgactgctacagcagcttcgaagactccattggaaaatgttccaggtaacctttctcctattaaggatccggatagacttcttcaggatgttgatatcaatcgccttcgtgctgttgtctttcgggatgtggatgatagcaaacaagcacagttcttagctctggctgttgtttacttcatttcggttctgatggtttccaagtatcgtgacatattagaaccccagagagagactacaagaactggaagccaaccaggtagaaacatcaggcaagaaataaattcaccaacaagtacagttgtggtcataccatctatccctcatccaagtttgaaccatggattccttgccaagttaattcctgagcagagctttggccactcattttacaaagaaacacctgctgcatttccagacaccataaaagaaaaagaaacaccaactcctggtgaagatattcaggtagaaagttcaattccccatacagattcaggaattggagaggagcaagtggctagcatcctgaatggggcagaattagaaacaagtacaggccctgatgccatgagtgaactcttatccactttgtcatccgaagtgaagaaatcacaagagagcttaactgaaaatcctagtgaaacgttgaagcctgcaacatccatatctagcattagtcaaaccaaaggcatcaatgtgaaggaaatactgaaaagtcttgtggctgctccagttgaaatagcagaatgtggccctgaacctatcccatacccagatccagcattgaagagagaaacacaagctattcttcctatgcagtttcattcctttgacaggagtgttgtggtgcctgtaaagaaaccacctccaggtagtttagctgtaaccactgtgggagccactactgctggaagtgggctgccaacaggcagtacctctaatatatttgctgctactggagctacaccaaaaagtatgattaatacaacaggtgccgtggattcagggtcctcctcctcttcctcctcttctagttttgtgaatggtgctactagcaaaaaccttccagctgtacaaactgttgctccaatgccagaagattcagctgaaaatatgagcatcactgcaaaacttgaaagagcgttagaaaaagttgctcctcttcttcgtgaaatttttgtagactttgccccattcctatctcgtacacttcttggcagtcatggacaagagctattgatagaaggccttgtttgtatgaagtccagcacatctgtggttgagcttgttatgctgctttgttctcaggaatggcaaaactctattcagaagaatgcaggacttgcatttattgagctcatcaatgaaggaagattactgtgccatgctatgaaggaccatatagtccgtgttgcaaatgaagctgagtttattttgaacagacaaagagccgaggatgtacataaacatgcagagtttgagtcacagtgtgcccaatatgctgctgatagaagagaggaagaaaagatgtgtgaccatcttatcagtgctgctaaacatcgagatcatgtaacagcaaatcagctgaaacagaagattctcaatattctcacaaataaacatggtgcttggggagcagtttctcatagccaattgcatgatttctggcgtttggattactgggaagatgatcttcgtcgaaggagacgatttgttcgcaatgcatttggctccactcatgctgaagcattgctgaaagctgcaatagaatatggcacggaagaagatgtagtaaagtcaaagaaaacattcagaagtcaagcaatagtgaaccaaaatgcagagacagaacttatgctggaaggagacgatgatgcagtcagtctgctacaggagaaagaaattgacaaccttgcaggcccagtggttctcagcacccctgcccagctcatcgctcccgtggtggtggccaaggggactctctccatcaccacgacagaaatctacttcgaggtagatgaggatgattctgccttcaagaagatcgacacgaaagttcttgcatacactgagggacttcacggaaaatggatgttcagcgagatacgagctgtattttcaagacgttaccttctacaaaacactgctttggaagtatttatggcaaaccgaacctcagttatgtttaatttccctgatcaagcaacagtaaaaaaagttgtctatagcttgcctcgggttggagtagggaccagctatggtctgccacaagccaggaggatatcattggccactcctcgacagctttataaatcttccaatatgactcagcgctggcaaagaagggaaatttcaaacttcgaatatttgatgttccttaatactattgcaggacggacatataatgatctgaaccaatatccagtgtttccgtgggtgttaaccaactatgaatcagaagagttggacctgactcttccaggaaacttcagggatctatcaaagccaattggtgctttgaaccccaagagagctgtgttttatgcagagcgttatgagacatgggaagatgatcaaagcccaccctaccattataatacccattattcaacagcaacatctactttatcctggcttgttcgaattgaacctttcacaaccttcttcctcaatgcaaatgatggaaaatttgatcatccagatcgaaccttctcatccgttgcaaggtcttggagaactagtcagagagatacttctgatgtaaaggaactaattccagagttctactacctaccagagatgtttgtcaacagtaatggatataatcttggagtcagagaagatgaagtagtggtaaatgatgttgatcttcccccttgggcaaaaaaacctgaagactttgtgcggatcaacaggatggccctagaaagtgaatttgtttcttgccaacttcatcagtggatcgaccttatatttggctataagcagcgaggaccagaagcagttcgtgctctgaatgtttttcactacttgacttatgaaggctctgtgaacctggatagtatcactgatcctgtgctcagggaggccatggaggcacagatacagaactttggacagacgccatctcagttgcttattgagccacatccgcctcggagctctgccatgcacctgtgtttccttccacagagtccgctcatgtttaaagatcagatgcaacaggatgtgataatggtgctgaagtttccttcaaattctccagtaacccatgtggcagccaacactctgccccacttgaccatccccgcagtggtgacagtgacttgcagccgactctttgcagtgaatagatggcacaacacagtaggcctcagaggagctccaggatactccttggatcaagcccaccatcttcccattgaaatggatccattaatagccaataattcaggtgtaaacaaacggcagatcacagacctcgttgaccagagtatacaaatcaatgcacattgttttgtggtaacagcagataatcgctatattcttatctgtggattctgggataagagcttcagagtttattctacagaaacagggaaattgactcagattgtatttggccattgggatgtggtcacttgcttggccaggtccgagtcatacattggtggggactgctacatcgtgtccggatctcgagatgccaccctgctgctctggtactggagtgggcggcaccatatcataggagacaaccctaacagcagtgactatccggcaccaagagccgtcctcacaggccatgaccatgaagttgtctgtgtttctgtctgtgcagaacttgggcttgttatcagtggtgctaaagagggcccttgccttgtccacaccatcactggagatttgctgagagcccttgaaggaccagaaaactgcttattcccacgcttgatatctgtctccagcgaaggccactgtatcatatactatgaacgagggcgattcagtaatttcagcattaatgggaaacttttggctcaaatggagatcaatgattcaacacgggccattctcctgagcagtgacggccagaacctggtcaccggaggggacaatggggtagtagaggtctggcaggcctgtgacttcaagcaactgtacatttaccctggatgtgatgctggcattagagcaatggacttgtcccatgaccagaggactctgatcactggcatggcttctggtagcattgtagcttttaatatagattttaatcggtggcattatgagcatcagaacagatactgaagataaaggaagaaccaaaagccaagttaaagctgagagcacaagtgctgcatggaaaggcaatatctctggtggaaaaaactcgtctacatcgacctccgtttgtacattccatcacacccagcaatagctgtacattgtagtcagcaaccattttactttgtgtgttttttcacgactgaacaccagctgctatcaagcaagcttatatcatgtaaattatatgaattaggagatgttttggtaattatttcatatattgttgtttattgagaaaaggttgtaggatgtgtcacaagagacttttgacaattctgaggaaccttgtgtccagttgttacaaagtttaagctttgaacctaacctgcatcccatttccagcctcttttcaagctgagaaaaaaaaaaaaaaacacgtttgatactttgtacatcagatgcatcttatttaaaagggatacttttgtaaaagtaaaaccttgtataaagaacaaaatgtttcttaattttattgtggagttacaacttgcatgttccttactcctgttggcttgatggaacaggtgcattcacactatgaaacagaaagatctgtccaaggacacagcttgtatgaaagggttgaatttgggctccatcagtaatttttgacattttcaccaaaatatagtttgcactttttaatctaaagtcatcccttctgagtgaaatttgctcataaagcatttggatactaagccattatttgccattttgggtactttatacaaagaaaattcagccctaccctgcataatttgaagacacagcagaaagggggcttagggatgaggtcctggtttttcttgtataaataggagtcatgggcgttagttctgtagtaataacttcccagcacctggacatctcttccagagttatcccactggcttggtgtgtatacattaggggaggataatctgatgctaactttttttttctctttggttcttgaatagcttagtttctttaataacaagtcaaactttattacaacaataactgaagttattcttttaggttctcgtgaaattctcactgaaagccacattcttagcctaaggcatttcatcttttatgatataaaatgatggctatcaaatgattttccatacattgtactgatcaagttatacacccaggggtatatacactttcttcatgtttcttctttgtatatttggtgactgtatcgtcatagatgtacatattgtgtcggtagggctatgaggcatgttacaggaatgtaattttctcagaatttacactcactcgcagtcatttatttaaaaagataaaacaagataatgggttctttgtattggcactttgcaccagaaacatatcattatttattgatgtgattacttatttgttatccaccttgtactagtaagttttagcactgaattccttcttcactgttgtttgtatttatgaaattctgaaattatggggaatcagcgtaatgattaagttattcatcaccaggctgtaagcaatatcttgagtttgtagcttagaattgggaggatacttaacatctggaagacaagttcatttcatcttgagatcatggtgaaatattttggatatataaattccttaagctattgtaaccatgttttattgcaaagatgtaaaatatgccagatgtgtgtgagttggaaatcaaaaaaagaaaaataaaatatgcaaagaattca

SEQ ID NO: 1066 - DNA, 766 bp, Artificial
  cDNA Sequence
gagcagctgccgaagtcagttccttgtggagccggagctgggcgcggattcgccgaggcaccgaggcactcagaggaggaaaatccagttgctgccaaggtcgtgcagtcactcagccctggagtcaagccagagcaggcaggcgccatgtcagaaccggctggggatgtccgtcagaacccatgcggcagcaaggcctgccgccgcctcttcggcccagtggacagcgagcagctgagccgcgactgtgatgcgctaatggcgggctgcatccaggaggcccgtgagcgatggaacttcgactttgtcaccgagacaccactggagggtgacttcgcctgggagcgtgtgcggggccttggcctgcccaagctctaccttcccacggggccccggcgaggccgggatgagttgggaggaggcaggcggcctggcacctcacctgctctgctgcaggggacagcagaggaagaccatgtggacctgtcactgtcttgtacccttgtgcctcgctcaggggagcaggctgaagggtccccaggtggacctggagactctcagggtcgaaaacggcggcagaccagcatgacagatttctaccactccaaacgccggctgatcttctccaagaggaagccctaatccgcccacaggaagcctgcagtcctggaagcgcgagggcctcaaaggcccgctctacatcttctgccttagtctcagtttgtgtgtcttaattattatttgtgttttaatttaaacacctcct

SEQ ID NO: 1067 - DNA, 421 bp, Artificial
  cDNA Sequence
cgccgaggcaccgaggcactcagaggaggtgagagagcggcggcagacaacaggggaccccgggccggcggcccagagccgagccaagcgtgcccgcgtgtgtccctgcgtgtccgcgaggatgcgtgttcgcgggtgtgtgctgcgttcacaggtgtttctgcggcaggtgaatgacgggcgtgggtcggtgcgcgctcggcttgcgcacacgggtgacgcgcagccggagtggaagcagttttggcgggcgagcagcgccttgcaggaaactgactcatcactactccctccagcggtccgaggctctgcccacgcacctcccactccgcgcgtgatttcctggaggccggcgccccctcccggccctggcgggaatagcacacaggctttcccgcggagtggggctggccggcgcgaa

SEQ ID NO: 1068 - DNA, 616 bp, Artificial
  cDNA Sequence
gctgccgaagtcagttccttgtggagccggagctgggcgcggattcgccgaggcaccgaggcactcagaggaggtgagagagcggcggcagacaacaggggaccccgggccggcggcccagagccgagccaagcgtgcccgcgtgtgtccctgcgtgtccgcgaggatgcgtgttcgcgggtgtgtgctgcgttcacaggtgtttctgcggcaggcgccatgtcagaaccggctggggatgtccgtcagaacccatgcggcagcaaggcctgccgccgcctcttcggcccagtggacagcgagcagctgagccgcgactgtgatgcgctaatggcgggctgcatccaggaggcccgtgagcgatggaacttcgactttgtcaccgagacaccactggagggtgacttcgcctgggagcgtgtgcggggccttggcctgcccaagctctaccttcccacggggccccggcgaggccgggatgagttgggaggaggcaggcggcctggcacctcacctgctctgctgcaggggacagcagaggaagaccatgtggacctgtcactgtcttgtacccttgtgcctcgctcaggggagcaggctgaagggtccccaggtg

SEQ ID NO: 1069 - DNA, 604 bp, Artificial
  cDNA Sequence
aggaaggggatggtaggagacaggagacctctaaagaccccaggtcaccagacttctctgagccccagtttccccagcagtgtatacgggctatgtggggagtattcaggagacagacaactcactcgtcaaatcctccccttcctggccaacaaagctgctgcaaccacagggatttcttctgttcaggcgccatgtcagaaccggctggggatgtccgtcagaacccatgcggcagcaaggcctgccgccgcctcttcggcccagtggacagcgagcagctgagccgcgactgtgatgcgctaatggcgggctgcatccaggaggcccgtgagcgatggaacttcgactttgtcaccgagacaccactggagggtgacttcgcctgggagcgtgtgcggggccttggcctgcccaagctctaccttcccacggggccccggcgaggccgggatgagttgggaggaggcaggcggcctggcacctcacctgctctgctgcaggggacagcagaggaagaccatgtggacctgtcactgtcttgtacccttgtgcctcgctcaggggagcaggctgaagggtccccaggtggacctggagactc

SEQ ID NO: 1070 - DNA, 2180 bp, Artificial
  cDNA Sequence
gaggcgggcccgggcggggcggttgtatatcagggccgcgctgagctgcgccagctgaggtgtgagcagctgccgaagtcagttccttgtggagccggagctgggcgcggattcgccgaggcaccgaggcactcagaggaggcgccatgtcagaaccggctggggatgtccgtcagaacccatgcggcagcaaggcctgccgccgcctcttcggcccagtggacagcgagcagctgagccgcgactgtgatgcgctaatggcgggctgcatccaggaggcccgtgagcgatggaacttcgactttgtcaccgagacaccactggagggtgacttcgcctgggagcgtgtgcggggccttggcctgcccaagctctaccttcccacggggccccggcgaggccgggatgagttgggaggaggcaggcggcctggcacctcacctgctctgctgcaggggacagcagaggaagaccatgtggacctgtcactgtcttgtacccttgtgcctcgctcaggggagcaggctgaagggtccccaggtggacctggagactctcagggtcgaaaacggcggcagaccagcatgacagatttctaccactccaaacgccggctgatcttctccaagaggaagccctaatccgcccacaggaagcctgcagtcctggaagcgcgagggcctcaaaggcccgctctacatcttctgccttagtctcagtttgtgtgtcttaattattatttgtgttttaatttaaacacctcctcatgtacataccctggccgccccctgccccccagcctctggcattagaattatttaaacaaaaactaggcggttgaatgagaggttcctaagagtgctgggcatttttattttatgaaatactatttaaagcctcctcatcccgtgttctccttttcctctctcccggaggttgggtgggccggcttcatgccagctacttcctcctccccacttgtccgctgggtggtaccctctggaggggtgtggctccttcccatcgctgtcacaggcggttatgaaattcaccccctttcctggacactcagacctgaattctttttcatttgagaagtaaacagatggcactttgaaggggcctcaccgagtgggggcatcatcaaaaactttggagtcccctcacctcctctaaggttgggcagggtgaccctgaagtgagcacagcctagggctgagctggggacctggtaccctcctggctcttgatacccccctctgtcttgtgaaggcagggggaaggtggggtcctggagcagaccaccccgcctgccctcatggcccctctgacctgcactggggagcccgtctcagtgttgagccttttccctctttggctcccctgtaccttttgaggagccccagctaccctttttctccagctgggctctgcaattcccctctgctgctgtccctcccccttgtcctttcccttcagtaccctctcagctccaggtggctctgaggtgcctgtcccacccccacccccagctcaatggactggaaggggaagggacacacaagaagaagggcaccctagttctacctcaggcagctcaagcagcgaccgccccctcctctagctgtgggggtgagggtcccatgtggtggcacaggcccccttgagtggggttatctctgtgttaggggtatatgatgggggagtagatctttctaggagggagacactggcccctcaaatcgtccagcgaccttcctcatccaccccatccctccccagttcattgcactttgattagcagcggaacaaggagtcagacattttaagatggtggcagtagaggctatggacagggcatgccacgtgggctcatatggggctgggagtagttgtctttcctggcactaacgttgagcccctggaggcactgaagtgcttagtgtacttggagtattggggtctgaccccaaacaccttccagctcctgtaacatactggcctggactgttttctctcggctccccatgtgtcctggttcccgtttctccacctagactgtaaacctctcgagggcagggaccacaccctgtactgttctgtgtctttcacagctcctcccacaatgctgaatatacagcaggtgctcaataaatgattcttagtgactttacttgtaa

SEQ ID NO: 1071 - DNA, 2650 bp, Artificial
  cDNA Sequence
gaggaggcccgagaggagtcggtggcagcggcggcggcgggaccggcagcagcagcagcagcagcagcagcagcaaccactagcctcctgccccgcggcgctgccgcacgagccccacgagccgctcaccccgccgttctcagcgctgcccgaccccgctggcgcgccctcccgccgccagtcccggcagcgccctcagttgtcctccgactcgccctcggccttccgcgccagccgcagccacagccgcaacgccacccgcagccacagccacagccacagccccaggcatagccttcggcacagccccggctccggctcctgcggcagctcctctgggcaccgtccctgcgccgacatcctggaggttgggatgctcttgtccaaaatcaactcgcttgcccacctgcgcgccgcgccctgcaacgacctgcacgccaccaagctggcgcccggcaaggagaaggagcccctggagtcgcagtaccaggtgggcccgctactgggcagcggcggcttcggctcggtctactcaggcatccgcgtctccgacaacttgccggtggccatcaaacacgtggagaaggaccggatttccgactggggagagctgcctaatggcactcgagtgcccatggaagtggtcctgctgaagaaggtgagctcgggtttctccggcgtcattaggctcctggactggttcgagaggcccgacagtttcgtcctgatcctggagaggcccgagccggtgcaagatctcttcgacttcatcacggaaaggggagccctgcaagaggagctggcccgcagcttcttctggcaggtgctggaggccgtgcggcactgccacaactgcggggtgctccaccgcgacatcaaggacgaaaacatccttatcgacctcaatcgcggcgagctcaagctcatcgacttcgggtcgggggcgctgctcaaggacaccgtctacacggacttcgatgggacccgagtgtatagccctccagagtggatccgctaccatcgctaccatggcaggtcggcggcagtctggtccctggggatcctgctgtatgatatggtgtgtggagatattcctttcgagcatgacgaagagatcatcaggggccaggttttcttcaggcagagggtctcttcagaatgtcagcatctcattagatggtgcttggccctgagaccatcagataggccaaccttcgaagaaatccagaaccatccatggatgcaagatgttctcctgccccaggaaactgctgagatccacctccacagcctgtcgccggggcccagcaaatagcagcctttctggcaggtcctcccctctcttgtcagatgcccgagggaggggaagcttctgtctccagcttcccgagtaccagtgacacgtctcgccaagcaggacagtgcttgatacaggaacaacatttacaactcattccagatcccaggcccctggaggctgcctcccaacagtggggaagagtgactctccaggggtcctaggcctcaactcctcccatagatactctcttcttctcataggtgtccagcattgctggactctgaaatatcccgggggtggggggtgggggtgggtcagaaccctgccatggaactgtttccttcatcatgagttctgctgaatgccgcgatgggtcaggtaggggggaaacaggttgggatgggataggactagcaccattttaagtccctgtcacctcttccgactctttctgagtgccttctgtggggactccggctgtgctgggagaaatacttgaacttgcctcttttacctgctgcttctccaaaaatctgcctgggttttgttccctatttttctctcctgtcctccctcaccccctccttcatatgaaaggtgccatggaagaggctacagggccaaacgctgagccacctgcccttttttctgcctcctttagtaaaactccgagtgaactggtcttcctttttggtttttacttaactgtttcaaagccaagacctcacacacacaaaaaatgcacaaacaatgcaatcaacagaaaagctgtaaatgtgtgtacagttggcatggtagtatacaaaaagattgtagtggatctaatttttaagaaattttgcctttaagttattttacctgtttttgtttcttgttttgaaagatgcgcattctaacctggaggtcaatgttatgtatttatttatttatttatttggttcccttcctattccaagcttccatagctgctgccctagttttctttcctcctttcctcctctgacttggggaccttttgggggagggctgcgacgcttgctctgtttgtggggtgacgggactcaggcgggacagtgctgcagctccctggcttctgtggggcccctcacctacttacccaggtgggtcccggctctgtgggtgatggggaggggcattgctgactgtgtatataggataattatgaaaagcagttctggatggtgtgccttccagatcctctctggggctgtgttttgagcagcaggtagcctgctggttttatctgagtgaaatactgtacaggggaataaaagagatcttatttttttttttatacttggcgttttttgaataaaaaccttttgtctt

SEQ ID NO: 1072 - DNA, 818 bp, Artificial
  cDNA Sequence
gaggaaagggtgtgggtgtctgctcctgcttgcatcgggtggggaggaaggcctcccaaagggcaccctgacttaggatgttgtgcaagcatccttgcttggatcctgtcggccatgagaatctcacccgggctcctgggcagtggtgaatgcaatttaaggatagtctatgagatacctttcttggttgtgcagacatgcatcccttcatccttcgcaggcggtcctgcctcacagggcctcaagttttgggtctgcggccagctgtgtttgtttcttggagcagttcataaagaatttcagtttatggtttgggctagcagagagggacccgagtgtatagccctccagagtggatccgctaccatcgctaccatggcaggtcggcggcagtctggtccctggggatcctgctgtatgatatggtgtgtggagatattcctttcgagcatgacgaagagatcatcaggggccaggttttcttcaggcagagggtctcttcagaatgtcagcatctcattagatggtgcttggccctgagaccatcagataggccaaccttcgaagaaatccagaaccatccatggatgcaagatgttctcctgccccaggaaactgctgagatccacctccacagcctgtcgccggggcccagcaaatagcagcctttctggcaggtcctcccctctcttgtcagatgcccgagggaggggaagcttctgtctccagcttcccgagtaccagtgacacgtctcgccaagcaggacagtgcttgatacaggaacaacatttacaactcattccagatcccaggcccc

SEQ ID NO: 1073 - DNA, 675 bp, Artificial
  cDNA Sequence
tgcttgcatcgggtggggaggaaggcctcccaaagggcaccctgacttaggatgttgtgcaagcatccttgcttggatcctgtcggccatgagaatctcacccgggctcctgggcagtgggacccgagtgtatagccctccagagtggatccgctaccatcgctaccatggcaggtcggcggcagtctggtccctggggatcctgctgtatgatatggtgtgtggagatattcctttcgagcatgacgaagagatcatcaggggccaggttttcttcaggcagagggtctcttcagaatgtcagcatctcattagatggtgcttggccctgagaccatcagataggccaaccttcgaagaaatccagaaccatccatggatgcaagatgttctcctgccccaggaaactgctgagatccacctccacagcctgtcgccggggcccagcaaatagcagcctttctggcaggtcctcccctctcttgtcagatgcccgagggaggggaagcttctgtctccagcttcccgagtaccagtgacacgtctcgccaagcaggacagtgcttgatacaggaacaacatttacaactcattccagatcccaggcccctggaggctgcctcccaacagtggggaagagtgactctccaggggtcctaggcctcaactcctccc

SEQ ID NO: 1074 - DNA, 212 bp, Artificial
  cDNA Sequence
ggacccgagtgtatagccctccagagtggatccgctaccatcgctaccatggcagttctggatggtgtgccttccagatcctctctggggctgtgttttgagcagcaggtagcctgctggttttatctgagtgaaatactgtacaggggaataaaagagatcttatttttttttttatacttggcgttttttgaataaaaaccttttgtctt

SEQ ID NO: 1075 - DNA, 407 bp, Artificial
  cDNA Sequence
gttcaaacaaagcagcattctcctgtgtcttttcctcataagtaagaacaaggctccctgactggcagtcctcacctttccgagctgtctgtgaactcgcaggggggagtggcccctgccaacgtgaccttgtctcccaacctgagccccgacaccaagcaggcctctcccttgatcagcccgctgctgaatgaccaggcctgcccccggacggacgatgaggatgagggccggaggaagagattcccaactgataaagcgtacttcatagctaaggaagtgtctaccaccgagcgaacatatctgaaggatctcgaagttatcacttcgtggtttcagagcacagtgagcaaagaggacgccatgccggaagcactgaaaagtctcatattcccgaattttgaacc

SEQ ID NO: 1076 - DNA, 550 bp, Artificial
  cDNA Sequence
gctccctgactggcagtcctcacctttccgagctgtctgtgaactcgcaggggggagtggcccctgccaacgtgaccttgtctcccaacctgagccccgacaccaagcaggcctctcccttgatcagcccgctgctgaatgaccaggcctgcccccggacggacgatgaggatgagggccggaggaagagattcccaactgataaagcgtacttcatagctaaggaagtgtctaccaccgagcgaacatatctgaaggatctcgaagttatcacttcgtggtttcagagcacagtgagcaaagaggacgccatgccggaagcactgaaaagtctcatattcccgaattttgaacctttgcacaaatttcatactaattttctcaaggaaattgagcaacgacttgccctgtgggaaggccgctcaaatgcccaaatcagagattaccaaagaatcggcgatgtcatgctgaagaacattcagggcatgaaggctggagtgcaatggcgcgatctcggctcactgcagcctccgcctcccaggttcaagcc

SEQ ID NO: 1077 - DNA, 578 bp, Artificial
  cDNA Sequence
ggctgtgcaaacaccacccgccgagccacgccgacttcagggactgccgagccgctttggcagagatcacggagatggtggcacagctccacggtacgatgatcaagatggagaatttccagaagctgcacgaactcaagaaagatttgattggcattgacaatcttgtggttccgggaagggtaagcagcagtggcctcactatgcactgcgcggggagcagaaaggaggcatcggagggacttacatttgaaccttttgaagagagacccttgcaaagcaaaatgtcctctttccatccacctgggagacaactggaaaaacacaacagtgtcgttagttcagaatcattgtgttcggaggagataaagcaatcctctgacctcatattctgctttttctccttacggggtgattcgcttctttaccttttcccctaccatatcccacagaagatttgagattgcttattttattttttttaaatgtacataaatgaaaatggaaaattaaaaaaaaaattaggtaaatagtaataaagccagaaaggtagtgcattaaattatgctagaaattcc

SEQ ID NO: 1078 - DNA, 1321 bp, Artificial
  cDNA Sequence
gcggccgctgcccgctttgcgccgctcctccctgcgcgagtagcgctggccccggcgtcgaggcggccatggcgacccggagcccgctccccacccaccccgcctgctccgccctcccctccgccccgcgccacctttgatggctcggacctcagccggccaccgccagccctgctcgcgcgcccgcgccgccgccgcccgcgggtattaatagccggcgccgccgcgccctcggccgccgggggcttgggagccgccgatcccggagcccgagccgggagagggagccgccgcagccgccggcgctgtggagatattctctaagccgctttcatcatgggagaaatagagcagaggccgaccccaggatcacgactgggggccccggaaaattcggggatcagtaccttggaacgtggacagaagccgcccccaacaccttcaggaaaactcgtgtccatcaaaatccagatgctggatgacacccaggaggcatttgaagttccaatggtgtcctcatcctccttcctcaaagccaccggctcctcctggacgggttgggtactgagatgctccatgaagcccaagcaccattcacatctaattgagaagtttggagaggacagaattctcactcatcttacaggctctatttcttacacaaactgggctggaagtagaagcttagcggtcacagtcactgaagagcttcttaatcttttttgagtcaggacttgaagtcctgtttcattatttcattcaaagaaattgattggcaatggccagagttaaattcaaaggtgacattaacacatttcagtgcccaataagtgatttttctgctgggtaggagtagatacagatgtgatctcagatacgtgaagctgcatacagaggggcccatccactcctaaacgggtctccaggaggcttggtttgatctactagatttggtgcctcttaaagggaagcaatacagcttttctgctgtgggttgtttgccactaggggaagattcatttctattccagccataaattagaccaaagagagggatttggtttattgctagtgcagaagttaaaaaccatcttcctttcctgagtggtctcttaattagattctttagtttttaaatgttaactggaattgctgaagtttaattcctgaaagggtttagtttttaaaaggagtacctcatttaccatattactgtgttctgagaaatctacagtaatttttgtgtaacttttttattcaaagaatggattgttaattgtaaagccatttagaaaggcgaataaagtcagatctactttaa

SEQ ID NO: 1079 - DNA, 4926 bp, Artificial
  cDNA Sequence
gcggccgctgcccgctttgcgccgctcctccctgcgcgagtagcgctggccccggcgtcgaggcggccatggcgacccggagcccgctccccacccaccccgcctgctccgccctcccctccgccccgcgccacctttgatggctcggacctcagccggccaccgccagccctgctcgcgcgcccgcgccgccgccgcccgcgggtattaatagccggcgccgccgcgccctcggccgccgggggcttgggagccgccgatcccggagcccgagccgggagagggagccgccgcagccgccggcgctgtggagatattctctaagccgctttcatcatgggagaaatagagcagaggccgaccccaggatcacgactgggggccccggaaaattcggggatcagtaccttggaacgtggacagaagccgcccccaacaccttcaggaaaactcgtgtccatcaaaatccagatgctggatgacacccaggaggcatttgaagttccacaaagagctcctgggaaggtgctgctggatgcagtttgcaaccacctcaacctcgtggaaggtgactattttggcctcgagtttcctgatcacaaaaagatcacggtgtggctggatctcctaaaacccattgtgaaacagattagaaggccaaagcacgttgttgttaagtttgtggtgaaattctttccgcctgaccacacacaactccaagaagaactcacaaggtacctgttcgcgctgcaggtgaagcaggacttggctcaaggcaggttgacgtgtaatgacaccagcgcagctctcttgatttcacacattgtgcaatctgagattggggattttgatgaagccttggacagagagcacttagcaaaaaataaatacatacctcagcaagacgcactagaggacaaaatcgtggaatttcaccataaccacattggacaaacaccagcagaatcagatttccagctcctagagattgcccgtcggctagagatgtatggaatccggttgcacccggccaaggacagggaaggcacgaagatcaatctggccgttgccaacacgggaattctagtgtttcagggtttcactaagatcaatgccttcaactgggccaaggtgcggaagctgagcttcaagaggaagcgctttctcatcaagctccggccagatgccaatagtgcgtaccaggataccttggaattcctgatggccagtcgggatttctgcaagtccttctggaaaatctgtgttgaacatcatgccttctttagactttttgaagagcccaaaccaaagcccaagcccgtcctctttagccgggggtcatcatttcggttcagtggtcggactcagaagcaggttctcgactatgttaaagaaggaggacataagaaggtgcagtttgaaaggaagcacagcaagattcattctatccggagccttgcttcacagcctacagaactgaattcggaagtgctggagcagtctcagcagagcaccagccttacatttggagaaggtgccgaatctccagggggccagagctgccggcgaggaaaggaaccgaaggtttccgccggggagccggggtcgcacccgagccctgcgccgaggagaagccccgcgggtaacaagcaggcggacggagccgcctcggcgcccacggaggaagaggaggaggtcgttaaggataggacccagcagagtaaacctcagcccccgcagccaagcacaggctccctgactggcagtcctcacctttccgagctgtctgtgaactcgcaggggggagtggcccctgccaacgtgaccttgtctcccaacctgagccccgacaccaagcaggcctctcccttgatcagcccgctgctgaatgaccaggcctgcccccggacggacgatgaggatgagggccggaggaagagattcccaactgataaagcgtacttcatagctaaggaagtgtctaccaccgagcgaacatatctgaaggatctcgaagttatcacttcgtggtttcagagcacagtgagcaaagaggacgccatgccggaagcactgaaaagtctcatattcccgaattttgaacctttgcacaaatttcatactaattttctcaaggaaattgagcaacgacttgccctgtgggaaggccgctcaaatgcccaaatcagagattaccaaagaatcggcgatgtcatgctgaagaacattcagggcatgaagcacctggcggctcacctgtggaagcacagcgaggccttggaggccctggagaatggaatcaagagctcccggcggctggagaacttctgcagagactttgagctgcagaaggtgtgttacctaccgctcaacaccttcctcctgcggccactgcaccggctcatgcactacaagcaggtcctggagcggctgtgcaaacaccacccgccgagccacgccgacttcagggactgccgagccgctttggcagagatcacggagatggtggcacagctccacggtacgatgatcaagatggagaatttccagaagctgcacgaactcaagaaagatttgattggcattgacaatcttgtggttccgggaagggagttcatccgtctgggcagcctcagcaagctctcggggaaggggctccagcagcgcatgttcttcctgttcaacgacgtcctgctatacacgagccgggggctgacggcctccaatcagtttaaagtccacgggcagctcccgctctatggcatgacgattgaggagagcgaagacgagtggggggtgccccactgcctgaccctccggggccagcggcagtccatcatcgtggccgccagttctcggtccgagatggagaagtgggttgaggacatccagatggccattgacctggcggagaagagcagcagccccgcccctgagttcctggccagcagcccccctgacaacaagtcccctgatgaagccaccgcggctgaccaggagtcagaggatgacctgagcgcctcgcgcacatcgctggagcgccaggccccgcaccgcggcaacacaatggtgcacgtgtgctggcaccgcaacaccagcgtctccatggtggacttcagcatcgcagtggagaatcagttgtctggaaacctgctgaggaaattcaaaaacagcaacgggtggcagaagctgtgggtggtgttcacaaacttctgcctgttcttctacaaatcacaccaggacaatcatccccttgccagcctgcctctgctcggctactcgctcaccatcccctctgagtccgagaacatccagaaagactacgtgttcaagctgcacttcaagtcccacgtctactacttcagggcggaaagcgagtacacgttcgaaaggtggatggaagtgatccgcagtgccaccagctctgcctcgcgaccccacgtgttgagtcacaaagagtctcttgtgtattgatggccggacacactcgtttccgcagtggctgctttcctggaagacgtttcctttcttctgtattaatgaagcctggtaaaattaacacctgtctgaaaatcaaaaacatggcttcccagcagctctcctgtctccacagccgcgttttttaaccccgacctctcagcgtctgaatgaacagcgctcccacctccagtcctggcatccgctgggggcgctgttctttagctagtgccagtattaaaacattgtcattacgagagtgccaaatgacatcttccctccaccctgcccctgaaaaacagtacacacacatccgttcaacacaagacagggcaagtgtttttcttcctaaaaaaagttctttcttttattattttcacctattggctgctgcattttacgaagtggacttcccggtgtttgtttgtttgtttgcaatacactcagtgcagccttaagcaaatgagatcattttcagatttcattttttttttcagtctttctacttttgtaataataggaagttagtaggactcacttctctgattaataagcaatttgcagcacacagcgttccactgcggggtttcacgctcacctgaaaacacctgttcccaacctacttcttggtgcaagttgaccaaatcgttttaagtggtaactctttccaaccgtagcagggttgttttctgttaagcaaagccgagatccagtgcaatacctggactgtcaccgtcctgtgagtggtgtacacaatgggaagataataagccgtggtgttttgctgtctgtctgtgtcacaagcatgaaaacccgtgtgtcattgatcagcaccatttgtggtatgttccgtgatgagcgtttagtgagcctgctggctgcagagcactatgaaatcatggtacgtagtccccggcacctgtcgttattcctatatcctcctgcaactgtggtttgaaactgcgcattctctagtagtatatatcgtgcctgtcttcaaaaacatttccctttttatactcattccccccaggcatggggtagtgtcagtcggactgcacagggaacacggtttccagtggctttggcccctactcgggaaacgtctgcctgttctcgatggtgatggggtggctgccattcccttggttttcctaagccctttctaacgagagtctcaaacaagcggaggcgagggccaattcaaccccattctttccagcgccccgcaccatagcacctgcccacctgagaaccaggaacgcaccctctctgtggagctctgactggtgtagctggaaacaaacagcaacttgcaaacggacgaagagcctgccgtgtgttaatcatttgccttacaagatgtaccagacggtttccagtactaacaaagggaataaaaatacctcacgccacaatccagcatattgatgttttaaggcaaaacaa

SEQ ID NO: 1080 - DNA, 604 bp, Artificial
  cDNA Sequence
ttttgtatttttggtagagacgaggtttcgccatgttgcccaggctgatctcgaactcctgacctcaagtgatccacccgtcctggactcccaaagtgctgagattacaggcatgagctactgtgcctgaccttgaagcttctttctgactgatagagatgaggaggggagaaaactgtcttctcacatcaccacaattgataaatgtatcctggcatcccgtctctgagatctggcccttctgatgttccccaccaactgggctcaccttatgttgtctgctagcttctgtttggctcactggggaatattgacaaactgggaagtgtcattcctacgtgacctgtttttctttctgtttctttttagctgagattggggattttgatgaagccttggacagagagcacttagcaaaaaataaatacatacctcagcaagacgcactagaggacaaaatcgtggaatttcaccataaccacattggacaaacaccagcagaatcagatttccagctcctagagattgcccgtcggctagagatgtatggaatccggttgcacccggccaaggacagggaaggcacgaagatcaatctggccgt

SEQ ID NO: 1081 - DNA, 1123 bp, Artificial
  cDNA Sequence
caagggcgacgcaagggtgacgcacgccacggccgttgggagcctgagactcaaacatggcagcgccaccttctccaggaaggacggccgaccaagcagaccaggtatgcaccttcctcttcaaaaagcctggacggaaaggggctgcaggcctcagaaagcgcccggcctgcgaccccgagcacggagagagcagcagcagcggggacgagggcgacacagtggctcagcccccgcgggtggcaccgaggccccggggcctccacagctggcagaaggcggctcacggcgacaggaggggcgaggaggcggcgcctgagagcctcgacgtggtgtacaggtccacccgctcggcgaagcctgtggggccagaggacatgggggccaccgctgacttcgagcaggacaccgagaaggagcaccatacgccgaccatcctcaagtgcagccagcgggtccaggaggcactgcggggtcgggagcacgaccacatctaccggggaatccacagctacctgaggtacctgaagcccaaggacacgtccatgggcaactcctcctcggggatggcgaggaagggccccatacgtgcgccagggcatctgcgcgccactgtgcgctgggattaccagcctgacatctgcaaggactacaaggagactggcttctgtggcttcggggacagctgcaaattcctccacgaccgttccgattacaagctcgggtgggagattgaacgggagcttgaagagggtcgctactgtatctgcgaggacgaaaaccatgaagtgggaagcgaggaagaggaaataccattcaggtgtttcatatgtcgccaggccttccaaaacccagtcgtcaccaagtgcaggcattatttctgcgagagctgcgcgctggagcacttccgggccaccccgcgctgctacatctgtgaccagccaaccggcggcatctttaaccccgccaaagaactgatggcgaaactgcaaaagcttcaggctgcagaaggtgggggcaagtcccatttcacagaagacccccatgagtgtccaattcccatggcttaggtttcccataattctcacatttaaataaatttttttgttcttttaggaaaaaa

SEQ ID NO: 1082 - DNA, 1376 bp, Artificial
  cDNA Sequence
cacggccgttgggagcctgagactcaaacatggcagcgccaccttctccaggaaggacggccgaccaagcagaccaggtatgcaccttcctcttcaaaaagcctggacggaaaggggctgcaggcctcagaaagcgcccggcctgcgaccccgagcacggagagagcagcagcagcggggacgagggcgacacagtggctcagcccccgcgggtggcaccgaggccccggggcctccacagctggcagaaggcggctcacggcgacaggaggggcgaggaggcggcgcctgagagcctcgacgtggtgtacaggtccacccgctcggcgaagcctgtggggccagaggacatgggggccaccgctgacttcgagcaggacaccgagaaggagcaccatacgccgaccatcctcaagtgcagccagcgggtccaggaggcactgcggggtcgggagcacgaccacatctaccggggaatccacagctacctgaggtacctgaagcccaaggacacgtccatgggcaactcctcctcggggatggcgaggaagggccccatacgtgcgccagggcatctgcgcgccactgtgcgctgggattaccagcctgacatctgcaaggactacaaggagactggcttctgtggcttcggggacagctgcaaattcctccacgaccgttccgattacaagctcgggtgggagattgaacgggagcttgaagagggtcgctactgtatctgcgaggacgaaaaccatgaagtgggaagcgaggaagaggaaataccattcaggtgtttcatatgtcgccaggccttccaaaacccagtcgtcaccaagtgcaggcattatttctgcgagagctgcgcgctggagcacttccgggccaccccgcgctgctacatctgtgaccagccaaccggcggcatctttaaccccgccaaagaactgatggcgaaactgcaaaagcttcaggctgcagaaggaaaaaagagataagaaagactcaagtctgtatgtacactggggagaagcagcctgttgagtaagatgagagagatgacagtcttcctgcaatcccatgcctgagtatgtaaccaaaagaattgaaatccggatctcaaagaggtatgtgcactcccatgttcactgcagaattatttgcaaaagccaagaggtgtaaacaacccaagtgtccatggatggatgaatggacaaacaaaatgcgatacacacacacaatggaatgctattaagccttaacgggaaggaaatccttttaaagatttaaactgatccttttaaggatcacatgctacaactagaatgaaccttgaagacgacactgctaagtgaaataaactagtcacaaaatga

SEQ ID NO: 1083 - DNA, 748 bp, Artificial
  cDNA Sequence
ggaaattcaaaacttagggattatttctgaaattttccatttaaaattttctatttaaaattgacgaagggtaactgaaaccagagaaagcaagactgacgataagggaggggcctcctgtactccaagagcactgaatctggaaaaactcaacacatcgatggagtcatatatttaattttttcttaaaagccgcctgcggggtattgtagaaacgctgcgctgcctatcacagcttgtgatgtgacacgttcattctgcaagtttaaacttcgcctagatcggttcttggggaaaagctgtgcttcagagacaaggttgaagaacttcgcctgcatatgatggaagatgacaatgggaaccacaggtgtcattggtggctttgttttacaaagtcttcacctttctgctgagtcacgggactaagttcaacacaatttctactttccgccttcctttggaataatagttttggaagccaagtattagtatatgataccaggtgtgttttctaaagattcaggttcagtgggctgaatgcactttcatgacttcattagaccactgagcccaaggagaaaagtgccaatcttactagacatgaggaaaaagacacatcttttgctcttgctggaagtggtgtcctactttctacaagcagtcgtcatctggtttatacttgccttgttcagtttttgtgtgatattttattctctgcctaatagatattaaagtatcaagctgtcaa

SEQ ID NO: 1084 - DNA, 558 bp, Artificial
  cDNA Sequence
cagggagacttgaacacaagcactgcttatctcgaaagctgatctgctcaccgaggtggcccttgagcacggacagcctggatctgctggatcggttcttggggaaaagctgtgcttcagagacaaggttgaagaacttcgcctgcatatgatggaagatgacaatgggaaccacaggtgtcattggtggctttgttttacaaagtcttcacctttctgctgagtcacgggactaagttcaacacaatttctactttccgccttcctttggaataatagttttggaagccaagtattagtatatgataccaggtgtgttttctaaagattcaggttcagtgggctgaatgcactttcatgacttcattagaccactgagcccaaggagaaaagtgccaatcttactagacatgaggaaaaagacacatcttttgctcttgctggaagtggtgtcctactttctacaagcagtcgtcatctggtttatacttgccttgttcagtttttgtgtgatattttattctctgcctaatagatattaaagtatcaagctgtcaa

SEQ ID NO: 1085 - DNA, 323 bp, Artificial
  cDNA Sequence
agttgtctcccaggtggatggaaagaggacattttgctttgcaagggtctctcttcaaaaggttcaaatttcgtgcagcttctggaaattctccatcttgatcatcgtaccgtggagctgtgccaccatctccgtgatctctgccaaagcggctgtgaaggaaagacatacacagtctgcagcgggaaaggcaggcaggggtcttcccctagcagctgtcagctcaacgctgcagggaaatcactccagtccctgcacagtattcaaaggtgtcttttgagcaaaaacagtgctatttctctataataaaaattgatggtgta

SEQ ID NO: 1086 - DNA, 2172 bp, Artificial
  cDNA Sequence
aagaaaacttcctacttgaccgagctcatcgacaggtacaagagatggaaggccgagcagagccatgacgactcgagctccgaggattccgacgcggaaacagatggccaagcctcggggggcagtgattctggggactggatcttcacaatccgagaaaaagatcccaagaatctcgagaatggagctcttcagccatcggacttggacagaaataagatgaaagacatcccgaagaggcctttctctcagtgtttatctacaattatttctcctctgtttgcagagttgaaggagaagagccaggcgtgcggagggaacttggggtccattgaagagctgcgaggggccatctacctagcggaggaggcgtgccctggcatctccgacaccatggtggcccagctcgtgcagcggctccagaggtaactacccagggcccctctgggctggggaaggagagacctgcacttgggctgggacttagttgatgagtttggtacttgattcttggcctgtctgttcctgttatcttgcaggcctcagggtagacagagttgaattagaggagactttgttctgaattctagaaatcaatgtgaatgaaggatctgaatctggaaactactggaaagcccacaggacttagtgcatttgtagcttttgccacataaatacagggtggtggtgaaatacctgtttcctcttaattatgcagcttaattattggccagagaatgatcgttcttagccagatgtgtgtaactatctatctggttttcggctttaaagtcaagtgtgagaaatgacagcagctttggtgtggtcaactcagcgggagcgggcgcaggtgtgttccctgtgttagctgtgtgtgtcatgtctggaagcctccttggtaggggttcatctgtgccagcctgtagggagcttttgtccctgcccagtggccccacctgttgaatgcactatgggtgaggactcagtggggtgacagttttgccctccctgccccctcccaacttgttgtaggagtatccatgggaaccaagcccctcctgactgccatctggcacaagtgcaggcgtttggaggcagtggatgtgtgctgggaagccgctctgtgtgacctgagggtgatttgtcactgggctgtcctccacacccccaggaggaccaggcgtgctgctgccttgacagttcatcttcaggtgtccaggctgacacctcccaaagctggctgagactctgtgatcatgagggggatttctgggtctttcctgagactgcgtcccacctgacagtacataaagaagttttgcacacgtgaggtcccttttgctatttggaagtgattgaaggggctgcctactgtcctgtgaagagcccctctacgtggggacagcaggagaaaaccacagttctgatacttcacgtttatgcttctgaactcgggtttcttagtaagacatttcaactttttaagttgctagaaaataaaaatgatctacttggctgccttcaattttgaggcaattgaaggacgatccctccctcctttgatactaaaaacaatataggaataaaggaaaatagaattaaaaagtcacccatcttttgcctgaacacaaactttttgatttctcaaacttagcatcacatacctcattctagaggcatttatttcccattagaaagagctttataataaaacaaatagaacaaaaccagaaacgggtaggattgttactgtcttgttgggcattttgctctctgcttttgtagtattacttttaaaaccaatactttccacactgtccagaattgcctgaaattgttatgaactgtttgtttatatacgtgacttgatttccccagggcagctccagggcacagagtgtgtggcttgtatgtgttgaactgatccacgtttcccattcccaggcccctatctctctgttcctcttcttttagttgttaaggcaagttgatctgtaccagtgctggccagtagaagtacagcgtgggccacacacagaattttatgttttctgctggatgtggtggctcatgcctgtaatcccaatgctttgggaggcccaggcaggaggatcgcttgaggccaagagtttgagaccagcctgggcaaaatagcaagaccctgtctctacc

SEQ ID NO: 1087 - DNA, 656 bp, Artificial
  cDNA Sequence
gtaaccgcgagttccacttgcagtggctttgcccggagcccccgtgcacctgcggaccgggggaaagtgcgagttgcaaaccttctggaaggaggaatccctcggacagccgcgcaccagggtcccgggcccggccccgggaccctggactttcactttgagacttggttgcatttacaggaattcttcgcccagtaaacctctctttcgaacctaaaggcagacccagaagagctttttacaaaactagagaaaattgggaagggctcctttggagaggtgttcaaaggcattgacaatcggactcagaaagtggttgccataaagatcattgatctggaagaagctgaagatgagatagaggacattcaacaagaaatcacagtgctgagtcagtgtgacagtccatatgtaaccaaatattatggatcctatctgaagtctgtgaacaggagctcttgtgagtctcaccagcgctagtcacattcctcaagcttgaccatccctttgagaactgatgaaacagctttgaaattggcaaagctgaagaatggacttcaaagcagagaaggtgtgaattgttttaagtgggagcttcatgggaataaaatatgaggcgtggccctgaagggaccttggggccagcttgcggtaag

SEQ ID NO: 1088 - DNA, 4345 bp, Artificial
  cDNA Sequence
gcccgcgggcctcgccgccccgcgcggatcgtcgcggcccggccgtcccgtcccaggaagtggccgtcctgagcgccatggctcactccccggtgcagtcgggcctgcccggcatgcagaacctaaaggcagacccagaagagctttttacaaaactagagaaaattgggaagggctcctttggagaggtgttcaaaggcattgacaatcggactcagaaagtggttgccataaagatcattgatctggaagaagctgaagatgagatagaggacattcaacaagaaatcacagtgctgagtcagtgtgacagtccatatgtaaccaaatattatggatcctatctgaaggatacaaaattatggataataatggaatatcttggtggaggctccgcactagatctattagaacctggcccattagatgaaacccagatcgctactatattaagagaaatactgaaaggactcgattatctccattcggagaagaaaatccacagagacattaaagcggccaacgtcctgctgtctgagcatggcgaggtgaagctggcggactttggcgtggctggccagctgacagacacccagatcaaaaggaacaccttcgtgggcaccccattctggatggcacccgaggtcatcaaacagtcggcctatgactcgaaggcagacatctggtccctgggcataacagctattgaacttgcaagaggggaaccacctcattccgagctgcaccccatgaaagttttattcctcattccaaagaacaacccaccgacgttggaaggaaactacagtaaacccctcaaggagtttgtggaggcctgtttgaataaggagccgagctttagacccactgctaaggagttattgaagcacaagtttatactacgcaatgcaaagaaaacttcctacttgaccgagctcatcgacaggtacaagagatggaaggccgagcagagccatgacgactcgagctccgaggattccgacgcggaaacagatggccaagcctcggggggcagtgattctggggactggatcttcacaatccgagaaaaagatcccaagaatctcgagaatggagctcttcagccatcggacttggacagaaataagatgaaagacatcccgaagaggcctttctctcagtgtttatctacaattatttctcctctgtttgcagagttgaaggagaagagccaggcgtgcggagggaacttggggtccattgaagagctgcgaggggccatctacctagcggaggaggcgtgccctggcatctccgacaccatggtggcccagctcgtgcagcggctccagagatactctctaagtggtggaggaacttcatcccactgaaattcctttggcatttggggttttgtttttccttttttccttcttcatcctcctccttttttaaaagtcaacgagagccttcgctgactccaccgaagaggtgcgccactgggagccaccccagcgccaggcgcccgtccagggacacacacagtcttcactgtgctgcagccagatgaagtctctcagatgggtggggagggtcagctccttccagcgatcattttattttattttattacttttgtttttaattttaaccatagtgcacatattccaggaaagtgtctttaaaaacaaaaacaaaccctgaaatgtatatttgggattatgataaggcaactaaagacatgaaacctcaggtatcctgctttaagttgataactccctctgggagctggagaatcgctctggtggatgggtgtacagatttgtatataatgtcatttttacggaaaccctttcggcgtgcataaggaatcactgtgtacaaactggccaagtgcttctgtagataacgtcagtggagtaaatattcgacaggccataacttgagtctattgccttgcctttattacatgtacattttgaattctgtgaccagtgatttgggttttattttgtatttgcagggtttgtcattaataattaatgcccctctcttacagaacactcctatttgtacctcaacaaatgcaaattttccccgtttgccctacgccccttttggtacacctagaggttgatttcctttttcatcgatggtactatttcttagtgttttaaattggaacatatcttgcctcatgaagctttaaattataattttcagtttctccccatgaagcgctctcgtctgacatttgtttggaatcgtgccactgctggtctgcgccagatgtaccgtcctttccaatacgattttctgttgcaccttgtagtggattctgcatatcatctttcccacctaaaaatgtctgaatgcttacacaaataaattttataacacgcttattttgcatactccttgaaatgtgactcttcagaggacagggcacctgctgtgtatgtgtggccgtgcgtgtgtactcgtggctgtgtgtgtgtgatgagacactttggaagactccagggagaagtccccaggcctggagctgccgagtgcccaggtcagcgccctggactgcttgcgcacttgctcaccgagatgatgcagttggaggttgctgatctgtgcgattgctgtagcggttgccggggaccttaagagttattttgcttctctggaaggggcctatgcttgctaggcaggcagccagtgtgtctgtttttcttggtttgctgtgggaccttgcttggcgagggggaaaatctctgggtttctggagtgggagggttcgtgcagcagctgttgactggtacatgaagcattcttttatgtttgttgaagctgatgattgacatctcccgtgggtgtgccagttcttgtggagttaagacaggatttttggaagcaaggaagttagtgggtgagcttggggatgtagctcagctatctgctggtctagtggcctctaagctatagggaggggacagagccctgagctacagatgcttgagtgggttattgtgtcggtttgctagtgcagtctggtttttaagctctaaaattgaggtattttattagaagtggatttgggttgaactcttaatttgtataagggatatattttggttggggaaatagaactgagttgctaattcttattgtactcattactccatacaagaatgttatgttgaataataaaattggagaagatttcattttgtgtttccagggagtattctgtgtggggaactgtttccttacgtgaggccggcggcataagtcaaagatgagttttgtccttgcgaatcacacagattgagtctgtgttccccagggtgtgccgttacctgatttttaagtgagccagggcggacagcagcttttctgatttacagagttcttcagatttacaaatggacaatgacatcacagtttttagcactgaagccagtctcatgctagtaacagtgggtgagccgctcgagggactgggttctaatgaatactggtatgaacggggagtctctgcagtcgccagacaaatcatactcagccccttcccccgtagagcaacaagtggttcttttagagttgactggcagcatttcctgtcgggggaggtggggtttgatggagttagaaagctcgcctctgtgtacattctctcctgggctgttactttctgtagacgcacaaaatcagccccaatgtttttaagggcatcttagccaaggaagctggcttttgtgtcgccacttccaggcctgcattaagagagagcccaggcaccagggctaccactggaacctgcctcagcgtcaactgctgctggtctgtagccaggcccagcctttgagacgggtttactgtcaccagtagcctctcagtgccagccctgagctgctcctggctcagctgcccagagcctgcagcctggggaggtactcagcctctgggagacgagggccgtggactgggtggctggtagctcctgcgtttttgagctgtgtcctggctggctgctgccaatgaggtggacaccagtgtggtttggggtgcactggccacttcttgctgggttctgattttcttggaagtgcatctgccttccttatccaatagttttatccctgcattgctcttgtgaagtggctggtttggttctgtatgtagcattttgtacctttcctctggcaaaacactgtcagtttataaacattttttatatttccctcctttaaaaacagcttgtgtatttctgctataaaatgtgtcagcaaaggcagagtgacctaatagggcatgttcttaagcacagggactgtatcatgcaggggccaataaagctcaagaaaacgag

SEQ ID NO: 1089 - DNA, 4449 bp, Artificial
  cDNA Sequence
ttgggttagggagagtgctttcgtttgttttaaatgggagaaactggagcatgttgccaagggcagagagccagcagagaggggtgaatggaagaaggagcgagaagggggttactgacgaagccttatcctggaggagagaaggatggactccagagcccagctttggggactggccttgaataaaaggagggccactctacctcatcctggagggagcacgaacctaaaggcagacccagaagagctttttacaaaactagagaaaattgggaagggctcctttggagaggtgttcaaaggcattgacaatcggactcagaaagtggttgccataaagatcattgatctggaagaagctgaagatgagatagaggacattcaacaagaaatcacagtgctgagtcagtgtgacagtccatatgtaaccaaatattatggatcctatctgaaggatacaaaattatggataataatggaatatcttggtggaggctccgcactagatctattagaacctggcccattagatgaaacccagatcgctactatattaagagaaatactgaaaggactcgattatctccattcggagaagaaaatccacagagacattaaagcggccaacgtcctgctgtctgagcatggcgaggtgaagctggcggactttggcgtggctggccagctgacagacacccagatcaaaaggaacaccttcgtgggcaccccattctggatggcacccgaggtcatcaaacagtcggcctatgactcgaaggcagacatctggtccctgggcataacagctattgaacttgcaagaggggaaccacctcattccgagctgcaccccatgaaagttttattcctcattccaaagaacaacccaccgacgttggaaggaaactacagtaaacccctcaaggagtttgtggaggcctgtttgaataaggagccgagctttagacccactgctaaggagttattgaagcacaagtttatactacgcaatgcaaagaaaacttcctacttgaccgagctcatcgacaggtacaagagatggaaggccgagcagagccatgacgactcgagctccgaggattccgacgcggaaacagatggccaagcctcggggggcagtgattctggggactggatcttcacaatccgagaaaaagatcccaagaatctcgagaatggagctcttcagccatcggacttggacagaaataagatgaaagacatcccgaagaggcctttctctcagtgtttatctacaattatttctcctctgtttgcagagttgaaggagaagagccaggcgtgcggagggaacttggggtccattgaagagctgcgaggggccatctacctagcggaggaggcgtgccctggcatctccgacaccatggtggcccagctcgtgcagcggctccagagatactctctaagtggtggaggaacttcatcccactgaaattcctttggcatttggggttttgtttttccttttttccttcttcatcctcctccttttttaaaagtcaacgagagccttcgctgactccaccgaagaggtgcgccactgggagccaccccagcgccaggcgcccgtccagggacacacacagtcttcactgtgctgcagccagatgaagtctctcagatgggtggggagggtcagctccttccagcgatcattttattttattttattacttttgtttttaattttaaccatagtgcacatattccaggaaagtgtctttaaaaacaaaaacaaaccctgaaatgtatatttgggattatgataaggcaactaaagacatgaaacctcaggtatcctgctttaagttgataactccctctgggagctggagaatcgctctggtggatgggtgtacagatttgtatataatgtcatttttacggaaaccctttcggcgtgcataaggaatcactgtgtacaaactggccaagtgcttctgtagataacgtcagtggagtaaatattcgacaggccataacttgagtctattgccttgcctttattacatgtacattttgaattctgtgaccagtgatttgggttttattttgtatttgcagggtttgtcattaataattaatgcccctctcttacagaacactcctatttgtacctcaacaaatgcaaattttccccgtttgccctacgccccttttggtacacctagaggttgatttcctttttcatcgatggtactatttcttagtgttttaaattggaacatatcttgcctcatgaagctttaaattataattttcagtttctccccatgaagcgctctcgtctgacatttgtttggaatcgtgccactgctggtctgcgccagatgtaccgtcctttccaatacgattttctgttgcaccttgtagtggattctgcatatcatctttcccacctaaaaatgtctgaatgcttacacaaataaattttataacacgcttattttgcatactccttgaaatgtgactcttcagaggacagggcacctgctgtgtatgtgtggccgtgcgtgtgtactcgtggctgtgtgtgtgtgatgagacactttggaagactccagggagaagtccccaggcctggagctgccgagtgcccaggtcagcgccctggactgcttgcgcacttgctcaccgagatgatgcagttggaggttgctgatctgtgcgattgctgtagcggttgccggggaccttaagagttattttgcttctctggaaggggcctatgcttgctaggcaggcagccagtgtgtctgtttttcttggtttgctgtgggaccttgcttggcgagggggaaaatctctgggtttctggagtgggagggttcgtgcagcagctgttgactggtacatgaagcattcttttatgtttgttgaagctgatgattgacatctcccgtgggtgtgccagttcttgtggagttaagacaggatttttggaagcaaggaagttagtgggtgagcttggggatgtagctcagctatctgctggtctagtggcctctaagctatagggaggggacagagccctgagctacagatgcttgagtgggttattgtgtcggtttgctagtgcagtctggtttttaagctctaaaattgaggtattttattagaagtggatttgggttgaactcttaatttgtataagggatatattttggttggggaaatagaactgagttgctaattcttattgtactcattactccatacaagaatgttatgttgaataataaaattggagaagatttcattttgtgtttccagggagtattctgtgtggggaactgtttccttacgtgaggccggcggcataagtcaaagatgagttttgtccttgcgaatcacacagattgagtctgtgttccccagggtgtgccgttacctgatttttaagtgagccagggcggacagcagcttttctgatttacagagttcttcagatttacaaatggacaatgacatcacagtttttagcactgaagccagtctcatgctagtaacagtgggtgagccgctcgagggactgggttctaatgaatactggtatgaacggggagtctctgcagtcgccagacaaatcatactcagccccttcccccgtagagcaacaagtggttcttttagagttgactggcagcatttcctgtcgggggaggtggggtttgatggagttagaaagctcgcctctgtgtacattctctcctgggctgttactttctgtagacgcacaaaatcagccccaatgtttttaagggcatcttagccaaggaagctggcttttgtgtcgccacttccaggcctgcattaagagagagcccaggcaccagggctaccactggaacctgcctcagcgtcaactgctgctggtctgtagccaggcccagcctttgagacgggtttactgtcaccagtagcctctcagtgccagccctgagctgctcctggctcagctgcccagagcctgcagcctggggaggtactcagcctctgggagacgagggccgtggactgggtggctggtagctcctgcgtttttgagctgtgtcctggctggctgctgccaatgaggtggacaccagtgtggtttggggtgcactggccacttcttgctgggttctgattttcttggaagtgcatctgccttccttatccaatagttttatccctgcattgctcttgtgaagtggctggtttggttctgtatgtagcattttgtacctttcctctggcaaaacactgtcagtttataaacattttttatatttccctcctttaaaaacagcttgtgtatttctgctataaaatgtgtcagcaaaggcagagtgacctaatagggcatgttcttaagcacagggactgtatcatgcaggggccaataaagctcaagaaaacgag

SEQ ID NO: 1090 - DNA, 1590 bp, Artificial
  cDNA Sequence
caaatattatggatcctatctgaaggatacaaaattatggataataatggaatatcttggtggaggctccgcactagatctattagaacctggcccattagatgaaacccagatcgctactatattaagagaaatactgaaaggactcgattatctccattcggagaagaaaatccacagagacattaaagcggccaacgtcctgctgtctgagcatggcgaggtgaagctggcggactttggcgtggctggccagctgacagacacccagatcaaaaggaacaccttcgtgggcaccccattctggatggcacccgaggtcatcaaacagtcggcctatgactcgaaggcagacatctggtccctgggcataacagctattgaacttgcaagaggggaaccacctcattccgagctgcaccccatgaaagttttattcctcattccaaagaacaacccaccgacgttggaaggaaactacagtaaacccctcaaggagtttgtggaggcctgtttgaataaggagccgagctttagacccactgctaaggagttattgaagcacaagtttatactacgcaatgcaaagaaaacttcctacttgaccgagctcatcgacaggtacaagagatggaaggccgagcagagccatgacgactcgagctccgaggattccgacgcggaaacagatggccaagcctcggggggcagtgattctggggactggatcttcacaatccgagaaaaagatcccaagaatctcgagaatggagctcttcagccatcggacttggacagaaataagatgaaagacatcccgaagaggcctttctctcagtgtttatctacaattatttctcctctgtttgcagagttgaaggagaagagccaggcgtgcggagggaacttggggtccattgaagagctgcgaggggccatctacctagcggaggaggcgtgccctggcatctccgacaccatggtggcccagctcgtgcagcggctccagaggagtatccatgggaaccaagcccctcctgactgccatctggcacaagtgcaggcgtttggaggcagtggatgtgtgctgggaagccgctctgtgtgacctgagggtgatttgtcactgggctgtcctccacacccccaggaggaccaggcgtgctgctgccttgacagttcatcttcaggtgtccaggctgacacctcccaaagctggctgagactctgtgatcatgagggggatttctgggtctttcctgagactgcgtcccacctgacagtacataaagaagttttgcacacgtgaggtcccttttgctatttggaagtgattgaaggggctgcctactgtcctgtgaagagcccctctacgtggggacagcaggagaaaaccacagttctgatacttcacgtttatgcttctgaactcgggtttcttagtaagacatttcaactttttaagttgctagaaaataaaaatgatctacttggctgccttcaattttgaggcaattgaaggacgatccctccctcctttgatactaaaaacaatataggaataaaggaaaatagaattaaaaagtcacc

SEQ ID NO: 1091 - DNA, 547 bp, Artificial
  cDNA Sequence
aactggtgctgagtgggcctggagcttccgagaacctaaaggcagacccagaagagctttttacaaaactagagaaaattgggaagggctcctttggagaggtgttcaaaggcattgacaatcggactcagaaagtggttgccataaagatcattgatctggaagaagctgaagatgagatagaggacattcaacaagaaatcacagtgctgagtcagtgtgacagtccatatgtaaccaaatattatggatcctatctgaaggatacaaaattatggataataatggaatatcttggtggaggctccgcactagatctattagaacctggcccattagatgaaacccagatcgctactatattaagagaaatactgaaaggactcgattatctccattcggagaagaaaatccacagagacattaaagcggccaacgtcctgctgtctgagcatggcgaggtgaagctggcggactttggcgtggctggccagctgacagacacccagatcaaaaggaacaccttcgtgggcaccccattctggat

SEQ ID NO: 1092 - DNA, 3602 bp, Artificial
  cDNA Sequence
gcagacatctggtccctgggcataacagctattgaacttgcaagaggggaaccacctcattccgagctgcaccccatgaaagttttattcctcattccaaagaacaacccaccgacgttggaaggaaactacagtaaacccctcaaggagtttgtggaggcctgtttgaataaggagccgagctttagacccactgctaaggagttattgaagcacaagtttatactacgcaatgcaaagaaaacttcctacttgaccgagctcatcgacaggtacaagagatggaaggccgagcagagccatgacgactcgagctccgaggattccgacgcggaaacagatggccaagcctcggggggcagtgattctggggactggatcttcacaatccgagaaaaagatcccaagaatctcgagaatggagctcttcagccatcggacttggacagaaataagttgaaggagaagagccaggcgtgcggagggaacttggggtccattgaagagctgcgaggggccatctacctagcggaggaggcgtgccctggcatctccgacaccatggtggcccagctcgtgcagcggctccagagatactctctaagtggtggaggaacttcatcccactgaaattcctttggcatttggggttttgtttttccttttttccttcttcatcctcctccttttttaaaagtcaacgagagccttcgctgactccaccgaagaggtgcgccactgggagccaccccagcgccaggcgcccgtccagggacacacacagtcttcactgtgctgcagccagatgaagtctctcagatgggtggggagggtcagctccttccagcgatcattttattttattttattacttttgtttttaattttaaccatagtgcacatattccaggaaagtgtctttaaaaacaaaaacaaaccctgaaatgtatatttgggattatgataaggcaactaaagacatgaaacctcaggtatcctgctttaagttgataactccctctgggagctggagaatcgctctggtggatgggtgtacagatttgtatataatgtcatttttacggaaaccctttcggcgtgcataaggaatcactgtgtacaaactggccaagtgcttctgtagataacgtcagtggagtaaatattcgacaggccataacttgagtctattgccttgcctttattacatgtacattttgaattctgtgaccagtgatttgggttttattttgtatttgcagggtttgtcattaataattaatgcccctctcttacagaacactcctatttgtacctcaacaaatgcaaattttccccgtttgccctacgccccttttggtacacctagaggttgatttcctttttcatcgatggtactatttcttagtgttttaaattggaacatatcttgcctcatgaagctttaaattataattttcagtttctccccatgaagcgctctcgtctgacatttgtttggaatcgtgccactgctggtctgcgccagatgtaccgtcctttccaatacgattttctgttgcaccttgtagtggattctgcatatcatctttcccacctaaaaatgtctgaatgcttacacaaataaattttataacacgcttattttgcatactccttgaaatgtgactcttcagaggacagggcacctgctgtgtatgtgtggccgtgcgtgtgtactcgtggctgtgtgtgtgtgatgagacactttggaagactccagggagaagtccccaggcctggagctgccgagtgcccaggtcagcgccctggactgcttgcgcacttgctcaccgagatgatgcagttggaggttgctgatctgtgcgattgctgtagcggttgccggggaccttaagagttattttgcttctctggaaggggcctatgcttgctaggcaggcagccagtgtgtctgtttttcttggtttgctgtgggaccttgcttggcgagggggaaaatctctgggtttctggagtgggagggttcgtgcagcagctgttgactggtacatgaagcattcttttatgtttgttgaagctgatgattgacatctcccgtgggtgtgccagttcttgtggagttaagacaggatttttggaagcaaggaagttagtgggtgagcttggggatgtagctcagctatctgctggtctagtggcctctaagctatagggaggggacagagccctgagctacagatgcttgagtgggttattgtgtcggtttgctagtgcagtctggtttttaagctctaaaattgaggtattttattagaagtggatttgggttgaactcttaatttgtataagggatatattttggttggggaaatagaactgagttgctaattcttattgtactcattactccatacaagaatgttatgttgaataataaaattggagaagatttcattttgtgtttccagggagtattctgtgtggggaactgtttccttacgtgaggccggcggcataagtcaaagatgagttttgtccttgcgaatcacacagattgagtctgtgttccccagggtgtgccgttacctgatttttaagtgagccagggcggacagcagcttttctgatttacagagttcttcagatttacaaatggacaatgacatcacagtttttagcactgaagccagtctcatgctagtaacagtgggtgagccgctcgagggactgggttctaatgaatactggtatgaacggggagtctctgcagtcgccagacaaatcatactcagccccttcccccgtagagcaacaagtggttcttttagagttgactggcagcatttcctgtcgggggaggtggggtttgatggagttagaaagctcgcctctgtgtacattctctcctgggctgttactttctgtagacgcacaaaatcagccccaatgtttttaagggcatcttagccaaggaagctggcttttgtgtcgccacttccaggcctgcattaagagagagcccaggcaccagggctaccactggaacctgcctcagcgtcaactgctgctggtctgtagccaggcccagcctttgagacgggtttactgtcaccagtagcctctcagtgccagccctgagctgctcctggctcagctgcccagagcctgcagcctggggaggtactcagcctctgggagacgagggccgtggactgggtggctggtagctcctgcgtttttgagctgtgtcctggctggctgctgccaatgaggtggacaccagtgtggtttggggtgcactggccacttcttgctgggttctgattttcttggaagtgcatctgccttccttatccaatagttttatccctgcattgctcttgtgaagtggctggtttggttctgtatgtagcattttgtacctttcctctggcaaaacactgtcagtttataaacattttttatatttccctcctttaaaaacagcttgtgtatttctgctataaaatgtgtcagcaaaggcagagtgacctaatagggcatgttcttaagcacagggactgtatcatgcaggggccaataaagctcaagaaaacgag

SEQ ID NO: 1093 - DNA, 1278 bp, Artificial
  cDNA Sequence
gcgggagccctaggccgcagccgccgcctgtcggcccggcccgggtcccagctgcttcggtgtctgggtgaagtttccagccaacccaagaaggaaaccgaaagggaagaggccgagagagaggttaattcctagtgctttggttaccgaaaacagcccggctgggactgctgggctgggaacttagctaagcagtgcggaggctgaaccccaccatctctgggatccgcagcaaatcagaagcccccacccacgataaggggaaaatggggcgcagagggcagggaggaagggaagagaatggaaggaaagcgcgtctggactttgaactgcagccctctccctctttcccttgcctcggaagctccaggcccactcagcaccagttctgtctcctcttttcagccgccttctctctagctactgaggggaaaagtcaggatgaagcgggtccctcggcctccagaaggtgttttattacagtcgcaaacaggtagagcggcagccaccccagtgatgactccctgctccttagattgtagggacgctggcacctcactcatgctcctaagtggccattttgcgccctggctgggcgagttaggcagacaaaatgagcccccaaaagtttaaaggcctccaccaaaggagtatttcttttctgaggtgtcattgtattccatccacgaacttcagttcccccgggtgctctggatctgacatggagtaggatgctaacatctaatcccttctttccctttggaaagatgcatgttttttctcggagtcctagggaataccttagaatactttcatggttgtcattggtacacccatcccttgaggagccctgccacccgtaagtaggactgcaaggaaatacaaaattaagagaagtatgaaccctgatacccaggaacttaaaatcaggtgtataaattttgtacacctaaaaaatatggtacctaaagaggcgaacagcaaaacaagcaagaatgtgaatctttaaaatgtttctattcttcagcgcagcccaggaattctacctaaagtaacatatcctaaggcaacaaccaagaagtgtggaagaatgcatgtaagaagacacagtgatgtttagaatcctggggaaacggaacagccaaaaagtctcacagaggttaagtaaataatagcattttcatacgagtactatgtagtcatttaaaattatgtctttcagtacctagtaatggggaaaatgtattcattatatattattaaagaaaatacagggta

SEQ ID NO: 1094 - DNA, 585 bp, Artificial
  cDNA Sequence
gatgtacacatgggcctggtgatgccacggtgaaacgagagccgagtttctcggacatcacacgcctcgtgctgtggtgtatggccgtggccgtctcctacattcacgtttacggccaccaatcttttcaaaagaaatatttccatattgatggatgaaattttaaaacagcagcaagaacttctgggcctagattgttcaaaatactcaccagagtttgcaaataggaacgacaaaggtgatcaagttctaaattgccgtttggcagtgaaggtgctgtccccggtagatggaaaagcagatattctgagagctgctcaggacttttgccagttagtagcccagaagcaaaagtgacccacagatttggaaggagctatgttaggcagtttacttagttcaaatggttctcctgatcctgatttagtattgaagtttggtcctgtggacagcacattaggctttcttccccggcacatcagatttactgagattgtctctttgcctgcccacttaaacatcagttatgacgactttttctctgccctacatcagtatgcagcctgtggccagcgtgaggaaaag

SEQ ID NO: 1095 - DNA, 306 bp, Artificial
  cDNA Sequence
aaaaaaaaaaaaaaacaaacaaacaaaaaacggtgcaccccttgccacaccatggaaaatggaggcaagcacataactgggccaaatccccatggtctctttgggcagaagacaagtcaggcagctggatcctctcacacagaggccagtaagaacaaaggcatcacctggggagaggagacaccgatggggtcttaggagaatcccaagaagtacatccctggaacagaaatcatctttgctgacattgagaggtcagaaagggcagacttgatagcttatctcaaaaaagctgctaatggataa

SEQ ID NO: 1096 - DNA, 426 bp, Artificial
  cDNA Sequence
atggctgaccaactgactggagagcagattgtagaattcaaataagcttatttactatttgacaaagacggtgatggaactataacaacaaaggaactgggaacagaaatgaggtctcttaggcggcatcccacagaagcagagttacaggacatgatttatgaagtagatgctgatagtaatggcagagttggcttccctgaatttgtgacaatgagggcaagaaaaatgaaagacgcaggcagtgaagaagaaatgagagaagcattccgtgtgtttgataaggatggcaatggttatattagtgcagcagaacttcaccatgcgatgacaaaccttggagagaagttaacagatgaagaggttgacgaaatgatcagggaagcagatattgatggtgacggtcaagtaaactgtgaagagttt

SEQ ID NO: 1097 - DNA, 3105 bp, Artificial
  cDNA Sequence
acctgccaggagcacgtcccgccggcaggtcgcaggagccctgggagccgccgccatgggaatgtccaaatcacacagtttctttggttatcccctgagcatcttcttcatcgtggtcaatgagttttgcgaaagattttcctactatggaatgcgagcaatcctgattctgtacttcacaaatttcatcagctgggatgataacctgtccaccgccatctaccatacgtttgtggctctgtgctacctgacgccaattctcggagctcttatcgccgactcgtggctgggaaagttcaagaccattgtgtcgctctccattgtctacacaattggacaagcagtcacctcagtaagctccattaatgacctcacagaccacaaccatgatggcacccccgacagccttcctgtgcacgtggtgctgtccttgatcggcctggccctgatagctctcgggactggaggaatcaaaccctgtgtgtctgcgtttggtggagatcagtttgaagagggccaggagaaacaaagaaacagatttttttccatcttttacttggctattaatgctggaagtttgctttccacaatcatcacacccatgctcagagttcaacaatgtggaattcacagtaaacaagcttgttacccactggcctttggggttcctgctgctctcatggctgtagccctgattgtgtttgtccttggcagtgggatgtacaagaagttcaagccacagggcaacatcatgggtaaagtggccaagtgcatcggttttgccatcaaaaatagatttaggcatcggagtaaggcatttcccaagagggagcactggctggactgggctaaagagaaatacgatgagcggctcatctcccaaattaagatggttacgagggtgatgttcctgtatattccactcccaatgttctgggccttgtttgaccagcagggctccaggtggacactgcaggcaacaactatgtccgggaaaatcggagctcttgaaattcagcccgatcagatgcagaccgtgaacgccatcctgatcgtgatcatggtcccgatcttcgatgctgtgctgtaccctctcattgcaaaatgtggcttcaatttcacctccttgaagaagatggcagttggcatggtcctggcctccatggcctttgtggtggctgccatcgtgcaggtggaaatcgataaaactcttccagtcttccccaaaggaaacgaagtccaaattaaagttttgaatataggaaacaataccatgaatatatctcttcctggagagatggtgacacttggcccaatgtctcaaacaaatgcatttatgacttttgatgtaaacaaactgacaaggataaacatttcttctcctggatcaccagtcactgctgtaactgacgacttcaagcagggccaacgccacacgcttctagtgtgggcccccaatcactaccaggtggtaaaggatggtcttaaccagaagccagaaaaaggggaaaatggaatcagatttgtaaatacttttaacgagctcatcaccatcacaatgagtgggaaagtttatgcaaacatcagcagctacaatgccagcacataccagttttttccttctggcataaaaggcttcacaataagctcaacagagattccgccacaatgtcaacctaatttcaatactttctaccttgaatttggtagtgcttatacctatatagtccaaaggaagaatgacagctgccctgaagtgaaggtgtttgaagatatttcagccaacacagttaacatggctctgcaaatcccgcagtattttcttctcacctgtggcgaagtggtcttctctgtcacgggattggaattctcatattctcaggctccttccaacatgaagtcggtgcttcaggcaggatggctgctgaccgtggctgttggcaacatcattgtgctcatcgtggcaggggcaggccagttcagcaaacagtgggccgagtacattctatttgccgcgttgcttctggtcgtctgtgtaatttttgccatcatggctcggttctatacttacatcaacccagcggagatcgaagctcaatttgatgaggatgaaaagaaaaacagactggaaaagagtaacccatatttcatgtcaggggccaattcacagaaacagatgtgaaggtcaggaggcaagtggaggatggactgggcccgcagatgccctgacctctgcccccaggtagcaggacactccattggatggcccctgatgaggaagacttcagaattgggaactaaaccatgaatgctattttcttttttctttttcttttctttttttttttttttttttttttgagacagagttttgctcttgttgtccaggctggagtgcaatggcacgatctcagctcactgcaacctccgcctcccaggttcaagtaattctcctgcctcagcctcccgagtggctgggattagcggcatgcaccaccacgcccagctatttttgtatttttagtagagatggggtttcaccatgttggccaggatggtctcgatctcttgacctggtgatctgcccacctcggcctgccaaagtgctgggattacaggcttgagctaccgcgcccggccgtgaacgctattttctaagcagccagcagtgaatctaaaactctggaagaagtcttctgtttgaaaggcttatttaagccacacgtacacacactgtcttagagtactgtgagcccaccccacattggtcatcttccctatcacacaaatgatgttattttggactagcttaattttgaaatggtaacaaagtttcctattccatactgttcatttctaatactcttacgaaaactattctaaaggaggcaggagccaaggccaaaagtgaacgtacaggtttgaaatggctgtgataaggaccagctggtattaactgataactttacctttgggtttttgttattttgtttttctagtccctacctgtgtttaaattatggataactcgaaagacagctcaggtgaaggccagtaatgatttttttgaagtttcaatggtgtgaaataaatttctgttcttaa

SEQ ID NO: 1098 - DNA, 1621 bp, Artificial
  cDNA Sequence
cagtcaccggtaagttactgaatctgcgttggctgcctttcatgccactggtgctcctttgtggctatggaccagtggggggtgtatttcaatcctgtgcttgtttcttttttgtcagagtttctttggttatcccctgagcatcttcttcatcgtggtcaatgagttttgcgaaagattttcctactatggaatgcgagcaatcctgattctgtacttcacaaatttcatcagctgggatgataacctgtccaccgccatctaccatacgtttgtggctctgtgctacctgacgccaattctcggagctcttatcgccgactcgtggctgggaaagttcaagaccattgtgtcgctctccattgtctacacaattggacaagcagtcacctcagtaagctccattaatgacctcacagaccacaaccatgatggcacccccgacagccttcctgtgcacgtggtgctgtccttgatcggcctggccctgatagctctcgggactggaggaatcaaaccctgtgtgtctgcgtttggtggagatcagtttgaagagggccaggagaaacaaagaaacagatttttttccatcttttacttggctattaatgctggaagtttgctttccacaatcatcacacccatgctcagaggtaagagatacctgaaaggaacttctgttggtctttttttagtaaggccaagtccgtgtcttcttcgttttgttctgttcttcccttctgccctgttttctagctgtcagctacatgctgggatgcacgttggaatctggagtaagtgcttccttccctgtgagtttcacctcctttttgtcttatttaaatcccttatcccagtgaccactggagagtctaagccatccttagcatgggcatccatcttcctaaactgttattcatgcaaagtcatgctcgtggtaagaggtaagaggcaagagaggtgccttggaagccaagctggtggccgtagctgccattttagccttcaagctttgctccccagtgatatttctgtgacttaggaagagtttactgggcaaaattgtattgattttttgtttgttttgttttgtttttagaaggagtcttgctctgtcacccacgctggagcgcagtggcgtgatcttggctcactgcaacctccacctcctgggttcaagcaattctcctgcctcagcctcctgagtagctgggacaacaggcgcctgccaccatgcccggataatattttttgtatttttagtagagatgggatttcaccatgttagccaggatggtctcgatctcctgccctcgtgatctgcctgccttggcctcccaaagtgctgggattacaggtgtgagccaccacgcctggctaaggcaaagtttttttctttgctttcccatcatctcaagtatttccaaaagaactgctcagataaagagaatgggacagtgtcagtaactatcagaggtttgtgcttgctaatgctccatagagagtttgtgaatttcccatgtggaagggaatatgtggtgttactggtgacaaactaacaagaccatcctgtccacatttgaatcagattagattatgaaataaagatttcagggggatt

SEQ ID NO: 1099 - DNA, 7549 bp, Artificial
  cDNA Sequence
ctggcatgcctgtgccttgcacggccagggactcgcagctgttccagttgcagactttctgacttgcgttttcagccgagaatgcaggctgataaatgcaggacaagtagtagaagtgtcaaaaaggaactggtgattgagtcccccctgcaatacaaggatgcagctcagggcgaagtggaagcagagagcccgggccctgtgccggcaaagccaaagctaattgagccactcgactatgaaaatgtcatcgtccagaagaagactcagatcctgaacgactgtttacgggagatgctgctcttcccttacgatgactttcagacggccatcctgagacgacagggtcgatacatatgctcaacagtgcctgcgaaggcggaagaggaagcacagagcttgtttgttacagagtgcatcaaaacctataactctgactggcatcttgtgaactataaatatgaagattactcaggagagtttcgacagcttccgaacaaagtggtcaagttggataaacttccagttcatgtctatgaagttgacgaggaggtcgacaaagatgaggatgctgcctcccttggttcccagaagggtgggatcaccaagcatggctggctgtacaaaggcaacatgaacagtgccatcagcgtgaccatgaggtcatttaagagacgatttttccacctgattcaacttggcgatggatcctataatttgaatttttataaagatgaaaagatctccaaagaaccaaaaggatcaatatttctggattcctgtatgggtgtcgttcagaacaacaaagtcaggcgttttgcttttgagctcaagatgcaggacaaaagtagttatctcttggcagcagacagtgaagtggaaatggaagaatggatcacaattctaaataagatcctccagctcaactttgaagctgcaatgcaagaaaagcgaaatggcgactctcacgaagatgatgaacaaagcaaattggaaggttctggttccggtttagatagctacctgccggaacttgccaagagtgcaagagaagcagaaatcaaactgaaaagtgaaagcagagtcaaacttttttatttggacccagatgcccagaagcttgacttctcatcagctgagccagaagtgaagtcatttgaagagaagtttggaaaaaggatccttgtcaagtgcaatgatttatctttcaatttgcaatgctgtgttgccgaaaatgaagaaggacccactacaaatgttgaacctttctttgttactctatccctgtttgacataaaatacaaccggaagatttctgccgatttccacgtagacctgaaccatttctcagtgaggcaaatgctcgccaccacgtccccggcgctgatgaatggcagtgggcagagcccatctgtcctcaagggcatccttcatgaagccgccatgcagtatccgaagcagggaatattttcagtcacttgtcctcatccagatatatttcttgtggccagaattgaaaaagtccttcaggggagcatcacacattgcgctgagccatatatgaaaagttcagactcttctaaggtggcccagaaggtgctgaagaatgccaagcaggcatgccaaagactaggacagtatagaatgccatttgcttgggcagcaaggacattgtttaaggatgcatctggaaatcttgacaaaaatgccagattttctgccatctacaggcaagacagcaataagctatccaatgatgacatgctcaagttacttgcagactttcggaaacctgagaagatggctaagctcccagtgattttaggcaatctagacattacaattgataatgtttcctcagacttccctaattatgttaattcatcatacattcccacaaaacaatttgaaacctgcagtaaaactcccatcacgtttgaagtggaggaatttgtgccctgcataccaaaacacactcagccttacaccatctacaccaatcacctttacgtttatcctaagtacttgaaatacgacagtcagaagtcttttgccaaggctagaaatattgcgatttgcattgaattcaaagattcagatgaggaagactctcagccccttaagtgcatttatggcagacctggtgggccagttttcacaagaagcgcctttgctgcagttttacaccatcaccaaaacccagaattttatgatgagattaaaatagagttgcccactcagctgcatgaaaagcaccacctgttgctcacattcttccatgtcagctgtgacaactcaagtaaaggaagcacgaagaagagggatgtcgttgaaacccaagttggctactcctggcttcccctcctgaaagacggaagggtggtgacaagcgagcagcacatcccggtctcggcgaaccttccttcgggctatcttggctaccaggagcttgggatgggcaggcattatggtccggaaattaaatgggtagatggaggcaagccactgctgaaaatttccactcatctggtttctacagtgtatactcaggatcagcatttacataattttttccagtactgtcagaaaaccgaatctggagcccaagccttaggaaacgaacttgtaaagtaccttaagagtctgcatgcgatggaaggccacgtgatgatcgccttcttgcccactatcctaaaccagctgttccgagtcctcaccagagccacacaggaagaagtcgcggttaacgtgactcgggtcattattcatgtggttgcccagtgccatgaggaaggattggagagccacttgaggtcatatgttaagtacgcgtataaggctgagccatatgttgcctctgaatacaagacagtgcatgaagaactgaccaaatccatgaccacgattctcaagccttctgccgatttcctcaccagcaacaaactactgaagtactcatggtttttctttgatgtactgatcaaatctatggctcagcatttgatagagaactccaaagttaagttgctgcgaaaccagagatttcctgcatcctatcatcatgcagtggaaaccgttgtaaatatgctgatgccacacatcactcagaagtttcgagataatccagaggcatctaagaacgcgaatcatagccttgctgtcttcatcaagagatgtttcaccttcatggacaggggctttgtcttcaagcagatcaacaactacattagctgttttgctcctggagacccaaagaccctctttgaatacaagtttgaatttctccgtgtagtgtgcaaccatgaacattatattccgttgaacttaccaatgccatttggaaaaggcaggattcaaagataccaagacctccagcttgactactcattaacagatgagttctgcagaaaccacttcttggtgggactgttactgagggaggtggggacagccctccaggagttccgggaggtccgtctgatcgccatcagtgtgctcaagaacctgctgataaagcattcttttgatgacagatatgcttcaaggagccatcaggcaaggatagccaccctctacctgcctctgtttggtctgctgattgaaaacgtccagcggatcaatgtgagggatgtgtcacccttccctgtgaacgcgggcatgactgtgaaggatgaatccctggctctaccagctgtgaatccgctggtgacgccgcagaagggaagcaccctggacaacagcctgcacaaggacctgctgggcgccatctccggcattgcttctccatatacaacctcaactccaaacatcaacagtgtgagaaatgctgattcgagaggatctctcataagcacagattcgggtaacagccttccagaaaggaatagtgagaagagcaattccctggataagcaccaacaaagtagcacattgggaaattccgtggttcgctgtgataaacttgaccagtctgagattaagagcctactgatgtgtttcctctacatcttaaagagcatgtctgatgatgctttgtttacatattggaacaaggcttcaacatctgaacttatggatttttttacaatatctgaagtctgcctgcaccagttccagtacatggggaagcgatacatagccagaacaggaatgatgcatgccagattgcagcagctgggcagcctggataactctctcacttttaaccacagctatggccactcggacgcagatgttctgcaccagtcattacttgaagccaacattgctactgaggtttgcctgacagctctggacacgctttctctatttacattggcgtttaagaaccagctcctggccgaccatggacataatcctctcatgaaaaaagtttttgatgtctacctgtgttttcttcaaaaacatcagtctgaaacggctttaaaaaatgtcttcactgccttaaggtccttaatttataagtttccctcaacattctatgaagggagagcggacatgtgtgcggctctgtgttacgagattctcaagtgctgtaactccaagctgagctccatcaggacggaggcctcccagctgctctacttcctgatgaggaacaactttgattacactggaaagaagtcctttgtccggacacatttgcaagtcatcatatctgtcagccagctgatagcagacgttgttggcattgggggaaccagattccagcagtccctgtccatcatcaacaactgtgccaacagtgaccggcttattaagcacaccagcttctcctctgatgtgaaggacttaaccaaaaggatacgcacggtgctaatggccaccgcccagatgaaggagcatgagaacgacccagagatgctggtggacctccagtacagcctggccaaatcctatgccagcacgcccgagctcaggaagacgtggctcgacagcatggccaggatccatgtcaaaaatggcgatctctcagaggcagcaatgtgctatgtccacgtaacagccctagtggcagaatatctcacacggaaagaagcagtccagtgggagccgccccttctcccccacagccatagcgcctgcctgaggaggagccggggaggcgtgtttagacaaggatgcaccgccttcagggtcattaccccaaacatcgacgaggaggcctccatgatggaagacgtggggatgcaggatgtccatttcaacgaggatgtgctgatggagctccttgagcagtgcgcagatggactctggaaagccgagcgctacgagctcatcgccgacatctacaaacttatcatccccatttatgagaagcggagggattttgagaggctggcccatctgtatgacacgctgcaccgggcctacagcaaagtgaccgaggtcatgcactcgggccgcaggcttctggggacctacttccgggtagccttcttcgggcaggcagcgcaataccagtttacagacagtgaaacagatgtggagggattctttgaagatgaagatggaaaggagtatatttacaaggaacccaaactcacaccgctgtcggaaatttctcagagactccttaaactgtactcggataaatttggttctgaaaatgtcaaaatgatacaggattctggcaaggtcaaccctaaggatctggattctaagtatgcatacatccaggtgactcacgtcatccccttctttgacgaaaaagagttgcaagaaaggaaaacagagtttgagagatcccacaacatccgccgcttcatgtttgagatgccatttacgcagaccgggaagaggcagggcggggtggaagagcagtgcaaacggcgcaccatcctgacagccatacactgcttcccttatgtgaagaagcgcatccctgtcatgtaccagcaccacactgacctgaaccccatcgaggtggccattgacgagatgagtaagaaggtggcggagctccggcagctgtgctcctcggccgaggtggacatgatcaaactgcagctcaaactccagggcagcgtgagtgttcaggtcaatgctggcccactagcatatgcgcgagctttcttagatgatacaaacacaaagcgatatcctgacaataaagtgaagctgcttaaggaagttttcaggcaatttgtggaagcttgcggtcaagccttagcggtaaacgaacgtctgattaaagaagaccagctcgagtatcaggaagaaatgaaagccaactacagggaaatggcgaaggagctttctgaaatcatgcatgagcagctgggatgatctgccccctggaggagaagacgagcgtcttaccgaattcccttcacatcttcaacgccatcagtgggactccaacaagcacaatggttcacgggatgaccagctcgtcttcggtcgtgtgattacatctcatggcccgtgtgtggggacttgctttgtcatttgcaaactcaggatgctttccaaagccaatcactggggagaccgagcacagggaggaccaaggggaaggggagagaaaggaaataaagaacaacgttatttcttaacagactttctataggagttgtaagaaggtgcacatatttttttaaatctcactggcaatattcaaagttttcattgtgtcttaacaaaggtgtggtagacactcttgagctggacttagattttattcttccttgcagagtagtgttagaatagatggcctacagaaaaaaaaggttctgggatctacatggcagggagggctgcactgacattgatgcctgggggaccttttgcctcgaggctgagctggaaaatcttgaaaatattttttttttcctgtggcacattcaggttgaatacaagaactatttttgtgactagtttttgatgacctaagggaactgaccattgtaatttttgtaccagtgaaccaggagatttagtgcttttatattcatttccttgcatttaagaaaatatgaaagcttaaggaattatgtgagcttaaaactagtcaagcagtttagaaccaaaggcctatattaataaccgcaactatgctgaaaagtacaaagtagtacagtatattgttatgtacatatcattgttaatacagtcctggcattctgtacatatatgtattacatttctacatttttaatactcacatgggcttatgcattaagtttaattgtgataaatttgtgctgttccagtatatgcaatacactttaatgttttattcttgtacataaaaatgtgcaatatggagatgtatacagtctttactatattaggtttataaacagttttaagaatttcatccttttgccaaaatggtggagtatgtaattggtaaatcataaatcctgtggtgaatggtggtgtactttaaagctgtcaccatgttatattttcttttaagactttaatttagtaattttatatttgggaaaataaaggtttttaattttatttaactggaatcactgccctgctgtaattaaacattctgtaccacatctgtattaaaaagacattgctgaccatt

SEQ ID NO: 1100 - DNA, 3147 bp, Artificial
  cDNA Sequence
ttttaagaaccagctcctggccgaccatggacataatcctctcatgaaaaaagtttttgatgtctacctgtgttttcttcaaaaacatcagtctgaaacggctttaaaaaatgtcttcactgccttaaggtccttaatttataagtttccctcaacattctatgaagggagagcggacatgtgtgcggctctgtgttacgagattctcaagtgctgtaactccaagctgagctccatcaggacggaggcctcccagctgctctacttcctgatgaggaacaactttgattacactggaaagaagtcctttgtccggacacatttgcaagtcatcatatctgtcagccagctgatagcagacgttgttggcattgggggaaccagattccagcagtccctgtccatcatcaacaactgtgccaacagtgaccggcttattaagcacaccagcttctcctctgatgtgaaggacttaaccaaaaggatacgcacggtgctaatggccaccgcccagatgaaggagcatgagaacgacccagagatgctggtggacctccagtacagcctggccaaatcctatgccagcacgcccgagctcaggaagacgtggctcgacagcatggccaggatccatgtcaaaaatggcgatctctcagaggcagcaatgtgctatgtccacgtaacagccctagtggcagaatatctcacacggaaaggcgtgtttagacaaggatgcaccgccttcagggtcattaccccaaacatcgacgaggaggcctccatgatggaagacgtggggatgcaggatgtccatttcaacgaggatgtgctgatggagctccttgagcagtgcgcagatggactctggaaagccgagcgctacgagctcatcgccgacatctacaaacttatcatccccatttatgagaagcggagggattttgagaggctggcccatctgtatgacacgctgcaccgggcctacagcaaagtgaccgaggtcatgcactcgggccgcaggcttctggggacctacttccgggtagccttcttcgggcagcaataccagtttacagacagtgaaacagatgtggagggattctttgaagatgaagatggaaaggagtatatttacaaggaacccaaactcacaccgctgtcggaaatttctcagagactccttaaactgtactcggataaatttggttctgaaaatgtcaaaatgatacaggattctggcaaggtcaaccctaaggatctggattctaagtatgcatacatccaggtgactcacgtcatccccttctttgacgaaaaagagttgcaagaaaggaaaacagagtttgagagatcccacaacatccgccgcttcatgtttgagatgccatttacgcagaccgggaagaggcagggcggggtggaagagcagtgcaaacggcgcaccatcctgacagccatacactgcttcccttatgtgaagaagcgcatccctgtcatgtaccagcaccacactgacctgaaccccatcgaggtggccattgacgagatgagtaagaaggtggcggagctccggcagctgtgctcctcggccgaggtggacatgatcaaactgcagctcaaactccagggcagcgtgagtgttcaggtcaatgctggcccactagcatatgcgcgagctttcttagatgatacaaacacaaagcgatatcctgacaataaagtgaagctgcttaaggaagttttcaggcaatttgtggaagcttgcggtcaagccttagcggtaaacgaacgtctgattaaagaagaccagctcgagtatcaggaagaaatgaaagccaactacagggaaatggcgaaggagctttctgaaatcatgcatgagcagatctgccccctggaggagaagacgagcgtcttaccgaattcccttcacatcttcaacgccatcagtgggactccaacaagcacaatggttcacgggatgaccagctcgtcttcggtcgtgtgattacatctcatggcccgtgtgtggggacttgctttgtcatttgcaaactcaggatgctttccaaagccaatcactggggagaccgagcacagggaggaccaaggggaaggggagagaaaggaaataaagaacaacgttatttcttaacagactttctataggagttgtaagaaggtgcacatatttttttaaatctcactggcaatattcaaagttttcattgtgtcttaacaaaggtgtggtagacactcttgagctggacttagattttattcttccttgcagagtagtgttagaatagatggcctacagaaaaaaaaggttctgggatctacatggcagggagggctgcactgacattgatgcctgggggaccttttgcctcgaggctgagctggaaaatcttgaaaatattttttttttcctgtggcacattcaggttgaatacaagaactatttttgtgactagtttttgatgacctaagggaactgaccattgtaatttttgtaccagtgaaccaggagatttagtgcttttatattcatttccttgcatttaagaaaatatgaaagcttaaggaattatgtgagcttaaaactagtcaagcagtttagaaccaaaggcctatattaataaccgcaactatgctgaaaagtacaaagtagtacagtatattgttatgtacatatcattgttaatacagtcctggcattctgtacatatatgtattacatttctacatttttaatactcacatgggcttatgcattaagtttaattgtgataaatttgtgctgttccagtatatgcaatacactttaatgttttattcttgtacataaaaatgtgcaatatggagatgtatacagtctttactatattaggtttataaacagttttaagaatttcatccttttgccaaaatggtggagtatgtaattggtaaatcataaatcctgtggtgaatggtggtgtactttaaagctgtcaccatgttatattttcttttaagactttaatttagtaattttatatttgggaaaataaaggtttttaattttatttaactggaatcactgccctgctgtaattaaacattctgtaccacatctgtattaaaaagacattgctgaccatt

SEQ ID NO: 1101 - DNA, 348 bp, Artificial
  cDNA Sequence
catctgaacttatggatttttttacaatatctgaagtctgcctgcaccagttccagtacatggggaagcgatacatagccaggaaccaggaggggttgggacccatagttcatgatcgaaagtctcagacattgcctgtttcccgtaacagaacaggaatgatgcatgccagattgcagcagctgggcagcctggataactctctcacttttaaccacagctatggccactcggacgcagatgttctgcaccagtcattacttgaagccaacattgctactgaggtttgcctgacagctctggacacgctttctctatttacattggcgtttaagaaccagctcctgg

SEQ ID NO: 1102 - DNA, 859 bp, Artificial
  cDNA Sequence
cgccacacgcacggtcgcccggagcgagcccgggcgctgctgcgatcgcggggggccgcggacgccgaggggggcgccttggggcgtgacacggtgcagagggcgcggcctgggctgcggcggccggactcgcggcgagcagcggggggagcaggcggcggcggcgccgggagcggcgggcggagcgggccgggcgccgagggcgcacctggcggccgcgcggccgggccgggccgcgggagcaggcggaggcggaggcggcgggggcaggaggatgtcgcagccgccgctgctccccgcctcggcggagactcggaagttcacccgggcgctgagtaagccgggcacggcggccgagctgcggcagagcgtgtctgaggtggtgcgcggctccgtgctcctggcaaagccaaagctaattgagccactcgactatgaaaatgtcatcgtccagaagaagactcagatcctgaacgactgtttacgggagatgctgctcttcccttacgatgactttcagacggccatcctgagacgacagggtcgatacatatgctcaacagtgcctgcgaaggcggaagaggaagcacagagcttgtttgttacagagtgcatcaaaacctataactctgactggcatcttgtgaactataaatatgaagattactcaggagagtttcgacagcttccgaacaaagtggtcaagttggataaacttccagttcatgtctatgaagttgacgaggaggtcgacaaagatgaggatgctgcctcccttggttcccagaagggtgggatcaccaagcatggctggctgtacaaaggcaacatgaacagtgccatcagcgtgaccatgagg

SEQ ID NO: 1103 - DNA, 492 bp, Artificial
  cDNA Sequence
ggacttaaccaaaaggatacgcacggtgctaatggccaccgcccagatgaaggagcatgagaacgacccagagatgctggtggacctccagtacagcctggccaaatcctatgccagcacgcccgagctcaggaagacgtggctcgacagcatggccaggatccatgtcaaaaatggcgatctctcagaggcagcaatgtgctatgtccacgtaacagccctagtggcagaatatctcacacggaaagaccttttatcaggtgatgcatttcctcatgtttagaagcagtccagtgggagccgccccttctcccccacagccatagcgcctgcctgaggaggagccggggaggcgtgtttagacaaggatgcaccgccttcagggtcattaccccaaacatcgacgaggaggcctccatgatggaagacgtggggatgcaggatgtccatttcaacgaggatgtgctgatggagctccttgagcagtgcgca

SEQ ID NO: 1104 - DNA, 420 bp, Artificial
  cDNA Sequence
gccgcgggagcaggcggaggcggaggcggcgggggcaggaggatgtcgcagccgccgctgctccccgcctcggcggagactcggaagttcacccgggcgctgagtaagccgggcacggcggccgagctgcggcagagcgtgtctgaggtggtgcgcggctccgtgctcctggcagcaggtgagccactcccagttgatcccttttccctggagtcagtcatgtgtcccggaagtgcttccagcagctgctgaagacctctgccctatgaggtcactaggagttctttcattaagtgacctgaggcaaagccaaagctaattgagccactcgactatgaaaatgtcatcgtccagaagaagactcagatcctgaacgactgtttacgggagatgctgctcttcccttacgatgactttcag

SEQ ID NO: 1105 - DNA, 609 bp, Artificial
  cDNA Sequence
aggaagacgtggctcgacagcatggccaggatccatgtcaaaaatggcgatctctcagaggcagcaatgtgctatgtccacgtaacagccctagtggcagaatatctcacacggaaaggcgtgtttagacaaggatgcaccgccttcagggtcattaccccaaacatcgacgaggaggcctccatgatggaagacgtggggatgcaggatgtccatttcaacgaggatgtgctgatggagctccttgagcagtgcgcagatggactctggaaagccgagcgctacgagctcatcgccgacatctacaaacttatcatccccatttatgagaagcggagggattttgagaggctggcccatctgtatgacacgctgcaccgggcctacagcaaagtgaccgaggtcatgcactcgggccgcaggcttctggggacctacttccgggtagccttcttcgggcagggattctttgaagatgaagatggaaaggagtatatttacaaggaacccaaactcacaccgctgtcggaaatttctcagagactccttaaactgtactcggataaatttggttctgaaaatgtcaaaatgatacaggattctggcaag

SEQ ID NO: 1106 - DNA, 750 bp, Artificial
  cDNA Sequence
gctgattcgagaggatctctcataagcacagattcgggtaacagccttccagaaaggaatagtgagaagagcaattccctggataagcaccaacaaagtagcacattgggaaattccgtggttcgctgtgataaacttgaccagtctgagattaagagcctactgatgtgtttcctctacatcttaaagagcatgtctgatgatgctttgtttacatattggaacaaggcttcaacatctgaacttatggatttttttacaatatctgaagtctgcctgcaccagttccagtacatggggaagcgatacatagccagtgtgagaaagatatcaagtgtgcttggaatttctgtagacaatggctatggccactcggacgcagatgttctgcaccagtcattacttgaagccaacattgctactgaggtttgcctgacagctctggacacgctttctctatttacattggcgtttaagaaccagctcctggccgaccatggacataatcctctcatgaaaaaagtttttgatgtctacctgtgttttcttcaaaaacatcagtctgaaacggctttaaaaaatgtcttcactgccttaaggtccttaatttataagtttccctcaacattctatgaagggagagcggacatgtgtgcggctctgtgttacgagattctcaagtgctgtaactccaagctgagctccatcaggacggaggcctcccagctgctctacttcctgatgaggaac

SEQ ID NO: 1107 - DNA, 635 bp, Artificial
  cDNA Sequence
acctccagcttgactactcattaacagatgagttctgcagaaaccacttcttggtgggactgttactgagggaggtggggacagccctccaggagttccgggaggtccgtctgatcgccatcagtgtgctcaagaacctgctgataaagcattcttttgatgacagatatgcttcaaggagccatcaggcaaggatagccaccctctacctgcctctgtttggtctgctgattgaaaacgtccagcggatcaatgtgagggatgtgtcacccttccctgtgaacgcgggcatgactgtgaaggatgaatccctggctctaccagctgtgaatccgctggtgacgccgcagaagggaagcaccctggacaacagcctgcacaaggacctgctgggcgccatctccggcattggtaacgctccatgctcttgtgggcttctctccaccatcactctgaaagtgtcttggagccaatagttggtgaacgtgtcacacttgtgtggtaggaccttgaagtctaagttgctttcctgagtattcttttcctgcttgtgatagtcaacaactgaaacccctcagccatgccctgaaataaaggtcccggatgcctgtgactcctcaggatcatacagttaa

SEQ ID NO: 1108 - DNA, 331 bp, Artificial
  cDNA Sequence
tgattttaggcaatctagacattacaattgataatgtttcctcagacttccctaattatgttaattcatcatacattcccacaaaacaatttgaaacctgcagtaaaactcccatcacgtttgaagtggaggaatttgtgccctgcataccaaaacacactcagccttacaccatctacaccaatcacctttacgtttatcctaagtacttgaaatacgacagtcagaagtcttttgccaaggctagaaatattgcgatttgcattgaattcaaagattcagatgaggaagactctcagccccttaaggtttgtttttttttaatatatgt

SEQ ID NO: 1109 - DNA, 2514 bp, Artificial
  cDNA Sequence
tttgtcttatagtgatgaaataggccagagatttttagtagacttcctctttgtgaagattttctttttctgttaacattgttcttttctggggatatttgagaaattttcagaattacattttatgttaagaagtaaacatgtatgttttctttttaaaagaagcaaatttagaatttttgcattttcctcctattaatattttctatttttcattgaaatgtggtagcacttaaagttctctaatcttaactgttttattttttatcacaacagtaattttatatttgagttttggagtactaaatgcaagtatatacaaggtgtccttataccagcaacgtcttctaccttgacttggattctccctgactttgtcccatgaagatgggcaaacagtaaattctgtcacagaaaggcactgtgctgggctagcttcactttttgcagtgacacctacgtcacaagatggcatttggagaatattgtgccaagtagaataaaatgcctcacagcttaaaacagtgaatgtgagaagctgaagatttctgtcccaacaaaatgttttagaatcgggttttgtgaaatggttaacgtatttttttcagtggatataaatttaacttcttaaaagaaaatcttcctacttcataagcaccctgtatatatttgcatataaaagtgtggactgccttaaaaatagatgggccaaggaaaacaggagtggagatgatgtgactttgctccatgcactgtggaaagatatgctctgctctatacaaaaattgccatggttctctgctgcatgtgaaaaagatcctgaactagactgtgaaccttgtacatgtttgccatccacggtggtcgagtttgatgaacactgtgccttcttattgtcactttgaagtcacccagcagcatgcagtcgatgatagtccatgcatgtccctgttctcctacacacaataacacagtgagggggacggttggctccgggacaggggacaggtgtcattgcagccctggtctcattttcatctgctctggtgatggtacacagcaggaagttagctgtttgattgctaacccaaatcactcttctgttttctctacttgactgctgacaagtttaacaaagtgtgtggctcttctccttcctgcttgggaaccaggaggggttgggacccatagttcatgatcgaaagtctcagacattgcctgtttcccgtaacagaacaggaatgatgcatgccagattgcagcagctgggcagcctggataactctctcacttttaaccacagctatggccactcggacgcagatgttctgcaccagtcattacttgaagccaacattgctactgaggtttgcctgacagctctggacacgctttctctatttacattggcgtttaagaaccagctcctggccgaccatggacataatcctctcatgaaaaaagtttttgatgtctacctgtgttttcttcaaaaacatcagtctgaaacggctttaaaaaatgtcttcactgccttaaggtccttaatttataagtttccctcaacattctatgaagggagagcggacatgtgtgcggctctgtgttacgagattctcaagtgctgtaactccaagctgagctccatcaggacggaggcctcccagctgctctacttcctgatgaggaacaactttgattacactggaaagaagtcctttgtccggacacatttgcaagtcatcatatctgtcagccagctgatagcagacgttgttggcattgggggaaccagattccagcagtccctgtccatcatcaacaactgtgccaacagtgaccggcttattaagcacaccagcttctcctctgatgtgaaggacttaaccaaaaggatacgcacggtgctaatggccaccgcccagatgaaggagcatgagaacgacccagagatgctggtggacctccagtacagcctggccaaatcctatgccagcacgcccgagctcaggaagacgtggctcgacagcatggccaggatccatgtcaaaaatggcgatctctcagaggcagcaatgtgctatgtccacgtaacagccctagtggcagaatatctcacacggaaaggcgtgtttagacaaggatgcaccgccttcagggtcattaccccaaacatcgacgaggaggcctccatgatggaagacgtggggatgcaggatgtccatttcaacgaggatgtgctgatggagctccttgagcagtgcgcagatggactctggaaagccgagcgctacgagctcatcgccgacatctacaaacttatcatccccatttatgagaagcggagggattttgagaggctggcccatctgtatgacacgctgcaccgggcctacagcaaagtgaccgaggtcatgcactcgggccgcaggcttctggggacctacttccgggtagccttcttcgggcaggtgagcctcctgtccattctgcagactgtcctaagtcctttaa

SEQ ID NO: 1110 - DNA, 1169 bp, Artificial
  cDNA Sequence
cccagatgaaggagcatgagaacgacccagagatgctggtggacctccagtacagcctggccaaatcctatgccagcacgcccgagctcaggaagacgtggctcgacagcatggccaggatccatgtcaaaaatggcgatctctcagaggcagcaatgtgctatgtccacgtaacagccctagtggcagaatatctcacacggaaagaagcagtccagtgggagccgccccttctcccccacagccatagcgcctgcctgaggaggagccggggaggcgtgtttagacaaggatgcaccgccttcagggtcattaccccaaacatcgacgaggaggcctccatgatggaagacgtggggatgcaggatgtccatttcaacgaggatgtgctgatggagctccttgagcagtgcgcagatggactctggaaagccgagcgctacgagctcatcgccgacatctacaaacttatcatccccatttatgagaagcggagggattttgagaggctggcccatctgtatgacacgctgcaccgggcctacagcaaagtgaccgaggtcatgcactcgggccgcaggcttctggggacctacttccgggtagccttcttcgggcagggattctttgaagatgaagatggaaaggagtatatttacaaggaacccaaactcacaccgctgtcggaaatttctcagagactccttaaactgtactcggataaatttggttctgaaaatgtcaaaatgatacaggattctggcaaggtcaaccctaaggatctggattctaagtatgcatacatccaggtgactcacgtcatccccttctttgacgaaaaagagttgcaagaaaggaaaacagagtttgagagatcccacaacatccgccgcttcatgtttgagatgccatttacgcagaccgggaagaggcagggcggggtggaagagcagtgcaaacggcgcaccatcctgacagccatacactgcttcccttatgtgaagaagcgcatccctgtcatgtaccagcaccacactgacctgaaccccatcgaggtggccattgacgagatgagtaagaaggtggcggagctccggcagctgtgctcctcggccgaggtggacatgatcaaactgcagctcaaactccagggcagcgtgagtgttcag

SEQ ID NO: 1111 - DNA, 586 bp, Artificial
  cDNA Sequence
tgacgccgcagaagggaagcaccctggacaacagcctgcacaaggacctgctgggcgccatctccggcattgcttctccatatacaacctcaactccaaacatcaacagtgtgagaaatgctgattcgagaggatctctcataagcacagattcgggtaacagccttccagaaaggaatagtgagaagagcaattccctggataagcaccaacaaagtagcacattgggaaattccgtggttcgctgtgataaacttgaccagtctgagattaagagcctactgatgtgtttcctctacatcttaaagagcatgtctgatgatgctttgtttacatattggaacaaggcttcaacatctgaacttatggatttttttacaatatctgaagtctgcctgcaccagttccagtacatggggaagcgatacatagccagtttaacaaagtgtgtggctcttctccttcctgcttgggaaccaggaggggttgggacccatagttcatgatcgaaagtctcagacattgcctgtttcccgtaacagaacaggaatgatgcatgccagattgcagcagctgggcagcctgg

SEQ ID NO: 1112 - DNA, 392 bp, Artificial
  cDNA Sequence
cagctgatacagaggtgccatttgtgacatcttaattccaacagagaagtgccatcacaggtccagtgaattgtgaatctatcacagctggcagaacacctggaattcacagtgatctttctatcatgaaatactaagatgcttgccaatcactaagacgacctaagcctcatgtgtctgccgaccaggctcattgttgtgcaaagcagatcacaagctgcctcgcaagcctccggtgcccatgtgctcctccctgtcttggttcctattgctcctgattatgtgttagtcctcactgtgcagttcaaatcaagaagaggcactaaaaatggaactgctaaaaacacatttccagattaaatctgtgaacacattaaaaatattataaacta

SEQ ID NO: 1113 - DNA, 691 bp, Artificial
  cDNA Sequence
atggcagagcaagagcaaagaaaaatccctttggttctagaaaatctgaaaaagaggaaggcttatcaagccctcaaagccactcaggcaaagcaggcacttttagcaaagaaggagcagaagaaaggaaaacagctcaggtttaagcgactggaatcattcctatatgattcctcgtggcagaaacacgacaagctgcatctcagacaactagaagtgaaacctcatgccttggaattgccagataaacattccttggcctttgttttacgcatccaaagaattaatggtgtgacttcactggtgcagagaaccattgcaagactttgcctgaagaaaattttcagtggtatctttgtaaaagtcaccccaaagagcctaaaatgttgcttatagtagaaccttatgtgaactggggatttccaatctaaagtctgtccaagaactcattttgaaacatgaacaagccaaggtcaagaatgagaccatccctctgacagacagcacagcaattgaggagcacctgggggagtttggtgtcatttgcctgggagacctcatacatgaaattgccttcccagggaagtatttccaggagatctcatgggtcttgcaccctttccacctctcggtggcccatcatgctaccaagaatagagtgggcttcctcaaggagatggcctcacctggg

SEQ ID NO: 1114 - DNA, 722 bp, Artificial
  cDNA Sequence
gatgaagctgatcttcccagccacaggctgccaggagctcattgaagtggatgatgaacacgaactttggaccaattttgagaagtgtattctgatgctctgggtgaaaagaacagaagggttatgtggtccaagacagtgaggggaacaacaagcaagtctcccccaagaagcaagatgtcctgaccatggccgtgcccatgtgccattgcgtaaggggcattcttgttagagaccaaggagaactggagaaaagaaaattcaagtctgttctggattgcactacggatgccaatctgagtgttctcaatttaactatcagctaaaaaggaaagaagaatattcctggactgactgatgctactgggcctctatcctggggctcagaacagatagcagaatccacaaacatttccatcttccttaagaagatcatgaacaccagtgttttgtgagaaagcccctaaacaaagaaagtaagagacctgggagtaaagcacccaagattcagtcttgttattccatgtgtccagcaacacaaatgtacgtctattgctctgaaaaaacagcatatttaggaaaataagaggttgcagagcagaacatgctgaacttttggtcaagagaatgcaggaggtcaaacaaattgccaagaacagatagccaagagacagagctgtcctctttgataaattctacctccaagtttaagtcttgtcaaa

SEQ ID NO: 1115 - DNA, 413 bp, Artificial
  cDNA Sequence
atggtgaaggtgaaggccagaaaaaacagatttggccatattgggggcctggtcaccagggatgccaactctggcaaagtggatattgtcactatcaatgacctcaactacatggtctccatgttccagtatgattccgctcatggcaagttccacggcaccatcaaggctgagaacgggaagcctgccatcaatgacaatcccatcaccatctcgcaggagtgagatcccacccaaatcaagtggggtcatgccagcactgattatattgtggcggccaccagcatctttgccagcatggagaaggctggggatcacctagatgggggagccaaaagggtcatcatcactgccccctctgctgatggccccatgtgtgtgatgagtgaaagctatgagaagtactgcctgca

SEQ ID NO: 1116 - DNA, 1706 bp, Artificial
  cDNA Sequence
gggaagggaagtgcgtcggtaggggagggctcacctctccaggttgaaacgatggcggtcagaaccgcctgaggtaaaaacgggtggcactggggaagcggaggcgtagctcccgagagcctcacacttgtgctcagtgccgcctcacccctggtggatccgcgatggccgcggattcccctggattgccggcgctgggcaggagcgccacttctaatctctcccgagactggacgcccggcgccttccacgcgcgttgtgtctttccgggcggtccctcgaagctggctaccccgcgggctgttgactgcagtgggatctggtcactcagatgcggatagagggctaaatgcaagatggtatggcatccagactctgctcataagtatctgcagtgatccataccttgattgtacatctactctgcatcctgaggacctgaacatgctaactggtggctgcagatttgtcttctaaggagcaagtgtggtctgtggacaggcagcttcagcctcacctgggattttgtttgcactagaaagtgccaagccctaccctagacctattaaagcagaactggcgtttaacaagacaccccaggtaatttgtgtgcaccttagagtctgagatgcactagtgtagtgattcgcagggggacaattttgacctccaggggacaatatctggagacatttttgggtgtcacaacgtgctggggagagggtgctactggcatctaatgggctgaggccaagggtgctgctaaacatctggcaataccgggccaacctcccccctcctcctgcccacagtaaagaattaccccgcctggattgtcagtagtgcagaggtagaggaaaccctacacctgtgaaactcatctgacctttactatgaattcctggatctcctggtgcatatcatttctgttgccctggctgacatttccaccttttctcttttctagattttattacaagaactcaatctgttggtctctaggaatcacctattgccttgctatgttttgttgaacctgtttttgaatctgctttctacattggggaaataggtatacgtttgtaaaccttaaaagctctgtatgctataaggaaatcaccagacacgtggataagctttgcagaggtgaagggctgtctccaccagagagacccagaaggagtcagggtaagcctgactcatcatgagatcaggtatccccaatccacagcggacttccacagttcaccttcctaggtaaccgctctgccttcccaggtaaagtaggaataatatcagaacttacagcatattttgaggtcaaattgtagaatttggtgatttcatttttattattactcaaccttttatttacaaccaaattaataaggctacttacacataacaatgtgtggacatacacattaagagaatcatttgctgcctagcactcctacctaggtactttaagaacatcattgagtggatactccctctgctgggtaaaatactttgccacaatatcagctgaaatgatacctcttccagactgtaatggcagaagtagttatcccctctttcgtgctgtcatcacacttgatgcatgcctactttataatacttatgccattgtctctgttattgggtttctgtcttctactgtgaaagggtgagcccataaaaaacagggaatgtgtctttcaaaa

SEQ ID NO: 1117 - DNA, 1434 bp, Artificial
  cDNA Sequence
gggaagggaagtgcgtcggtaggggagggctcacctctccaggttgaaacgatggcggtcagaaccgcctgagctaaatgcaagatggtatggcatccagactctgctcataagtatctgcagtgatccataccttgattgtacatctactctgcatcctgaggacctgaacatgctaactggtggctgcagatttgtcttctaaggagcaagtgtggtctgtggacaggcagcttcagcctcacctgggattttgtttgcactagaaagtgccaagccctaccctagacctattaaagcagaactggcgtttaacaagacaccccaggtaatttgtgtgcaccttagagtctgagatgcactagtgtagtgattcgcagggggacaattttgacctccaggggacaatatctggagacatttttgggtgtcacaacgtgctggggagagggtgctactggcatctaatgggctgaggccaagggtgctgctaaacatctggcaataccgggccaacctcccccctcctcctgcccacagtaaagaattaccccgcctggattgtcagtagtgcagaggtagaggaaaccctacacctgtgaaactcatctgacctttactatgaattcctggatctcctggtgcatatcatttctgttgccctggctgacatttccaccttttctcttttctagattttattacaagaactcaatctgttggtctctaggaatcacctattgccttgctatgttttgttgaacctgtttttgaatctgctttctacattggggaaataggtatacgtttgtaaaccttaaaagctctgtatgctataaggaaatcaccagacacgtggataagctttgcagaggtgaagggctgtctccaccagagagacccagaaggagtcagggtaagcctgactcatcatgagatcaggtatccccaatccacagcggacttccacagttcaccttcctaggtaaccgctctgccttcccaggtaaagtaggaataatatcagaacttacagcatattttgaggtcaaattgtagaatttggtgatttcatttttattattactcaaccttttatttacaaccaaattaataaggctacttacacataacaatgtgtggacatacacattaagagaatcatttgctgcctagcactcctacctaggtactttaagaacatcattgagtggatactccctctgctgggtaaaatactttgccacaatatcagctgaaatgatacctcttccagactgtaatggcagaagtagttatcccctctttcgtgctgtcatcacacttgatgcatgcctactttataatacttatgccattgtctctgttattgggtttctgtcttctactgtgaaagggtgagcccataaaaaacagggaatgtgtctttcaaaa

SEQ ID NO: 1118 - DNA, 627 bp, Artificial
  cDNA Sequence
ccagcaccggctccagtgggctctgtgagtaccggcctccgccatcctggctgccccctacacgccaccctaggcacctctttgaggaggctggggcagcggggaccctcgggtttgccggaggtggtggggccgaccctccagacccgcgtccgaaccctgctagttcccggtcttgggggtcagcggaaaccgcccccatttcggcctggaggggcgaatggggacaaagccccgccgcccgccccgaccccacctggtatccccagacaaggcgcctctgtcgaagagccttctgctggtccccagtgccctctccctcctgctcgccctcctcctgcctcactgccagaagctctttgtgtatgaccttcacgcagtcaagaacgacttccagatttggaggttgatatgtggaagaataatttgccttgatttgaaagatactttctgcagtagtctgcttatttataattttaggatatttgaaagaagatatggaagcagaaaatttgcatcctttttgctgggttcctgggttttgtcagccttatttgactttctcctcattgaagctatgcagtatttctttggcatcactgcagctagtaatttgccttctggatt

SEQ ID NO: 1119 - DNA, 1375 bp, Artificial
  cDNA Sequence
ccgttcgtcagcggcgagtggcctcgcggcgccggattcgtcgctccgccaagagtgcgcctgcgcggtcgctggggctcgcacttcagcttcccctcccccggcgccctctggggctccgagcccggcgggaccatgttcaccagcaccggctccagtgggctctacaaggcgcctctgtcgaagagccttctgctggtccccagtgccctctccctcctgctcgccctcctcctgcctcactgccagaagctctttgtgtatgaccttcacgcagtcaagaacgacttccagatttggaggttgatatgtggaagaataatttgccttgatttgaaagatactttctgcagtagtctgcttatttataattttaggatatttgaaagaagatatggaagcagaaaatttgcatcctttttgctgggttcctgggttttgtcagccttatttgactttctcctcattgaagctatgcagtatttctttggcatcactgcagctagtaatttgccttctggattcctggcacctgtgtttgctctgtttgtaccattttactgctccataccaagagtccaagtggcacaaattctgggtccgttgtccatcacaaacaagacattgatttatatattgggactgcagcttttcacctctggttcctacatctggattgtagccataagtggacttatgtccggtctgtgctacgacagcaaaatgttccaggtgcatcaggtgctctgcatccccagctggatggcaaaattcttttcttggacacttgaacccatcttctcttcttcagaacccaccagcgaagccagaattgggatgggagccacgctggacatccagagacagcagagaatggagctgctggaccggcagctgatgttctctcagtttgcacaagggaggcgacagagacagcagcagggaggaatgatcaattggaatcgtctttttcctcctttacgtcagcgacaaaacgtaaactatcagggcggtcggcagtctgagccagcagcgccccctctagaagtttctgaggaacaggtcgcccggctcatggagatgggattttccagaggtgatgctttggaagccctgagagcttcaaacaatgacctcaatgtcgccaccaacttcctgctgcagcactgatagtcccaggccaacactgggaccggaccggcagccgagtgacagtgcgtggtccccaccatcagatcagcccggggaccgagcatctctggtgctgatgttcttgtgggaagagggaggttccaccgcacccctgccctcaaccgcaagactgttgccgttttagtgtggagataagtttgccattacattagcatgtattttc

SEQ ID NO: 1120 - DNA, 610 bp, Artificial
  cDNA Sequence
ccgagcccggcgggaccatgttcaccagcaccggctccagtgggctctatggagtttctccctgtcgtccaggctggagtacaatggtgtgatctcggctcactgcagtctctgtctcctgggttcaaacaaggcgcctctgtcgaagagccttctgctggtccccagtgccctctccctcctgctcgccctcctcctgcctcactgccagaagctctttgtgtatgaccttcacgcagtcaagaacgacttccagatttggaggttgatatgtggaagaataatttgccttgatttgaaagatactttctgcagtagtctgcttatttataattttaggatatttgaaagaagatatggaagcagaaaatttgcatcctttttgctgggttcctgggttttgtcagccttatttgactttctcctcattgaagctatgcagtatttctttggcatcactgcagctagtaatttgccttctggattcctggcacctgtgtttgctctgtttgtaccattttactgctccataccaagagtccaagtggcacaaattctgggtccgttgtccatcacaaacaagacattgatttatatattgggactgcag

SEQ ID NO: 1121 - DNA, 1855 bp, Artificial
  cDNA Sequence
tcctttttgctgggttcctgggttttgtcagccttatttgactttctcctcattgaagctatgcagtatttctttggcatcactgcagctagtaatttgccttctggattcctggcacctgtgtttgctctgtttgtaccattttactgctccataccaagagtccaagtggcacaaattctgggtccgttgtccatcacaaacaagacattgatttatatattgggactgcagcttttcacctctggttcctacatctggattgtagccataagtggacttatgtccggtctgtgctacgacagcaaaatgttccaggtgcatcaggtgctctgcatccccagctggatggcaaaattcttttcttggacacttgaacccatcttctcttcttcagaacccaccagcgaagccagaattgggatgggagccacgctggacatccagagacagcagagaatggagctgctggaccggcagctgatgttctctcagtttgcacaagggaggcgacagagacagcagcagggaggaatgatcaattggaatcgtctttttcctcctttacgtcagcgacaaaacgtaaactatcagggcggtcggcagtctgagccagcagcgccccctctagaagtttctgaggaacaggtcgcccggctcatggagatgggattttccagaggtgatgctttggaagccctgagagcttcaaacaatgacctcaatgtcgccaccaacttcctgctgcagcactgatagtcccaggccaacactgggaccggaccggcagccgagtgacagtgcgtggtccccaccatcagatcagcccggggaccgagcatctctggtgctgatgttcttgtgggaagagggaggttccaccgcacccctgccctcaaccgcaagactgttgccgttttagtgtggagataagtttgccattacattagcatgtattttctatctatattttttattgggcattttccctaggttggagagtcagcactcgttttgaatgtgtttaaaatgcattaaaatggaagatttctgcaggcagttgaatggcactccagatggggaattgctgtaaccctcttactgtaacatgtcatctcctgcgtcgtgatggggagagggtaatgttacttcacaaaggacatgtcagatccttcttcatggacttttttagttactgttttttctctcaaacttgttttcgaatctcctgggagtgagggagaaacagggagctgaatcctcccccaagctgttccaggccagaggactctgcagtaccttctcctacatctagtaacaaagaatggtgataaccatgcactggttcaaggttctggagttctccatgaaacttgggttaattttgctcagagtatccagagttagccactaggctgcgggtgaaatgggatggagaagaacaacagcaggcttcctggagccacatgggctgactagggcactctgtggctggcctggcatgggctcagcccaggaagaggagaaacgatcccttgcctgcccctccctgtggcagggctaactgcctggccctcctggctcgcagccagccagccccctggcagcaggttctcctcagggcttgggtcttcaacctgtggcgacaggaggcagggcagactgtggaggacaggatgcaggtcagggagagggaaggcaggggtggaccgccatgagcatgaaaagacccgaagcaagttgactcttgcaatgtgcaactgttatgttctgcaaaatgagcaacgatgtatcaaattgatgcaaatttagatgttgatacttacaataaagtttttaatgtgttttactcttc

SEQ ID NO: 1122 - DNA, 2350 bp, Artificial
  cDNA Sequence
gtggatttttgagagggccttgtgtgtgttgggccagatgaggggaagcagagaggaggacagtggtggcagactccagtgatgaaagcgaactggggagctttgccatcacatctttatgaagcattttatctttggatactggagcctatggaaggaagggtttttttgttttgttttttatttttttttgtttttgtttgtttgtttgttttttgagacggagtctcgctctgtcgcccaggctggagtgcagtggcgcgatcttggctcactgcaagctctgcctcctggattcacgccattctcctgcctcagcctcccgagtagtagctgggactacaggtgcccaccaccaagcccggctaattttatgtatttttagtagagacggggtttcaccgtgttagccaggatggtctccatctcctgacctcatgatccgcccgcctcggcctcccaaagtgctgggattacaggcgtgagacactacgcccggccggaaggaagggtttttaagcaagggagtgttgtgatcagagttgtattttaggaagagagtactgccaacaatgttaagaaatggattagagagaagcaagactcctggcacctgtgtttgctctgtttgtaccattttactgctccataccaagagtccaagtggcacaaattctgggtccgttgtccatcacaaacaagacattgatttatatattgggactgcagcttttcacctctggttcctacatctggattgtagccataagtggacttatgtccggtctgtgctacgacagcaaaatgttccaggtgcatcaggtgctctgcatccccagctggatggcaaaattcttttcttggacacttgaacccatcttctcttcttcagaacccaccagcgaagccagaattgggatgggagccacgctggacatccagagacagcagagaatggagctgctggaccggcagctgatgttctctcagtttgcacaagggaggcgacagagacagcagcagggaggaatgatcaattggaatcgtctttttcctcctttacgtcagcgacaaaacgtaaactatcagggcggtcggcagtctgagccagcagcgccccctctagaagtttctgaggaacaggtcgcccggctcatggagatgggattttccagaggtgatgctttggaagccctgagagcttcaaacaatgacctcaatgtcgccaccaacttcctgctgcagcactgatagtcccaggccaacactgggaccggaccggcagccgagtgacagtgcgtggtccccaccatcagatcagcccggggaccgagcatctctggtgctgatgttcttgtgggaagagggaggttccaccgcacccctgccctcaaccgcaagactgttgccgttttagtgtggagataagtttgccattacattagcatgtattttctatctatattttttattgggcattttccctaggttggagagtcagcactcgttttgaatgtgtttaaaatgcattaaaatggaagatttctgcaggcagttgaatggcactccagatggggaattgctgtaaccctcttactgtaacatgtcatctcctgcgtcgtgatggggagagggtaatgttacttcacaaaggacatgtcagatccttcttcatggacttttttagttactgttttttctctcaaacttgttttcgaatctcctgggagtgagggagaaacagggagctgaatcctcccccaagctgttccaggccagaggactctgcagtaccttctcctacatctagtaacaaagaatggtgataaccatgcactggttcaaggttctggagttctccatgaaacttgggttaattttgctcagagtatccagagttagccactaggctgcgggtgaaatgggatggagaagaacaacagcaggcttcctggagccacatgggctgactagggcactctgtggctggcctggcatgggctcagcccaggaagaggagaaacgatcccttgcctgcccctccctgtggcagggctaactgcctggccctcctggctcgcagccagccagccccctggcagcaggttctcctcagggcttgggtcttcaacctgtggcgacaggaggcagggcagactgtggaggacaggatgcaggtcagggagagggaaggcaggggtggaccgccatgagcatgaaaagacccgaagcaagttgactcttgcaatgtgcaactgttatgttctgcaaaatgagcaacgatgtatcaaattgatgcaaatttagatgttgatacttacaataaagtttttaatgtgttttactcttc

SEQ ID NO: 1123 - DNA, 1017 bp, Artificial
  cDNA Sequence
ctgtgatggtagcgtcaccatttgctaaatggtttgctgtgaagactactagagtactactgtccaggttacatttgaaaagcttctttgccaatcctcagcgaatgtcaattgctccctgctgggctccagcttttcacctctggttcctacatctggattgtagccataagtggacttatgtccggtctgtgctacgacagcaaaatgttccaggtgcatcaggtgctctgcatccccagctggatggcaaaattcttttcttggacacttgaacccatcttctcttcttcagaacccaccagcgaagccagaattgggatgggagccacgctggacatccagagacagcagagaatggagctgctggaccggcagctgatgttctctcagtttgcacaagggaggcgacagagacagcagcagggaggaatgatcaattggaatcgtctttttcctcctttacgtcagcgacaaaacgtaaactatcagggcggtcggcagtctgagccagcagcgccccctctagaagtttctgaggaacaggtcgcccggctcatggagatgggattttccagaggtgatgctttggaagccctgagagcttcaaacaatgacctcaatgtcgccaccaacttcctgctgcagcactgatagtcccaggccaacactgggaccggaccggcagccgagtgacagtgcgtggtccccaccatcagatcagcccggggaccgagcatctctggtgctgatgttcttgtgggaagagggaggttccaccgcacccctgccctcaaccgcaagactgttgccgttttagtgtggagataagtttgccattacattagcatgtattttctatctatattttttattgggcattttccctaggttggagagtcagcactcgttttgaatgtgtttaaaatgcattaaaatggaagatttctgcaggcagttgaatggcactccagatggggaattgctgtaaccctcttactgtaacatgtcatctcc

SEQ ID NO: 1124 - DNA, 861 bp, Artificial
  cDNA Sequence
gtcgagaggctgcctgagtcagaggctgtatgtcattaggttcttctaacgtctaaagtgctgtgagtatggaggaacattgtcagacacaagaaagagcatcaagcaagtcagctgaattctttgggccgccacctcactgtgtataaaataaagcctggcacctgtgtttgctctgtttgtaccattttactgctccataccaagagtccaagtggcacaaattctgggtccgttgtccatcacaaacaagacattgatttatatattgggactgcagcttttcacctctggttcctacatctggattgtagccataagtggacttatgtccggtctgtgctacgacagcaaaatgttccaggtgcatcaggtgctctgcatccccagctggatggcaaaattcttttcttggacacttgaacccatcttctcttcttcagaacccaccagcgaagccagaattgggatgggagccacgctggacatccagagacagcagagaatggagctgctggaccggcagctgatgttctctcagtttgcacaagggaggcgacagagacagcagcagggaggaatgatcaattggaatcgtctttttcctcctttacgtcagcgacaaaacgtaaactatcagggcggtcggcagtctgagccagcagcgccccctctagaagtttctgaggaacaggtcgcccggctcatggagatgggattttccagaggtgatgctttggaagccctgagagcttcaaacaatgacctcaatgtcgccaccaacttcctgctgcagcactgatagtcccaggccaacactgggaccggaccggcagccgagtgacagtgcgtggtccccac

SEQ ID NO: 1125 - DNA, 769 bp, Artificial
  cDNA Sequence
ggaggaatgatcaattggaatcgtctttttcctcctttacgtcagcgacaaaacgtaaactatcagggcggtcggcagtctgagccagcagcgccccctctagaagtttctgaggaacagaccaatgaatgactgcaagcccatgaagccaacactgacgaagttgcagtatgcagcgccgtgcctcgcctcgcctcgcctcaccattgcctccactcacgccagaacaagtgtctatcctagcacagtcttttccagagtctcagtgtcctaccagcattctcattttgtcctccacatgtttattggtcacttttgatcttcacattcagccttctctaactggtgctgggcaccgggtgtgtcaggctctgtgttggggggaagcaagccaggcctggtgccagccctcaagggagctcaccgtctatgagggagaccagatccatgcaaggccctaacccagtacccaactcatgcaagtacctagtgccagtccttagagcagaggagacctgtaaacattcattcctgtactttaacaacttgacatcaggagattttacattgaaactttctcttcctgtggatgttagatcggatcaggtgctcatggtgagttctgatgcttctcatcccagtagctggactacagagacaggaagcagcctgcagagaaaatgaagtagtccagggtttcagtgtgagttaatgtgtgttgtggctaaaatgtggtgctttcgatagggagagagatgggctgaccatc

SEQ ID NO: 1126 - DNA, 748 bp, Artificial
  cDNA Sequence
ccgttcgtcagcggcgagtggcctcgcggcgccggattcgtcgctccgccaagagtgcgcctgcgcggtcgctggggctcgcacttcagcttcccctcccccggcgccctctggggctccgagcccggcgggaccatgttcaccagcaccggctccagtgggctctacaaggcgcctctgtcgaagagccttctgctggtccccagtgccctctccctcctgctcgccctcctcctgcctcactgccagaagctctttgtgtatgaccttcacgcagtcaagaacgacttccagatgtccggtctgtgctacgacagcaaaatgttccaggtgcatcaggtgctctgcatccccagctggatggcaaaattcttttcttggacacttgaacccatcttctcttcttcagaacccaccagcgaagccagaattgggatgggagccacgctggacatccagagacagcagagaatggagctgctggaccggcagctgatgttctctcagtttgcacaagggaggcgacagagacagcagcagggaggaatgatcaattggaatcgtctttttcctcctttacgtcagcgacaaaacgtaaactatcagggcggtcggcagtctgagccagcagcgccccctctagaagtttctgaggaacaggtcgcccggctcatggagatgggattttccagaggtgatgctttggaagccctgagagcttcaaacaatgacctcaatgtcgccacca

SEQ ID NO: 1127 - DNA, 968 bp, Artificial
  cDNA Sequence
gggctccgagcccggcgggaccatgttcaccagcaccggctccagtgggctcttctccaagaagagtttttagacaaacacacactgatgagagtgctttcaagtggagggaagttaggaagtcgtggcgagggagcgcagctgtgctgctggatgttgctgttttcctggcgtgttagcggtggtcagcagacaaggcgcctctgtcgaagagccttctgctggtccccagtgccctctccctcctgctcgccctcctcctgcctcactgccagaagctctttgtgtatgaccttcacgcagtcaagaacgacttccagatttggaggttgatatgtggaagaataatttgccttgatttgaaagatactttctgcagtagtctgcttatttataattttaggatatttgaaagaagatatggaagcagaaaatttgcatcctttttgctgggttcctgggttttgtcagccttatttgactttctcctcattgaagctatgcagtatttctttggcatcactgcagctagtaatttgccttctggattcctggcacctgtgtttgctctgtttgtaccattttactgctccataccaagagtccaagtggcacaaattctgggtccgttgtccatcacaaacaagacattgatttatatattgggactgcagcttttcacctctggttcctacatctggattgtagccataagtggacttatgtccggtctgtgctacgacagcaaaatgttccaggtgcatcaggtgctctgcatccccagctggatggcaaaattcttttcttggacacttgaacccatcttctcttcttcagaacccaccagcgaagccagaattgggatgggagccacgctggacatccagagacagcagagaatggagctgctggaccggcagctgatgttctctcagtttgcacaagggaggcgacagagacagcagcag

SEQ ID NO: 1128 - DNA, 2532 bp, Artificial
  cDNA Sequence
atgttcaccagcaccggctccagtgggctctgtgagtaccggcctccgccatcctggctgccccctacacgccaccctaggcacctctttgaggaggctggggcagcggggaccctcgggtttgccggaggtggtggggccgaccctccagacccgcgtccgaaccctgctagttcccggtcttgggggtcagcggaaaccgcccccatttcggcctggaggggcgaatggggacaaagccccgccgcccgccccgaccccacctggtatccccaggtgctctgcccaggagtctcttggggccgctgcaagtgggcaggtgccctggtgttctcgtgggccggccccaggccctttgcggagcgtgtgccgcgctgaaggaaggggccgtcccccttaccatgccccattcttttaggcttgggggaccgaactaactccccccgcccccacttgcaaagttcagcctccgctttagaagctgacctctcagtttcacttggatgtgtttcttcttcagtctccaagaagagtttttagacaaacacacactgatgagagtgctttcaagtggagggaagttaggaagtcgtggcgagggagcgcagctgtgctgctggatgttgctgttttcctggcgtgttagcggtggtcagcagacaaggcgcctctgtcgaagagccttctgctggtccccagtgccctctccctcctgctcgccctcctcctgcctcactgccagaagctctttgtgtatgaccttcacgcagtcaagaacgacttccagcctggcacctgtgtttgctctgtttgtaccattttactgctccataccaagagtccaagtggcacaaattctgggtccgttgtccatcacaaacaagacattgatttatatattgggactgcagcttttcacctctggttcctacatctggattgtagccataagtggacttatgtccggtctgtgctacgacagcaaaatgttccaggtgcatcaggtgctctgcatccccagctggatggcaaaattcttttcttggacacttgaacccatcttctcttcttcagaacccaccagcgaagccagaattgggatgggagccacgctggacatccagagacagcagagaatggagctgctggaccggcagctgatgttctctcagtttgcacaagggaggcgacagagacagcagcagggaggaatgatcaattggaatcgtctttttcctcctttacgtcagcgacaaaacgtaaactatcagggcggtcggcagtctgagccagcagcgccccctctagaagtttctgaggaacaggtcgcccggctcatggagatgggattttccagaggtgatgctttggaagccctgagagcttcaaacaatgacctcaatgtcgccaccaacttcctgctgcagcactgatagtcccaggccaacactgggaccggaccggcagccgagtgacagtgcgtggtccccaccatcagatcagcccggggaccgagcatctctggtgctgatgttcttgtgggaagagggaggttccaccgcacccctgccctcaaccgcaagactgttgccgttttagtgtggagataagtttgccattacattagcatgtattttctatctatattttttattgggcattttccctaggttggagagtcagcactcgttttgaatgtgtttaaaatgcattaaaatggaagatttctgcaggcagttgaatggcactccagatggggaattgctgtaaccctcttactgtaacatgtcatctcctgcgtcgtgatggggagagggtaatgttacttcacaaaggacatgtcagatccttcttcatggacttttttagttactgttttttctctcaaacttgttttcgaatctcctgggagtgagggagaaacagggagctgaatcctcccccaagctgttccaggccagaggactctgcagtaccttctcctacatctagtaacaaagaatggtgataaccatgcactggttcaaggttctggagttctccatgaaacttgggttaattttgctcagagtatccagagttagccactaggctgcgggtgaaatgggatggagaagaacaacagcaggcttcctggagccacatgggctgactagggcactctgtggctggcctggcatgggctcagcccaggaagaggagaaacgatcccttgcctgcccctccctgtggcagggctaactgcctggccctcctggctcgcagccagccagccccctggcagcaggttctcctcagggcttgggtcttcaacctgtggcgacaggaggcagggcagactgtggaggacaggatgcaggtcagggagagggaaggcaggggtggaccgccatgagcatgaaaagacccgaagcaagttgactcttgcaatgtgcaactgttatgttctgcaaaatgagcaacgatgtatcaaattgatgcaaatttagatgttgatacttacaataaagtttttaatgtgttttactcttc

SEQ ID NO: 1129 - DNA, 887 bp, Artificial
  cDNA Sequence
agggcagtttgaatcacggtgcgatgaaggagtagatggtgggatctcaccacgggtctgattagccctttctctgccttgcttgagcttcagcagaactcgaaatggctgacggtaaggctgggaaggactccggaaaggccaagacaaaggcggtttcccgctcgcagagagccggcttgcagttcccagagggctgtattcatcaacacctgaaatctaggacgacgggtcacagacatgtgggtgcaactgccgctgtgtacagcgcagccatcctggagtacctcaccgcagagggacttgaactggcaggaaatgcatcaaaagacttaaaggtaaagtgtatattacccctcgtcacttgcaacttgctattcgtgcagatgaagaattggattctcatcaaggctacaattgctggtggtggtgtcattccacacatccacaaatctctgattgggaagaaaggacaacagaagactgtctaatgtatgcctggattccttgttatctcaggactctaaataaaagaacagctgtccagtgttggtgatgccagtggactatatttctgtgaaaaacacaattttgtctttttgtaattctatttgggcaagttggaagtttaattagctttccaaccaaatttctgcatttgagtcttaaccatatttaagtgatactgtggcttcaaggaagctattgattctgaagtactgggctttgattgagctgactgtttttaaaaaactgtttggattttaattgtaatgcagaagttatagtaacaaacatttggctttgtacagacattatttccactgtggtggataagctcaataaaggtcatatcccccaagaaaaaaaaaaaacaaaaagaaaag

SEQ ID NO: 1130 - DNA, 1698 bp, Artificial
  cDNA Sequence
agtaaaatgtcacactgcaaactctgggcctggggtcccatgggacttcagtggttccaggactgatttcactgccatcacttatatatgatgatgcagacttcaagcatcaaagtacacaaactgaagaaactttatcctttgtatataattatcttaaatatatgccatcatttcaaggggagcttatgctaagtgtgacttcataaacaaatcatttgtgaaagagaaaaaccacatccagggtaaagtcataaggtgaaaaagcctatttcagagagcacttcctgaaagagacaaagcagcaattaaagtcagcccagcaccaactccgacgccaagcgttacactggaaactactttttaaagcaacaaaagagtctaaaacaaaatacaacatttcttaaatacactgtttccagaaagagctattttaacagaagcaactcaaagatatcccttcgacagaagtggaagtgctgaaaaatgctcatctctcacacagacttttgatggacaggagtttctaagtatcatgcctaccaacaagctgtaaaatgatcaccctgaacaatcaagatcaacctgtcccttttaacagctcacatccagatgaatacaaaattgcagcccttgtcttctatagctgtatcttcataattggattatttgttaacatcactgcattatgggttttcagttgtaccaccaagaagagaaccacggtaaccatctatatgatgaatgtggcattagtggacttgatatttataatgactttaccctttcgaatgttttattatgcaaaagatgaatggccatttggagagtacttctgccagattcttggagctctcacagtgttttacccaagcattgctttatggcttcttgcctttattagtgctgacagatacatggccattgtacagccgaagtacgccaaagaacttaaaaacacgtgcaaagccgtgctggcgtgtgtgggagtctggataatgaccctgaccacgaccacccctctgctactgctctataaagacccagataaagactccactcccgccacctgcctcaagatttctgacatcatctatctaaaagctgtgaacgtgctgaacctcactcgactgacattttttttcttgattcctttgttcatcatgattgggtgctacttggtcattattcataatctccttcacggcaggacgtctaagctgaaacccaaagtcaaggagaagtccataaggatcatcatcacgctgctggtgcaggtgctcgtctgctttatgcccttccacatctgtttcgctttcctgatgctgggaacgggggagaacagttacaatccctggggagcctttaccaccttcctcatgaacctcagcacgtgtctggatgtgattctctactacatcgtttcaaaacaatttcaggctcgagtcattagtgtcatgctataccgtaattaccttcgaagcatgcgcagaaaaagtttccgatctggtagtctacggtcactaagcaatataaacagtgaaatgttatgaataataaggttctttcatttcaatcccatcaaaattcacttcactaactactctggcgtcaatggatattctgtataatactatcaagtcccttttctcttgaaaaaataaattcattatcttcattttaaaaacttatataaaa

SEQ ID NO: 1131 - DNA, 741 bp, Artificial
  cDNA Sequence
cagcaattaaagtcagcccagcaccaactccgacgccaagcgttacactggaaactactttttaaagcaacaaaagagtctaaaacaaaatacaacatttcttaaatacactgtttccagaaagagctattttaacagaagcaactcaaagatatcccttcgacagaagtggaagtgctgaaaaatgctcatctctcacacagacttttgatggacaggaggtgctgctttctgtgaaccactgaagtagagcagctgaaatcacaaaacctggaagacttggctttacgtactcccaattgtgcactagaaaacagctcatctattgctctaacagtctagttcttgatctgctgaccatgacacaaaacattgctgtttctcaacctatgataatttaaagagaacataagtttctaagtatcatgcctaccaacaagctgtaaaatgatcaccctgaacaatcaagatcaacctgtcccttttaacagctcacatccagatgaatacaaaattgcagcccttgtcttctatagctgtatcttcataattggattatttgttaacatcactgcattatgggttttcagttgtaccaccaagaagagaaccacggtaaccatctatatgatgaatgtggcattagtggacttgatatttataatgactttaccctttcgaatgttttattatgcaaaagatgaatggccatttggagagtacttctgccagattcttgga

SEQ ID NO: 1132 - DNA, 1739 bp, Artificial
  cDNA Sequence
ataaaaggaggtctgcacagcctctcttaaaacaacatgccacagttaaaacttacttcagtttggacaactactcacagctactacacagagacccgaacgagtcactgatatacacctggaccaccaccaatggatatacaaatggcaaacaattttactccgccctctgcaactcctcagggaaatgactgtgacctctatgcacatcacagcacggccaggatagtaatgcctctgcattacagcctcgtcttcatcattgggctcgtgggaaacttactagccttggtcgtcattgttcaaaacaggaaaaaaatcaactctaccaccctctattcaacaaatttggtgatttctgatatactttttaccaccgctttgcctacacgaatagcctactatgcaatgggctttgactggagaatcggagatgccttgtgtaggataactgcgctagtgttttacatcaacacatatgcaggtgtgaactttatgacctgcctgagtattgaccgcttcattgctgtggtgcaccctctacgctacaacaagataaaaaggattgaacatgcaaaaggcgtgtgcatatttgtctggattctagtatttgctcagacactcccactcctcatcaaccctatgtcaaagcaggaggctgaaaggattacatgcatggagtatccaaactttgaagaaactaaatctcttccctggattctgcttggggcatgtttcataggatatgtacttccacttataatcattctcatctgctattctcagatctgctgcaaactcttcagaactgccaaacaaaacccactcactgagaaatctggtgtaaacaaaaaggctctcaacacaattattcttattattgttgtgtttgttctctgtttcacaccttaccatgttgcaattattcaacatatgattaagaagcttcgtttctctaatttcctggaatgtagccaaagacattcgttccagatttctctgcactttacagtatgcctgatgaacttcaattgctgcatggacccttttatctacttctttgcatgtaaagggtataagagaaaggttatgaggatgctgaaacggcaagtcagtgtatcgatttctagtgctgtgaagtcagcccctgaagaaaattcacgtgaaatgacagaaacgcagatgatgatacattccaagtcttcaaatggaaagtgaaatggattgtattttggtttatagtgacgtaaactgtatgacaaactttgcaggacttcccttataaagcaaaataattgttcagcttccaattagtattcttttatatttctttcattgggcactttcccatctccaactcggaagtaagcccaagagaacaacataaagcaaacaacataaagcacaataaaaatgcaaataaatatttcatttttatttgtaaacgaatacaccaaaaggaggcgctcttaataactcccaatgtaaaaagttttgttttaataaaaaatttaattattatttcttgccaacaaatggctagaaaggactgaatagattatatattgccagatgttaatactgtaacatactttttaaataacatatttcttaaatccaaatttctctcaatgttagatttaattccctcaataacaccaatgttttgttttgtttcgttctgggtcataaaactttgttaaggaactcttttggaataaagagcaggatgctgcaaa

SEQ ID NO: 1133 - DNA, 444 bp, Artificial
  cDNA Sequence
atattcaactgtctcaccattctttttttttgagacagaatttcactcttgttgcccaggctggagtgcaatggctcgatctcagctcaccacaacctctgcctcccggattcgagtgattctcctgccttagcccatctctgctaaaaatacagaaaaatttgctgggcgtggtggcaggcgcctgtagtcccagctactcaggaggctgaggcaggagaatggcgtggaacccgagaggtggagcttgcagtgagccgaggtggcgccattgctctccagcctgggcgacagagtgagactccatctcaaaaaaaaaaaaaaaaaaaaggccagtcacagggaaaattgagacaaaggaggccagtttgtgctttcaaggtaattttgatgaaagttttagctgggcttgtcagtgttgtttttaaatcatagaaaaaaaaa

SEQ ID NO: 1134 - DNA, 608 bp, Artificial
  cDNA Sequence
tatctttgatctcttgcctctttatcttccaaacctaaaatgtttaccacctggccctttacagaaaaatatttgccagtccctgctgtagaaggttatatagccagcagctttcaaagtaaccttttacctggaaatgtgaattctctcttagttctggtcatctgttatttgtgggagccaatcctctctctgttggctgatgatgagaattctgttatataccacaacacaaacttggggataaaactttccattaggcatttctgtaaaatttccatctattttagaagcagaactaaggtgaagcccagtgtgaatgaatcctgcttgttggtacaagccaagtgggacatttggcagcaaagcccaggagtccttggtgctcttcttttaactgcctcctcatctcattgggctgcccggtgttaactggttgattatcacctctgtgttttgcctgcaaggaaagaagctactgacacccagagtggctcagcgatactcacacgtgctttcagttactttcgcagcatttggttaaagtgagtttagctgcacatcctcacttggtaacattctgtggctgtgaaaattgtttctctctt

SEQ ID NO: 1135 - DNA, 514 bp, Artificial
  cDNA Sequence
ggcaacagcgatccccggaaaccacaaggcgagatgtctgctcatgccttccctgtgcagacgtgcggggaggaagatcagaagaaaaccccacaagttcctatcaatttcacagaactttccaagtgctcttagagttgaaagataatgtctggggaaagagaagtctaaatctgatgaaaggacaaaggtggataaagtaggctgtggggggaaaatgaaggatgatggaccagctaagggaggcaaggagaaggcccctaatgccccccaaagaccactgcctgttctgttcaggatccccagcatcaaatccatagaccctgggattgcttttggagatgggtagacaagcttggtgagctgtggaatcagtgaccgtgagaagcagccttaggacaccaaggtggggaagctgctggagaaagacaggtggcgtcaccggctctgagtctaaagggaaaatgggtggcaagaaggtcctgccagggttgcccagagaaaggtagacaag

SEQ ID NO: 1136 - DNA, 998 bp, Artificial
  cDNA Sequence
caggcagccacgtgagatggcttccggcactgctggcgtgagtagtcttcctggcaatgccagctcttgccgtcctcacctcctggccccagtggcccgcatgacgctctctgttctacacagccctcctggtcttcagtgccctgggaaacatccttgccctttgccttacctgtcaaaagagcaggaagatcaactgcacaggcatctacctggtgcacctggctgtgtctgacctgctgttcaccgtggccttaccgggaagggtggtgtgttatgtgctgggctccagctggcctttcggcaaggggctctgcaggctgacggcgtttgtgctctacaccgacacctacggggggtctacctcatggcctgtgtgagcgtggaccattacccagctgtggtctgtgcccactggggcccgcgcctccgcacggctggccgcgccaggctggtctgcgtggccatctggaccttggtgctgctgcagacgatgcccttgctcttgatgcccatgaccaagccgctggtgggcaagctggcctgcatggagtacagcagcatggagtcagtcctcgggctgcccctcatggtcctggtggcctttgccattggcttctgtgggccagtggggatcatcctgtcctgctatatgaaggatgctggtggccgtggtggtctgcttcagcccctaccacctcaacatcaagcagttcatggcgagagggatgctccacctgccatcctgtgccgagcggagggctttcttactgtcccttcaggccaccgtggccctcatgaacatgaactgtggcattaccccatcatttacttctttgcatccacccattacaggaaatggctcctgggcattttaaagctcaaagggtcttcctcctcctcctcctcctcctcctccaccccaggaaaagcttcttcagaaacaccaagtatcacccaggccagaggttctatgttcttagcggagcacgtggtct

SEQ ID NO: 1137 - DNA, 335 bp, Artificial
  cDNA Sequence
gtcttcctcactgcccctgttcaggaacattgtaattactactgaggagccccaggtaactctggacgtcatgggcacccaaattcagtttctttttgatgcaggagcaaattactctgttcttactgcttatgcagtaaggcgttcctcccagtccacaagtgttatgggaatagaatggaagccacaaacgaattcattactcctcctttgatttgtcaatttgagaaacaactcttccaacaggatttcctagtagtaccaagctgcccaatccccctgttgggaagagatattatggttaaaatggaggcactactacaatttaagcatca

SEQ ID NO: 1138 - DNA, 872 bp, Artificial
  cDNA Sequence
gaaaaagttctggagacacctggttgggagcaggctaaggaaacaaatggggaggaattagccacaaatcctcaaatagacagctactcaaaggcatcttcacggacaatttccaagcattggatgcagtggtgcattcttgcattgggcagtgattgtgtgcacacatctctttaagggagagtggaaatggggtgaggaggaaaatgggagtaggatagagtgtagcgttgacatttattttctttaaaggaagacccgagcatacctgagagctcagtgaagaaagtagttctggcgaatcggattaatatggtatgatcagcctttagcaagattctatcacttttcccactgatgatgtgagacggtgtccgcgtgtgtaagtgcacacacgtgtgtgtgtgtgtgtgttgcatcttctgagtatttttcaaggagaagctttttagtgatctgaaaaagtcaattcagttagccactagagttcaatcaaaaacttcggaagagtgcatcatcttaaagtacataagagagaatcatgacctccagctcagaattcaagaataggcaggtttgtgaaatagtaagctcagaaagttgagggccagtgaactcctatttcaagttcttgcgggtgtttgtacttttttcccagcaccactgaaacttgaccttcggccggcgcggtggctcacgcctgtaatcccagcactttgggaggccgagatgggcggatcacgaggtcagaagatcgagaccatcctggctaacacggtgaaaccccgtctctactaaaaatacaaaaaaattagccgagcgtggtggcgggctcctgtagtcccagctacttgggaggctgaggcaggaga

SEQ ID NO: 1139 - DNA, 687 bp, Artificial
  cDNA Sequence
cgcaaccggaactagccttctgggggccggcttcctttatctctggcggccttgtagtcgtctccgagactccccacccctccttccctcttgaccccctaggtttgattgccctttccccgaaacaactatcatgagcgcgaggctgccggtgttgtctccacctcggtggccgcggctgttgctgctgtcgctgctcctgctgggggcggttcctggcccgcgccggagcggcgctttctacctgcccggcctggcgcccgtcaacttctgcgacgaagaaaaaaagagcgacgagtgcaaggccgaaatagaactatttgtgaacagacttgattcagtggaatcagttcttccttatggaattccctggtcattgttctcttcttatctggaatggtagctatgattatgttacggacactgcacaaagatattgctagatataatcagatggactctacggaagatgcccaggaagaatttggctggaaacttgttcatggtgatatattccgtcctccaagaaaagggatgctgctatcagtctttctaggatccgggacacagattttaattatgacctttgtgactctatttttcgcttgcctgggatttttgtcacctgccaaccgaggagcgctgatgacgtgtgctgtggtcctgtgggtgctgctgggcacccct

SEQ ID NO: 1140 - DNA, 727 bp, Artificial
  cDNA Sequence
gtgtgtaagtctacagttgtgtacagtagtgtcctaggccttcacattcattcaccgctcactcacccagagcagcttccagccttgcaagttctattcatggccgaaatagaactatttgtgaacagacttgattcagtggaatcagttcttccttatgaatacacagccactcttcacagagggtctttttagccatgcttcacatattgggatgtgttggcaagtgtactgagatgagacaactgcaggtttgatttttgccaagcatcagaaggaaagcgcccatctgaaaatcttggtcaggtactattcggggaaagaattgaaccttcaccatataagtttacgtttaataagaaggagacctgtaagcttgtttgtacaaaaacataccatacagagaaagctgaagacaaacaaaagttagaattcttgaaaaaaagcatgttattgaattatcaacatcactggattgtggataatatgcctgtaacgtggtgttacgatgttgaagatggtcagaggttctgtaatcctggatttcctattggctgttacattacagataaaggccatgcaaaagatgcctgtgttattagttcagatttccatgaaagagatacattttacatcttcaaccatgttgacatcaaaatatactatcatgttgttgaaactgggtccatgggagcaagattagtggctgctaaacttgaaccgaaaa

SEQ ID NO: 1141 - DNA, 461 bp, Artificial
  cDNA Sequence
tttggttgcataatcttactctgatttcccctagactttagtaaatctgaaactctccaaatctcaggactaaccaaagttagataatttagaaattgcagttgttgactcaatggaaggacaagctttgaatgggatttttttttgttcttaatgtgctgtcagcagatgtttacttaaagagattttttaatctcctctaggaagatgataagatcagatgggcgtctagatgggactatattctggagtctatgcctcatacccacattcagtggtttagcattatgaattccctggtcattgttctcttcttatctggaatggtagctatgattatgttacggacactgcacaaagatattgctagatataatcagatggactctacggtaagtggaaacattttagtctttagtctgccaaggacactgtttattgttattttgcaaaaaggtaaa

SEQ ID NO: 1142 - DNA, 2756 bp, Artificial
  cDNA Sequence
cgcaaccggaactagccttctgggggccggcttcctttatctctggcggccttgtagtcgtctccgagactccccacccctccttccctcttgaccccctaggtttgattgccctttccccgaaacaactatcatgagcgcgaggctgccggtgttgtctccacctcggtggccgcggctgttgctgctgtcgctgctcctgctgggggcggttcctggcccgcgccggagcggcgctttctacctgcccggcctggcgcccgtcaacttctgcgacgaagaaaaaaagagcgacgagtgcaaggccgaaatagaactatttgtgaacagacttgattcagtggaatcagttcttccttatgaatacacagcgtttgatttttgccaagcatcagaaggaaagcgcccatctgaaaatcttggtcaggtactattcggggaaagaattgaaccttcaccatataagtttacgtttaataagaaggagacctgtaagcttgtttgtacaaaaacataccatacagagaaagctgaagacaaacaaaagttagaattcttgaaaaaaagcatgttattgaattatcaacatcactggattgtggataatatgcctgtaacgtggtgttacgatgttgaagatggtcagaggttctgtaatcctggatttcctattggctgttacattacagataaaggccatgcaaaagatgcctgtgttattagttcagatttccatgaaagagatacattttacatcttcaaccatgttgacatcaaaatatactatcatgttgttgaaactgggtccatgggagcaagattagtggctgctaaacttgaaccgaaaagcttcaaacatacccatatagataaaccagactgctcagggccccccatggacataagtaacaaggcttctggggagataaaaattgcctatacttactctgttagcttcgaggaagatgataagatcagatgggcgtctagatgggactatattctggagtctatgcctcatacccacattcagtggtttagcattatgaattccctggtcattgttctcttcttatctggaatggtagctatgattatgttacggacactgcacaaagatattgctagatataatcagatggactctacggaagatgcccaggaagaatttggctggaaacttgttcatggtgatatattccgtcctccaagaaaagggatgctgctatcagtctttctaggatccgggacacagattttaattatgacctttgtgactctatttttcgcttgcctgggatttttgtcacctgccaaccgaggagcgctgatgacgtgtgctgtggtcctgtgggtgctgctgggcacccctgcaggctatgttgctgccagattctataagtcctttggaggtgagaagtggaaaacaaatgttttattaacatcatttctttgtcctgggattgtatttgctgacttctttataatgaatctgatcctctggggagaaggatcttcagcagctattccttttgggacactggttgccatattggccctttggttctgcatatctgtgcctctgacgtttattggtgcatactttggttttaagaagaatgccattgaacacccagttcgaaccaatcagattccacgtcagattcctgaacagtcgttctacacgaagcccttgcctggtattatcatgggagggattttgccctttggctgcatctttatacaacttttcttcattctgaatagtatttggtcacaccagatgtattacatgtttggcttcctatttctggtgtttatcattttggttattacctgttctgaagcaactatacttctttgctatttccacctatgtgcagaggattatcattggcaatggcgttcattccttacgagtggctttactgcagtttatttcttaatctatgcagtacactacttcttttcaaaactgcagatcacgggaacagcaagcacaattctgtactttggttataccatgataatggttttgatcttctttctttttacaggaacaattggcttctttgcatgcttttggtttgttaccaaaatatacagtgtggtgaaggttgactgaagaagtccagtgtgtccagttaaaacagaaataaattaaactcttcatcaacaaagacctgtttttgtgactgccttgagttttatcagaattattggcctagtaatccttcagaaacaccgtaattctaaataaacctcttcccatacacctttcccccataagatgtgtcttcaacactataaagcatttgtattgtgatttgattaagtatatatttggttgttctcaatgaagagcaaatttaaatattatgtgcatttgtaaatacagtagctataaaattttccatacttctaatggcagaatagaggaggccatattaaataatactgatgaaaggcaggacactgcattgtaaataggattttctaggctcggtaggcagaaagaattatttttctttgaaggaaataactttttatcatggtaattttgaaggatgattcctatgatgtgttcaccaggggaatgtggcttttaaagaaaatcttctattggttgtaactgttcatatcttcttacttttctgtgttgacttcattattcccatggtattggccttttaaactatgtgcctctgagtctttcaatttataaatttgttatcttaataaatattataaaaatg

SEQ ID NO: 1143 - DNA, 652 bp, Artificial
  cDNA Sequence
gggcggtttgagaccagcctgggcaatatagcaaccgtcctgctggcacacaaaccctcctgcctctaaacagaatttgatgggccccttggcaaaggcaggttttagaaactcctcgggggctggagcgcaaggagagtctgagccaggccaagcctccctgggggaacatggctgaaggaagacctacagacatctcccctgggtgggagcctgtgttcagaagcagcagatccaagtctctgtgtggctgaggagaggacatcctgctggcaacacggagaatgccatataacagctaagacagagatcagagccatgcagctgcaagccgaagcaggccaaggattgccagcaaaccaagagaggctggaagaagagagaaggatctttccctgctgatttcacagggagcatggcccttgatctcaggaccttgaccccagaactgtttctggctgccaataccaagttcctcctctccatctcacattcaaagagcacacagagaggctctaattgggtctttctacatcctgtgtccgtacagagctctcgcgtttgggtggggactttgcaccgtgaccagtctaagatcagcaccagcccctggtccaatcagctgtggccaagacccttgaagacacaggca

SEQ ID NO: 1144 - DNA, 475 bp, Artificial
  cDNA Sequence
acatggccagtgtggctatctctgatggcaacatcaagatgtctaatgacatgaaggcacacgagttggtgacatcagaggaggtgaaacagtgcaagaaggtagtgctcttctgacataatgaggccaagaagaatgtcaccctggaaggggcaaggagatcctcgtaggtggtgcaggccagactgttgatggccctatgccaccttagtcaagatgctgccagacaaggactgctcctccaccctctatgacacagcctgagaccaagaacagcaagaaggaagatctggagtttatcttctgggaccctgagtctgtaccctctaagagctaagtgacctatgccagctccaaggatgtcatcaaggggaagctgatggagatcaagcatgaatcacaaggaggtcaagggccatagcatcctggcagagaagcttggaggcagcgccatcatctcctggagggcatgcct

SEQ ID NO: 1145 - DNA, 2207 bp, Artificial
  cDNA Sequence
aaagggcggggcgcgcgcgtcgggaagatggcgctacgtctgctgcggagggcggcgcgcggagctgcggcggcggcgctgctgaggctgaaagcgtctctagcagctgatatccccagacttggatatagttcctcatcccatcacaagtacatcccccggagggcagtgctttatgtacctggaaatgatgaaaagaaaataaagaagattccatccctgaatgtagattgtgcagtgctcgactgtgaggatggagtggctgcaaacaaaaagaatgaagctcgactgagaattgtaaaaactcttgaagacattgatctgggccctactgaaaaatgtgtgagagtcaactcagtttccagtggtctggcggaagaagacctagagacccttttgcaatcccgggtccttccttccagcctgatgctaccaaaggtggaaagtcctgaagaaatccagtggtttgcagacaaattttcattccacttaaaaggccgaaaacttgaacaaccaatgaatttaatcccttttgtggaaactgcaatgggtttgctcaattttaaggcagtgtgtgaagaaaccctgaaggtcgggcctcaagtaggtctctttctagatgcagtcgtttttggaggagaagactttcgagccagcataggtgcaacaagtagtaaagaaaccctggatattctctacgcccggcaaaagattgttgtcatagcgaaagcctttggtctccaagccatagatctggtgtacattgactttcgagatggagctgggctgcttagacagtcacgagaaggagccgccatgggcttcactggtaagcaggtgattcaccctaaccaaattgccgtggtccaggagcagttttctccttcccctgaaaaaattaagtgggctgaagaactgattgctgcctttaaagaacatcaacaattaggaaagggggcctttactttccaagggagtatgatcgacatgccattactgaagcaggcccagaacactgttacgcttgccacctccatcaaggaaaaatgatctgttaaatgaagctgtcatcaggtgggctgaacatatacagtggggttcttaaagacaaaccacaatactcaaagcaacttgttaggatgccagattgggacctgactccatttacagttcatgttaatcacaattttgttgttgttgtctcactggccagttattcccctaaaaaaatgaacgcttttccctttggatccaagcttatgattttatcatttttagtgtattacgaatatgggcttatgatttcacagggaggtaagatcctggggaaagatgggctgtgaggcgaaggtaggtctttaatgaaatggatctttcccaaatagacatattccctccacccttctcatgttagtaaatgtttcctgcttgttcatttatacagctgacaccacaaataattttaagaaaagccaggcctttaaaacatagtagcaacattaaggggtcatctctatttcactagtaatctgataaaacaacagagatggcatcaaaaaagaatactaagtattatattggcttaaaaagacactttctgaaaataaactttcgaaactggttactattaacctccacccctaaaacgaaacatccatctccttgaaccgctagacgatgaacacgaaagctgtcatcctgggtgaatgctgtgagtcaaccattaccggcaattaaaaaataaatgtgcagaaacacaagaccatccattctccccctttattttcccgtttaactgtttgccattgaggctatttccccctggaaatgtatggctgggacaggactccctcagtcataaacttgtagcgtctcagaagacacaatgcacccgagctggtgcatgtggcccctgcgagatttgcatcacattagagatgcggctgcaggtcagatgggtggtgtggttaacgggcttagtaaagctgttttgaagaggttaacccagcttgtagtaagggtaaataaacataacaaccagccattgttccctattcagcatgtactcttatattgaaggctaaagggtattgaagctgcagagggatcaacttgtgcttgccagaggacgccaatgaagtttgaaacaccaacaatcagagattttgtttctgttcctcattaaatcatgagcttttgtgccgaga

SEQ ID NO: 1146 - DNA, 1127 bp, Artificial
  cDNA Sequence
gggaagatggcgctacgtctgctgcggagggcggcgcgcggagctgcggcggcggcgctgctgaggctgaaagcgtctctagcagctgatatccccagacttggatatagttcctcatcccatcacaagtacatcccccggagggcagtgctttatgtacctggaaatgatgaaaagaaaataaagaagattccatccctgaatgtagattgtgcagtgctcgactgtgaggatggagtggctgcaaacaaaaagaatgaagctcgactgagaattgtaaaaactcttgaagacattgatctgggccctactgaaaaatgtgtgagagtcaactcagtttccagtggtctggcggaagaagacctagagacccttttgcaatcccgggtccttccttccagcctgatgctaccaaaggtggaaagtcctgaagaaatccagtgggcagtgtgtgaagaaaccctgaaggtcgggcctcaagtaggtctctttctagatgcagtcgtttttggaggagaagactttcgagccagcataggtgcaacaagtagtaaagaaaccctggatattctctacgcccggcaaaagattgttgtcatagcgaaagcctttggtctccaagccatagatctggtgtacattgactttcgagatggagctgggctgcttagacagtcacgagaaggagccgccatgggcttcactggtaagcaggtgattcaccctaaccaaattgccgtggtccaggagcagttttctccttcccctgaaaaaattaagtgggctgaagaactgattgctgcctttaaagaacatcaacaattaggaaagggggcctttactttccaagggagtatgatcgacatgccattactgaagcaggcccagaacactgttacgcttgccacctccatcaaggaaaaatgatctgttaaatgaagctgtcatcaggtgggctgaacatatacagtggggttcttaaagacaaaccacaatactcaaagcaacttgttaggatgccagattgggacctgactccatttacagttcatgttaatcacaattttgttgttgttgtctcactggccagttattcccctaaaaaaatgaacgcttttccctttgga

SEQ ID NO: 1147 - DNA, 1169 bp, Artificial
  cDNA Sequence
atggcgctacgtctgctgcggagggcggcgcgcggagctgcggcggcggcgctgctgaggctgaaagcgtctctagcagctgatatccccagacttggatatagttcctcatcccatcacaagtacatcccccggagggcagtgctttatgtacctggaaatgatgaaaagaaaataaagaagattccatccctgaatgtagattgtgcagtgctcgactgtgaggatggagtggctgcaaacaaaaagaatgaagctcgactgagaattgtaaaaactcttgaagacattgatctgggccctactgaaaaatgtgtgagagtcaactcagtttccagtggtctggcggaagaagacctagagacccttttgcaatcccgggtccttccttccagcctgatgctaccaaaggtggaaagtcctgaagaaatccagtggtttgcagacaaattttcattccacttaaaaggccgaaaacttgaacaaccaatgaatttaatcccttttgtggaaactgcaatgggtttgctcaattttaaggcagtgtgtgaagaaaccctgaaggtcgggcctcaagtaggtctctttctagatgcagtcgtttttggaggagaagactttcgagccagcataggtgcaacaagtagtaaagaaaccctggatattctctacgcccggcaaaagattgttgtcatagcgaaagcctttggtctccaagccatagatctggtgtacattgactttcgagatggagctgggctgcttagacagtcacgagaaggagccgccatgggcttcactggtaagcaggtgattcaccctaaccaaattgccgtggtccaggagcagttttctccttcccctgaaaaaattaagtgggctgaagaactgattgctgcctttaaagaacatcaacaattaggaaagggggcctttactttccaagggagtatgatcgacatgccattactgaagcaggcccagaacactgttacgcttgccacctccatcaaggaaaaatgatctgttaaatgaagctgtcatcaggctaaagggtattgaagctgcagagggatcaacttgtgcttgccagaggacgccaatgaagtttgaaacaccaacaatcagagattttgtttctgttcctcattaaatcatgagcttttgtg

SEQ ID NO: 1148 - DNA, 712 bp, Artificial
  cDNA Sequence
aatgaagctcgactgagaattgtaaaaactcttgaagacattgatctgggccctactgaaaaatgtgtgagagtcaactcagtttccagtggtctggcggaagaagacctagagacccttttgcaatcccgggtccttccttccagcctgatgctaccaaaggtggaaagtcctgaagaaatccagtggtttgcagacaaattttcattccacttaaaaggccgaaaacttgaacaaccaatgaatttaatcccttttgtggaaactgcaatgggtttgctcaattttaaggcagtgtgtgaagaaaccctgaaggtcgggcctcaagtaggtctctttctagatgcagtcgtttttggaggagaagactttcgagccagcataggtgtcaaagacatctctctctctctttttctgtgtgtgtgtgtgtatatgtgtgtatatattttttctttgcccctcaaggatggacatttacataacaatgtatatttgccaaccatgacaatggtttttcatgacaatggaatggacactacttcctgataatttagggctcctcatagctgccctgcttctagagcactgcattattacttctgttcatttataaaagacacgagcaatagaaagcctgttgcagccccaggcatgctcaggaatatatggcatctcctttgctcctaataaatatattatgtgaacagcctca

SEQ ID NO: 1149 - DNA, 610 bp, Artificial
  cDNA Sequence
aatgaagctcgactgagaattgtaaaaactcttgaagacattgatctgggccctactgaaaaatgtgtgagagtcaactcagtttccagtggtctggcggaagaagacctagagacccttttgcaatcccgggtccttccttccagcctgatgctaccaaaggtggaaagtcctgaagaaatccagtgggcagtgtgtgaagaaaccctgaaggtcgggcctcaagtaggtctctttctagatgcagtcgtttttggaggagaagactttcgagccagcataggtgtcaaagacatctctctctctctttttctgtgtgtgtgtgtgtatatgtgtgtatatattttttctttgcccctcaaggatggacatttacataacaatgtatatttgccaaccatgacaatggtttttcatgacaatggaatggacactacttcctgataatttagggctcctcatagctgccctgcttctagagcactgcattattacttctgttcatttataaaagacacgagcaatagaaagcctgttgcagccccaggcatgctcaggaatatatggcatctcctttgctcctaataaatatattatgtgaacagcctca

SEQ ID NO: 1150 - DNA, 470 bp, Artificial
  cDNA Sequence
gaagaactgattgctgcctttaaagaacatcaacaattaggaaaggtaggtcggtattgctgctcttggctttgcattcagccttttccatcatcaccaggtcagcggtcacagagcatctcccgtgtacctggcaggtactgggtgctgggtgccaggtcctgggagtcaaagggggcctttactttccaagggagtatgatcgacatgccattactgaagcaggcccagaacactgttacgcttgccacctccatcaaggaaaaatgatctgttaaatgaagctgtcatcaggtgggctgaacatatacagtggggttcttaaagacaaaccacaatactcaaagcaacttgttaggatgccagattgggacctgactccatttacagttcatgttaatcacaattttgttgttgttgtctcactggccagttattcccctaaaaaaatgaacgcttttccctttgga

SEQ ID NO: 1151 - DNA, 386 bp, Artificial
  cDNA Sequence
ctccaagccatagatctggtgtacattgactttcgagatggagctgggctgcttagacagtcacgagaaggagccgccatgggcttcactggtaagcaggtgattcaccctaaccaaattgccgtggtccaggagcagttttctccttcccctgaaaaaattaagtgggctgaagaactgattgctgcctttaaagaacatcaacaattaggaaagggggcctttactttccaagggagtatgatcgacatgccattactgaagcaggcccagaacactgttacgcttgccacctccatcaaggaaaaatgatctgttaaatgaagctgtcatcaggaagcccgagaggtgaggagctgaggttagacaccaggagaggcaccatc

SEQ ID NO: 1152 - DNA, 695 bp, Artificial
  cDNA Sequence
aactaaacaaaacacggtaggtctcagtgtgagagagcgcttttgttcacataggaggctgacagctatttgcgatgaggggtttttgtttgtttgtttgttattcaaataacttttttccccctgaggaaactgaaagggaaaatgtcagaagtatgtgattaatgattttttaaaatagatgggatctccccggttgaattgaaaagtaggtactgaaaaagaatccatttctaaatggtagattttcatatgtaagtttgatattaattctttcaaaagagttgtgcctgtgagtcagataaatgacaggaaggtctgtctaaataccagcatcctcggaagggcagctgttcagaaacattctcaaatcatgaagataaatagaaccggaacactgatgattccatcaactgatggttccttttaatcagatcttaaagcaaagacagaagctgaaaacatttctagtaaataaaaagcaaagaactctgaatgcttagccgaccagaaccccggaaggagcccgcctggtactgccaggcatgactgcctttagtggatttaacaataaaaaagaagatggcgccaaatgaccaaactacatgcgactttcccttcccgcaagaaaagtgaataaaactttccactggggctgggggaggaggcaagggaccagtccagagagataaaat

SEQ ID NO: 1153 - DNA, 622 bp, Artificial
  cDNA Sequence
agatgaagcacccagaggaccacaatcctcggattttatgagaagaccttctgccctgcctgcccttttgagacctttatctgaaaaggaacctgcaatcctagaaaagaggtggaggcaggcttgattcagttaaggaagttctttcttctcagcaattaccacgccaattctgtggaaaagcaacatttggaagacgagagaaatccactgtaggaagtattagaaatacctgcaattaggcttcaaacaagcaaatgaggggcaggaaaagtaaatgacgacagcctgtgtcctctccatgacaccactctgcctccatggaaccactctgcccccatggatctctccagttttaagtctggggaaatctatcaatcacacaatttcagttagcattccaagaactaggggaaggcccgagtaatctattcaaagacatgcttcagaaagaacacaccgaccccatggagagttaaacctgattaccaagaagcaggatagttaggtgtttccgctatttacataatcattgtaaatataagttacagactaattacaatgataattatgacaatgagcctggcatggaggaagagtttaataaataatatttgatgaa

SEQ ID NO: 1154 - DNA, 374 bp, Artificial
  cDNA Sequence
tttgagaccagtctggccaacatagcaaaaccccatttctaccaaaaaaaaaaaaaaatttagccaggtgtggcggcgtgtacctgtagtcccagctactcaggaggctgaggtgaaaaaagttgataaagtacctgggagtagcttgatttcctataggaaatagataaatcctgtagtaatcatgattagaggggaatttattgtagcattgtagcacagtgagccattaggtgccctgataaacttctaattatagttcttcacaaatcttgaggttgtcctccaatacccacctgagaatgttttctgccactcaaatgagttggaaatatagtctatttctgctttacatttccttattgtttatctgg

SEQ ID NO: 1155 - DNA, 2406 bp, Artificial
  cDNA Sequence
ggggcgaatccccgctgggtcgagggcctgaacgggagccaatcgagcagccgaggctactgccaatcacgcggctccctccaatcccacccgtgccatttccaaaatctcggtcccactgtgcagctcaaatgtggtgttcactctgccaatcgctggaggatagagtgggaacaggaataagcagagttaagaggccaggacaaaagaagttaaagagcgcccaatacatacatgtttttgaaggcgggcagagggaataaagtccccccagtgagggtctatgggcctgattgtgtagttctgatggagccccctttgagcaagaggaacccgccagcgctgagattagcggatttggcaacggctcaggtccagccgcttcagaatatgacaggcttcccggcgctggccggcccgcccgcccactcccaactccgggccgccgtcgcgcacctccgcctgcgggacctgggcgctgaccccggcgtggccaccactccgctcggacccgagcacatggcccaggcgagcacgctgggcctcagccctccctcccaggcgttcccggcacacccggaggctccggcagccgccgcccgtgctgcagccttggtcgcgcaccccggcgcgggcagctacccctgcggcgggggcagcagtggcgcgcagccctccgcgcccccgcccccagcccctcctcttcctcccaccccttcaccccctccccctcccccgcctcctcctcctcctgccctctcgggctacaccaccaccaacagtggcggcggcggcagcagcggcaaaggccacagcagggacttcgtcctccggagggacctttccgccacggcccccgcggcggccatgcacggggccccgctcggaggggagcagcggtccggcaccggctccccccagcacccggccccgcctccccactcggccggcatgttcatctccgccagcggcacctacgcgggcccggacggcagcggcggcccggcgctcttccccgcgctgcacgacacgccgggggccccaggcggccacccgcacccgctcaacggccagatgcgcctggggctggcggcggcagcggcagccgcggcggctgagctgtacggccgcgccgaaccgcccttcgcgccgcgctctggggacgcgcactacggggcggttgcggccgcagcggcggccgccctgcacggctacggagccgtgaacttaaacctgaacctggcggctgcggcggccgcagcagcggccgggcccgggccccacctgcagcaccacgcgccgcccccggcgccgccgccgccgccggcgcccgcgcagcacccgcaccagcaccacccccacctcccaggggcggctggggccttcctgcgctacatgcggcagccaatcaagcaggagctcatctgcaagtggatcgaccccgacgagctggccgggctgccgccgccgccgccgccgccgccgccgccgccgccaccgcccccggccggcggcgccaagccctgctccaaaactttcggcaccatgcacgagctggtgaatcacgtcacggtggagcacgtgggaggccccgagcagagcagccacgtctgcttctgggaggactgtccgcgcgagggcaagcccttcaaggccaaatacaagctcatcaaccacatccgcgtgcacaccggcgagaagccctttccctgccctttccccggctgcggcaaggtcttcgcgcgctccgagaacctcaagatccacaagcgtactcatacaggggaaaagcctttcaaatgtgaatttgatggctgtgacaggaagtttgccaatagcagtgatcggaagaaacattcccatgtccacaccagtgacaagccctactactgcaagattcgaggctgtgacaaatcctacactcacccaagctccctgaggaagcacatgaagattcactgcaagtccccgccaccttctccaggaccccttggttactcatcagtggggactccagtgggcgcccccttgtcccctgtgctggacccagccaggagtcactccagcactctgtcccctcaggtgaccaacctcaatgagtggtacgtttgccaggccagtggggcccccagccacctccacaccccttccagcaacggaaccacctctgagactgaagatgaggaaatttacgggaaccctgaagttgtgcggacgatacattagaatttattattaataataataagtgaaataataagtgggagtccttggaccacatcctaacctgagacaatgccgagcctgagacaaacccgtgactcagacttgccaccgggtctaattagccctatttattcagtatgaaaccctatggtgtttgtacatttaattaatttaattaag

SEQ ID NO: 1156 - DNA, 383 bp, Artificial
  cDNA Sequence
ccccacattcctgagaaatttgaggagatggacgtcagcctggaagaaagggagaagccgttccagtgtgagtttgagggctgcgaccggcgcttcgccaacagcagcgacaggaagaagcacatgcacgtccacacctccgataagccctatctctgcaagatgtgcgacaagtcctacacgcaccccagctcgctgcggaagcacatgaaggtccatgagtcctccccgcagggctctgaatcctccccggccgccagctccggctatgagtcgtccacgcccccggggctggtgtcccccagcgccgagccccagagcagctccaacctgtccccagcggcggcggcagcggcggcggcggctgcggcggcggcggccgc

SEQ ID NO: 1157 - DNA, 473 bp, Artificial
  cDNA Sequence
tgatcttagttctgccgcagaggggatcggactggtttgagggacccagccccctcaggtccttctccctcgccgcggcccagccccctcgcagcctgagtgggggctctgcaggctctgggtgtctgcagccagcgccgatgtttgccgtccacaggggagaagccgttccagtgtgagtttgagggctgcgaccggcgcttcgccaacagcagcgacaggaagaagcacatgcacgtccacacctccgataagccctatctctgcaagatgtgcgacaagtcctacacgcaccccagctcgctgcggaagcacatgaaggtccatgagtcctccccgcagggctctgaatcctccccggccgccagctccggctatgagtcgtccacgcccccggggctggtgtcccccagcgccgagccccagagcagctccaacctgtccccagcggcggcggcagcggcggcggcggc

SEQ ID NO: 1158 - DNA, 2707 bp, Artificial
  cDNA Sequence
cgcaggggcgggcgggcgcgctggccatgctcctggacgcgggtccgcagttcccggccatcggggtgggcagcttcgcgcgccaccatcaccactccgccgcggcggcggcggcggctgccgccgagatgcaggaccgtgaactgagcctggcggcggcgcagaacggcttcgttgactccgccgccgcgcacatgggagccttcaagctcaacccgggcgcgcacgagctgtccccgggccagagctcggcgttcacgtcgcagggccccggcgcctaccccggctccgctgcggctgccgctgcggccgcagcgctcgggccccacgccgcgcacgttggctcctactctgggccgcccttcaactccacccgggacttcctgttccgcagccgcggcttcggggactcggcgccgggcggcgggcagcacgggctgttcgggccgggcgcgggcggcctgcaccacgcgcactcggacgcgcagggccacctcctcttcccgggcctgccagagcagcacgggccgcacggctcgcagaatgtgctcaacgggcagatgcgcctcgggctgcccggcgaggtgttcgggcgctcggagcaataccgccaggtggccagcccgcggaccgacccctactcggcggcgcaactccacaaccagtacggccccatgaatatgaacatgggtatgaacatggcagcagccgcggcccaccaccaccaccaccaccaccaccaccccggtgcctttttccgctatatgcggcagcagtgcatcaagcaggagctaatctgcaagtggatcgaccccgagcaactgagcaatcccaagaagagctgcaacaaaactttcagcaccatgcacgagctggtgacacacgtctcggtggagcacgtcggcggcccggagcagagcaaccacgtctgcttctgggaggagtgtccgcgcgagggcaagcccttcaaggccaaatacaaactggtcaaccacatccgcgtgcacacaggcgagaaacccttcccctgccccttcccgggctgtggcaaagtcttcgcgcgctccgagaacctcaagatccacaaaaggacccacacaggggagaagccgttccagtgtgagtttgagggctgcgaccggcgcttcgccaacagcagcgacaggaagaagcacatgcacgtccacacctccgataagccctatctctgcaagatgtgcgacaagtcctacacgcaccccagctcgctgcggaagcacatgaaggtccatgagtcctccccgcagggctctgaatcctccccggccgccagctccggctatgagtcgtccacgcccccggggctggtgtcccccagcgccgagccccagagcagctccaacctgtccccagcggcggcggcagcggcggcggcggctgcggcggcggcggccgcggtgtccgcggtgcaccggggcggaggctcgggcagtggcggcgcgggaggcggctcaggcggcggcagcggcagtggcgggggcggcggcggggcgggcggcgggggcggcggcagctctggcgggggcagcgggacagccgggggtcacagcggcctctcctccaacttcaatgaatggtacgtgtgacgggtcggggcctctctccctctccctgtccccaccccagcgcagcagccctccccgcagctagcagcgagggcaccttgtgatcatgttgttaaaattatgaatctgatttttatgatgatgaaaattttaccagcagaaggattttttaaagttttttttttttttttaataataatctaggcatgaagagcaaaaatatcccttccggagtctttgaagctgaaaatataaaacaaataaaaaataaaaaaataaaaacccacaaaaatgttgaaccaaacctccctgctaatctccatgcccacgttctttcccaccctgttcccagtcttctgacaaactgtgtacatagcggactcctcctttctcctccgaggtggttttaaaggctttttggtgtatagaagtttgtccatttgtaaaactccggattgcgttcctccccgccttccgccccttcccttccctaaagtgatgggctttctcttttctctttttagtttacccggtttctttttaagtaatgtggaagaaaatggtttattttgtattgtggtattgaatattgtgttcctttttatgaggcaacctgattgtaaacttcatgtaactatagactggaaaaaatgagccgtgccaaagtctcccttctgtttcttcagcacattgacccatagcacacacatacacaccaccaccaacaacgcttgtgaatgtatttttctgttagctgggtttacatgtgatgttttagtgcttttgcaagttcaatttgttagttcctgtatgaaagattgtgggggaaaaataaacgtcgtgccgttagctttttccgtaataacacccttccttctgtaaatacccgttaccatatttatccatttgtaattaaattatggtattaacttgctacagaggaaacaatatttataaagaatgtttcttaactataaatatgtacaattgtgggcataaactgtttcagattttttatttgaaggttttaagtggtttgatcatttcttgtgatgttttgagagtaatgcatacagaaatataataaaatgtgttgaaactgc

SEQ ID NO: 1159 - DNA, 455 bp, Artificial
  cDNA Sequence
tgaaaggctttgctgactcccccaaccctcgcccaccagcttgtgcctctccgcagtcactagatgctgccttatctctaatatttaccttttcttcaacttatttttttaaagacgggaggggagaagccgttccagtgtgagtttgagggctgcgaccggcgcttcgccaacagcagcgacaggaagaagcacatgcacgtccacacctccgataagccctatctctgcaagatgtgcgacaagtcctacacgcaccccagctcgctgcggaagcacatgaaggtccatgagtcctccccgcagggctctgaatcctccccggccgccagctccggctatgagtcgtccacgcccccggggctggtgtcccccagcgccgagccccagagcagctccaacctgtccccagcggcggcggcagcggcggcggcggctgcggcggcggcggccgc

SEQ ID NO: 1160 - DNA, 218 bp, Artificial
  cDNA Sequence
gtgtccgcggtgcaccggggcggaggctcgggcagtggcggcgcgggaggcggctcaggcggcggcagcggcagtggcgggggcggcggcggggcgggcggcgggggcggcggcagctctggcgggggcagcgggacagccgggggtcacagcggcctctcctccaacttcaatgaatggcatgaagagcaaaaatatcccttccggagtctttgaag

SEQ ID NO: 1161 - DNA, 406 bp, Artificial
  cDNA Sequence
gtccttaagtatgggctgcagcaggttagtggctatggtggcctccatgtctatctgtggattttcttcagggcaaattatatgagggttggtgcactggtggggaaagaaaaatatggaaacaaataccatgaagacaacaatcaattttttggccatcaccaatgatttatagatgctgctgaaattaatggcaaaacacaatctgggatgtgaatgagagcacggtacctcccaaatggcacaggtggtttcactgtatgactgctgattctccaaaaacaaaatgacccactcctcttaaattcatttagacaaaccctaaattcaaaatccagaacagtattaccttattctactactagaaagaagatacagaagtgagtctcaccttcagcactttaca

SEQ ID NO: 1162 - DNA, 1306 bp, Artificial
  cDNA Sequence
gtgtggcatttgggccctctttggcagcaatgatagcctctctggtcagcatccgagtgctatgaagatcacacacgggtccagatgcatttcgtcctgagaatgtcaatggatacatcagctgctgctttggatttcaccagttggtcgtagttgaccagctgtttggaatccagccaattcaagtgaggaaatatcttcatttgtggctctgttgcagtggtgaaatttacaaccacaagaaggtataataccattttgaatttgattacaaggccagagtggatggtgacataatccttcatctttatgacaaaggagggactgggcagaaaatgtgtatgttgggctgagtgtttgcatttattttattaaatactgtcaataagaaagtattcctgggcagaaacacctacctagagagtcatcactgtagagattaacctctgcatgccctctataacagtgtggagaaacagttttgagatagaaactgtgaagagcaacctctggattccttttgacagtgctattaagaaacgactgatgacagagaaaaggcttggattccagcttcgttgctgccattctgttgatgcagctgaaagagtcccaagtgtaagacactctctagacatttgcgattggcatgaaatcagtcccaatgtactggctgctagaaaggtggaaaatcatattgaaagtgaacaccactctgaggaaggcattcaggtcctggatgaaataatattttccttggaaatttaagacataacaatagttcacacttcagtaggtaggtttgtaatttcccagtatatttggaagaacacagatatcatagtgatcttctctagagaacgttcggatgaaattacacagggttacatatatttttacaagactcctcctcaggaaaaagccaaggagcagagtcaggggcttctgaaggactctttgttttatgtagtgtgtgcagattgaactgctgctgcctgtgaccttgaactgagagtctaattcctggatcatctgttttcttcttattgcctctggcaccagaaataagaattctgaagactgggataggaaaacatctcctgataaagatatttgagtactatacctgatacctaaagaaattctctggccaaaagaagccttcagtgatgggataacttagttaagaatttctgttttagggttttacagaaatatactgaacatcaggttgatgacataatgatggcaactgcaacacaaaaattttccttcagtattcttaaaactaaataaggctattaca

SEQ ID NO: 1163 - DNA, 2497 bp, Artificial
  cDNA Sequence
gtgagaggtcagcagaggggcggtctgcggggacaacaatggcggggttctgggtcgggacagcaccgctggtcgctgccggacggcgtgggcggtggccgccgcagcagctgatgctgagcgcggcgctgcggaccctgaagcatgttctgtactattcaagacagtgcttaatggtgtcccgtaatcttggttcagtgggatatgatcctaatgaaaaaacttttgataaaattcttgttgctaatagaggagaaattgcatgtcgggttattagaacttgcaagaagatgggcattaagacagttgccatccacagtgatgttgatgctagttctgttcatgtgaaaatggcggatgaggctgtctgtgttggcccagctcccaccagtaaaagctacctcaacatggatgccatcatggaagccattaagaaaaccagggcccaagctgtacatccaggttatggattcctttcagaaaacaaagaatttgccagatgtttggcagcagaagatgtcgttttcattggacctgacacacatgctattcaagccatgggcgacaagattgaaagcaaattattagctaagaaagcagaggttaatacaatccctggctttgatggagtagtcaaggatgcagaagaagctgtcagaattgcaagggaaattggctaccctgtcatgatcaaggcctcagcaggtggtggtgggaaaggcatgcgcattgcttgggatgatgaagagaccagggatggttttagattgtcatctcaagaagctgcttctagttttggcgatgatagactactaatagaaaaatttattgataatcctcgtcatatagaaatccaggttcaggttctaggtgataaacatgggaatgctttatggcttaatgaaagagagtgctcaattcagagaagaaatcagaaggtggtggaggaagcaccaagcatttttttggatgcggagactcgaagagcgatgggagaacaagctgtagctcttgccagagcagtaaaatattcctctgctgggaccgtggagttccttgtggactctaagaagaatttttatttcttggaaatgaatacaagactccaggttgagcatcctgtcacagaatgcattactggcctggacctagtccaggaaatgatccgtgttgctaagggctaccctctcaggcacaaacaagctgatattcgcatcaacggctgggcagttgaatgtcgggtttatgctgaggacccctacaagtcttttggtttaccatctattgggagattgtctcagtaccaagaaccgttacatctacctggtgtccgagtggacagtggcatccaaccaggaagtgatattagcatttattatgatcctatgatttcaaaactaatcacatatggctctgatagaactgaggcactgaagagaatggcagatgcactggataactatgttattcgaggtgttacacataatattgcattacttcgagaggtgataatcaactcacgctttgtaaaaggagacatcagcactaaatttctctccgatgtgtatcctgatggcttcaaaggacacatgctaaccaagagtgagaagaaccagttattggcaatagcatcatcattgtttgtggcattccagttaagagcacaacattttcaagaaaattcaagaatgcctgttattaaaccagacatagccaactgggagctctcagtaaaattgcatgataaagttcataccgtagtagcatcaaacaatgggtcagtgttctcggtggaagttgatgggtcgaaactaaatgtgaccagcacgtggaacctggcttcgcccttattgtctgtcagcgttgatggcactcagaggactgtccagtgtctttctcgagaagcaggtggaaacatgagcattcagtttcttggtacagtgtacaaggtgaatatcttaaccagacttgccgcagaattgaacaaatttatgctggaaaaagtgactgaggacacaagcagtgttctgcgttccccgatgcccggagtggtggtggccgtctctgtcaagcctggagacgcggtagcagaaggtcaagaaatttgtgtgattgaagccatgaaaatgcagaatagtatgacagctgggaaaactggcacggtgaaatctgtgcactgtcaagctggagacacagttggagaaggggatctgctcgtggagctggaatgaaggatttataacctttcagtcatcacccaatttaattagccatttgcatgatgctttcacacacaattgattcaagcattatacaggaacacccctgtgcagctacgtttacgtcgtcatttattccacagagtcaagaccaatattctgccaaaaaatcaccaatggaaattttcattgatataaatacttgtacatatgatttgtacttctgctgtgagattccctagtgtcaaaattaaatcaataaaactgagcatttgtct

SEQ ID NO: 1164 - DNA, 418 bp, Artificial
  cDNA Sequence
agaacatcagtttatgtcctgaaatatgttttcagaaaatagaaagccaagtatatttcgtccgagtggacagtggcatccaaccaggaagtgatattagcatttattatgatcctatgatttcaaaactaatcacatatggctctgatagaactgaggcactgaagagaatggcagatgcactggataactatgttattcgaggtgttacacataatattgcattacttcgagaggtgataatcaactcacgctttgtaaaaggagacatcagcactaaatttctctccgatgtgtatcctgatggcttcaaaggacacatgctaaccaagagtgagaagaaccagttattggcaatagcatcatcattgtttgtggcattccagttaagagcacaacattttcaagaaaattcaag

SEQ ID NO: 1165 - DNA, 447 bp, Artificial
  cDNA Sequence
ggaggaatctacttttaccatggaaggaaaggtgttacacataatattgcattacttcgagaggtgataatcaactcacgctttgtaaaaggagacatcagcactaaatttctctccgatgtgtatcctgatggcttcaaaggacacatgctaaccaagagtgagaagaaccagttattggcaatagcatcatcattgtttgtggcattccagttaagagcacaacattttcaagaaaattcaagaatgcctgttattaaaccagacatagccaactgggagctctcagtaaaattgcatgataaagttcataccgtagtagcatcaaacaatgggtcagtgttctcggtggaagttgatgggtcgaaactaaatgtgaccagcacgtggaacctggcttcgcccttattgtctgtcagcgttgatggcactcagaggactgtccag

SEQ ID NO: 1166 - DNA, 669 bp, Artificial
  cDNA Sequence
aatgcctgttattaaaccagacatagccaactgggagctctcagtaaaattgcatgataaagttcataccgtagtagcatcaaacaatgggtcagtgttctcggtggaagttgatgggtcgaaactaaatgtgaccagcacgtggaacctggcttcgcccttattgtctgtcagcgttgatggcactcagaggactgtccagtgtctttctcgagaagcaggtggaaacatgagcattcagtttcttggtacagtggtagcagaaggtcaagaaatttgtgtgattgaagccatgaaaatgcagaatagtatgacagctgggaaaactggcacggtgaaatctgtgcactgtcaagctggagacacagttggagaaggggatctgctcgtggagctggaatgaaggatttataacctttcagtcatcacccaatttaattagccatttgcatgatgctttcacacacaattgattcaagcattatacaggaacacccctgtgcagctacgtttacgtcgtcatttattccacagagtcaagaccaatattctgccaaaaaatcaccaatggaaattttcattgatataaatacttgtacatatgatttgtacttctgctgtgagattccctagtgtcaaaattaaatcaataaaactgagcatttgtct

SEQ ID NO: 1167 - DNA, 397 bp, Artificial
  cDNA Sequence
caactgggagctctcagtaaaattgcatgataaagttcataccgtagtagcatcaaacaatgggtcagtgttctcggtggaagttgatgggtcgaaactaaatgtgaccagcacgtggaacctggcttcgcccttattgtctgtcagcgttgatggcactcagaggactgtccagtgtctttctcgagaagcaggtggaaacatgagcattcagtttcttggtacagtgccctggagaaagcttctggattgactgtgagaagcttggcagaaggtgctgcggcctggtggctggctcagcaggaggcctgggattgaaagctctcggtttgtacaagctcttttggatttgtaacacttttattttaaatctccaataaatgtaaatattttggtc

SEQ ID NO: 1168 - DNA, 1789 bp, Artificial
  cDNA Sequence
tgcagttggctttcctttaaccttttagtctttcagggtaattttctttctttttttttttgagactcccaacaagtttattattttttaaattgtggtaaaatgcttataaggaaacttgccatcttaactatttttaagtgtacagttcagtggcattaagtacattcacattgttgtgcagccatcactataatctatctccagaactctcttcatattccaaactgaaactctgtacccatttaacagtaactccccattccaggctcgccacagtctctggcaaccactattctactttcaggataattttcattggttagtaatgtttggataatttgattagatttggtggatactgaagactggccgggttatgtaagctgttgctactttcagccaaggagtgcatctagtccgtattacatcatccttggagtgttctacccagtgtcttgcattgaaggacatcagaaggaaaactcctgtattctcagtcgtggctttaatttgtgcctggtgctgacctgatgctgtgcagggacactcactgcatccctccattcagtccctctaattatcccaacttcctggggagcttgcttagaactgggcatgagtgctctttattaaaatattgggctaccctggctacatgtaacaaggttcatgtgaaaatggcggatgaggctgtctgtgttggcccagctcccaccagtaaaagctacctcaacatggatgccatcatggaagccattaagaaaaccagggcccaagctgtacatccaggttatggattcctttcagaaaacaaagaatttgccagatgtttggcttcttttattatgagcattaaaggaccatccatgggagactatgaggattgttaggatgaggcaaagacatcttaacagagtttacaaagagctttgaaacgtgaaactaccttctctggaaaaatgggatgttggcttgaagatatttcttagtattctgtgttttctttctggtttttctatgttgttttaatcatattatcataccttgtcatttcaggtaacatagcataagttatagtaattagtttcaagagaaacatatgttagaatttgtgttttgtgtttggatcctatctgtgtacttgaaagatacacgtatatgtagatggatagtgagttccatcaggatgctcagcgttgaaagcataggagggaactgtgctgagcgtgtgaggtttggcgattgtgctcttttatcttctttctttcttgagtttttagcaagataagacatgtaactactgtaaaatgagaggtaatttttaaaatagccactgggttaaccaaaaaccttttaaatagctgtggcatccagtgtgggcaagggtcacatagttttgttcctggaagtgtaaattgtttcagacctcccccggcccccagaaatttgctagtatttatcaaaatttaaaacatctatatgttctttaatttaacagttccacccttaagaatctcacttacaaagatatacttgagaaaatgttcatggtaaggtgtttcataatagcaaaatttagaaagtgttcaaaagtaaaatgtggagaatggtggcttccctgcagggtcattggtcctcagttacaaggctgcagtccatgatgtgttatagtttaaagtgtgttgtaagcactttgtaactaatactaaaattctgaagttagcaagtttgccagtgactttgtttaacaatttttttgtttataaaataaagtggattaaaaatg

SEQ ID NO: 1169 - DNA, 602 bp, Artificial
  cDNA Sequence
tacaaggtgaatatcttaaccagacttgccgcagaattgaacaaatttatgctggaaaaagtgactgaggacacaagcagtgttctgcgttccccgatgcccggagtggtggtggccgtctctgtcaagcctggagacgcggcaacctcgagtctgtctgtagagatctgcctattctggacatttcaggtagcagaaggtcaagaaatttgtgtgattgaagccatgaaaatgcagaatagtatgacagctgggaaaactggcacggtgaaatctgtgcactgtcaagctggagacacagttggagaaggggatctgctcgtggagctggaatgaaggatttataacctttcagtcatcacccaatttaattagccatttgcatgatgctttcacacacaattgattcaagcattatacaggaacacccctgtgcagctacgtttacgtcgtcatttattccacagagtcaagaccaatattctgccaaaaaatcaccaatggaaattttcattgatataaatacttgtacatatgatttgtacttctgctgtgagattccctagtgtcaaaattaaatcaataaaactgagcatttgtct

SEQ ID NO: 1170 - DNA, 576 bp, Artificial
  cDNA Sequence
ggtgcatacgagtacatccaggagctacggagaaagcagcagtctgatgtcatgcgctttcttctgagggtccgctgctggcagtaccgccagctctctgctctccacagggctctccgccccacccagcctgataaagcgcgctgactgggctgcgaggccaagcaaggttacgttatatataggattcgtgtttgccgtggtggccgaaaacgcccagttcctaagggtgcaacttatggcaagcctgtccatcatggtgttaaccagctaaagtttgctccaagccttcagtccgttgcagaggagcaagctggacgccactgtggggctttgagagtcctgaattcttactgggttggtgaagattccacatacaaattttttgaggttatcctcactgatccattccataaagctatcagaagaaatcctgacacctaatggatcaccaaatcagtccacagcacagggagatgtgtgggctgacatctgcaggccaaaagagccctggcccttggaaacggccgtaagttccaccacactattggtggttctcgccggggagcttggaga

SEQ ID NO: 1171 - DNA, 474 bp, Artificial
  cDNA Sequence
gaaacacagtactcaataaatgtggtattttcttattcactgaatttccaacaggaattagaaactccacatctaacttagttgccttgaggaagcagctatggcaaccagaaagttcccaggatcctgtctcctaaagctgaagcctaatcgactgcagggggcctttctgtgggaagataacagcagcgcagaggcaaagaaaagggaaggcacggcggtggcccttgtggggcgttctgggagaagagattaattcaccaagtccctgcgcggcacagcaggattacggggcttttacaaaactgaagacaaaatgaagagcagcagcttctagaataaggccaagcaccaaattgaagactcggtggagactatcacttcagatgatagcatgtctccaagcaagacaaatgaaagggaaaatgaagcaaagggagagtggggagctacaataaaaaccgagctattctt

SEQ ID NO: 1172 - DNA, 346 bp, Artificial
  cDNA Sequence
agaaaaaaaaaagtatgctgagattgctaagatctacacctaatgaggaggtgactatcatgaaggtctggtggtgaagatcttgcaagaaggtgccttgtttgagatctttcaaggaaacacagtactcaataaatgtggttcggtgtacagttgagccttgagcaacatggatttgaactgcatggggccacttaaatgtgcattttcttatgactccgctgctcttgagacagcaagatcaagccccctcctcctcagccaactcaacgtgaagacaatgaagatcaagatctttaagatgatccacttccacttaatgaataataaatatattttgtcgtta

SEQ ID NO: 1173 - DNA, 356 bp, Artificial
  cDNA Sequence
gctaagtgccgagctgaaatggaaaaggcattaaagcctaatgaggaggtgactatcatgaaggtctggtggtgaagatcttgcaagaaggtgccttgtttgagatctttcaaggaaacacagtactcaataaatgtggttcggtgtacagttgagccttgagcaacatggatttgaactgcatggggccacttaaatgtgcattttcttatgactccgctgctcttgagacagcaagatcaagccccctcctcctcagccaactcaacgtgaagacaatgaagatcaagatctttaagatgatccacttccacttaatgaataataaatatattttgtcgttatgattttcctaa

SEQ ID NO: 1174 - DNA, 498 bp, Artificial
  cDNA Sequence
gagacagaagtgtcactctctccatagctgtaccattcctaccacctggcccccaagtggcattgctttaacccattgtctctagggaaaatgttctctttcgattttggttctcagtcctataatttctggggcttaaattagtcctggagctagggaagaggtgatgtcatccttccattgtctccttcggccacagtttcattttaagagtattggactgaaaactggatatttggtccccatggactttctggtcaccctgtgaagtggacttaactttttcttgaatcatgtggaaggattctgaagtcaaaagtttttaagactctcaggcttactgtggatctggattctaaggcaacacttccttgaagaaacaagcttacagctctgcccggatggccctagtcttcgtgtacggcaccctgaagcggggtcagcccaaccacagggtcctgcgggacggcgcccacggctccgcagcctttcgggcgc

SEQ ID NO: 1175 - DNA, 296 bp, Artificial
  cDNA Sequence
ggggaaacaccagaaggtgtgggtgctgagctccgctgcgtcagactgccaggacctgagtggaactcagtgctgaaacctgggttctcactgcagctggatagcagatcagcagctctagagggtggcggccttgcctggaacctccgcaacctccgcgcccaccacacaagggctgagaacagtaagctctgcccggatggccctagtcttcgtgtacggcaccctgaagcggggtcagcccaaccacagggtcctgcgggacggcgcccacggctccgcagcctttcgggcgc

SEQ ID NO: 1176 - DNA, 455 bp, Artificial
  cDNA Sequence
gtgtgggtgctgagctccgctgcgtcagactgccaggacctgagtggaactcagtgctgaaacctgggttctcactgcagctggatagcaggtggttacaaaattatatgtatttttagggttatttctaatttttctttaatagttattggcaattttcaaagtcctttaagaaacactgaaaactgctcaagaaaatggcagttctgcagggctcaggtagcagggcaggctgttgggacaggtttgacagactgtcctaatacaaggagcgccttttcccagatcagcagctctagagggtggcggccttgcctggaacctccgcaacctccgcgcccaccacacaagggctgagaacagtaagctctgcccggatggccctagtcttcgtgtacggcaccctgaagcggggtcagcccaaccacagggtcctgcgggacggcgcccacggc

SEQ ID NO: 1177 - DNA, 1440 bp, Artificial
  cDNA Sequence
gactgaaaactggatatttggtccccatggactttctggtcaccctgtgaagtggacttaactttttcttgaatcatgtggaaggattctgaagtcaaaagtttttaagactctcaggcttactgtggatctggattctaaggcaacacttccttgaagaaacaagcttacagtctgtggcccagacccaggcaagtggtaaatatttaccttcacgctggagccaagatcgctgcggggagtcccgtgaagcaccactgccctctaagaccttggaaggggaaacaccagaaggtgtgggtgctgagctccgctgcgtcagactgccaggacctgagtggaactcagtgctgaaacctgggttctcactgcagctggatagcagctctgcccggatggccctagtcttcgtgtacggcaccctgaagcggggtcagcccaaccacagggtcctgcgggacggcgcccacggctccgcagcctttcgggcgcgcggccgcacgctggagccctacccgttggtgatcgcgggggagcacaacatcccgtggctgctgcacctgcccggctcggggcgcctcgtggagggcgaggtctacgcggtagacgagcggatgctgcgctttctggatgacttcgagagttgcccggccctgtaccagcgcacggtgctgcgggtacagctgctggaggaccgggccccgggcgcagaggagccgccagcgcccaccgcggtgcagtgcttcgtgtacagcagggccaccttcccgccggagtgggcccagctcccgcaccatgacagctacgactccgaggggccgcacgggctgcgctacaacccccgggagaacagataagggggacgggcagggtgggcctaggtttgagagccctggggctccaagatgcgcccagcccatgctgggtgaaggcggaagccgaacagggccctttccaatgaatctgccggaaaggaaccaatctttcagtggcagctgattttacaaataatgttgagatacgaatagcaaggtgcttccctcccatctttctacctggtaagaaaaatttaggattttaactcccctaaatgacatttagagaactcgtgttatgcctaattcttcttcctcctcgtgttgtttctgctgttggctctgctttgagctcaagataataataaatatttaggatcagtgtaaagacttggtgttgccgctagattttagcagccctactatactgattctggcctgtaacccctgagaaagccgattttacacggctgggtagaatttgtagaaaagatccacagggcaagcatgctgtatatcagagtgcgtatagcaccattcttcctaattttcagatcaagcttcacagcaaatattaaagattatttaaatttgaagtcgatgttttgggaaatcagatataaaa

SEQ ID NO: 1178 - DNA, 393 bp, Artificial
  cDNA Sequence
tgagcccgggcgggggtcggggctgcgcctgctccgccccccaggcggggtgtcctggcgcccgcgggaacctggggcgtcgctccctgcgcggcgtccgggtcgaggccgcagcactcggcgtccccgcgggactgaaaactggatatttggtccccatggactttctggtcaccctgtgaagtggacttaactttttcttgaatcatgtggaaggattctgaagtcaaaagtttttaagactctcaggcttactgtggatctggattctaaggcaacacttccttgaagaaacaagcttacagctctgcccggatggccctagtcttcgtgtacggcaccctgaagcggggtcagcccaaccacagggtcctgcgggacggcgcccacggc

SEQ ID NO: 1179 - DNA, 790 bp, Artificial
  cDNA Sequence
ggcagagtaagaccaggtgccaatccccgaggtgtgtttctgctgctcttatacaccgaggcagacccatcagcttttgagtgttaattacctcttcctgctgttgtcatctgtacttgggagtacgaggcagaaataagctatcatcttctgcagaagacaattactgaactgattttccagagttggaattaaccttctgtggcctaatcaccttcatttctacttgaatccccggaatagtgaaaacaatgaccattgcgtgctgagtacctgctctgtcctggcatcttacaactctgttccaaagtctgtgctgcttccataggactgttctcacttctttccattttgcaagttctcagcctggcggcagtctccctgcccgagtggatggtgccaccacctcttactgaaggagcggtttctgagggagagtgcctgtgctgtgcagctgtctcccgcgaggcgccctttgacaagtgtgtcttctgtctcccctcaatgacactgtggcttcatggagtctcattgcatgcccagcacttagcacagggcatccctgcatggctgcgttgttccctgcatggctgcatttaggctttccttttcctgcaagtgctgcctcgtctttcctttctctcgtctcagcagcaggaagagcaagttctttctctgcctccccgctgcctggctccttcagctatcaccagccatcccctctacccagccctcactctggtgccacaattgctactttcctggcttcttcacggggacctgacatacc

SEQ ID NO: 1180 - DNA, 459 bp, Artificial
  cDNA Sequence
ctctctctccggtccgtgcctccaagatgacaaagaaaagaaggaacaatggtcgtgccaaaaagggccgcggccacgtgcagcctattcgctgcactaactgtgcccgatgcgtgcccaaggacaacgccattaagaaattcgtcattcgaaacatagtggaggccgcagcagtcagggacatttctgaagcgagcgtcttcgatgcctatgtgcttcccaagctgtatgtgaagctacattactgtgtgagttgtgcaattcacagcaaagtagtcaggaatcgatctcgtgaagcccgcaaggaccgaacacccccacctcgatttagacctgcgggtgctgccccacgtcccccaccaaagcccatgtaaggagctgagttcttaaagactgaagacaggctattctctggagaaaaataaaatggaaattgtacttaaaaaaaaaaaaaaaaaa

SEQ ID NO: 1181 - DNA, 3723 bp, Artificial
  cDNA Sequence
gactggtgctggggggcgcccgcgcgcgtggggagctgcgggaggcgcggcgcggggggggtcgggtgcgcggcgggcggcccctccccctgccaggtccgggcgggtgcctggagccgccagagtttccgcacccgggagggagatgcggccggggctcaggctccttgcagttgtaatttagattcgagaagtggtttatcctttgactggaaaagaaaagtagctgcagtattcccccagcacttgctgagagcatgccgtatgccaggctgtgaggctcgagagacaagcagtggaagagttgcggcctgtttcatctctggattgtaaatctgagcctccttctggcccctggaaggggacagcatcaccatggaatgattcctaaccagcataatgctggagccgggagccaccaacctgcagttttcagaatggccgtgttggacactgatttggatcacattcttccatcttctgttcttcctccattctgggctaagttagtagtgggatcggttgccattgtgtgttttgcacgcagctatgatggagactttgtctttgatgactcagaagctattgttaacaataaggacctccaagcagaaacgcccctgggggacctgtggcatcatgacttctggggcagtagactgagcagcaacaccagccacaagtcctaccggcctctcaccgtcctgactttcaggattaactactacctctcgggaggcttccaccccgtgggctttcacgtggtcaacatcctcctgcacagtggcatctctgtcctcatggtggacgtcttctcggttctgtttggcggcctgcagtacaccagtaaaggccggaggctgcacctcgcccccagggcgtccctgctggccgcgctgctgtttgctgtccatcctgtgcacaccgagtgtgttgctggtgttgtcggccgtgcagacctcctgtgtgccctgttcttcttgttatctttccttggctactgtaaagcatttagagaaagtaacaaggagggagcgcattcttccaccttctgggtgctgctgagtatctttctgggagcagtggccatgctgtgcaaagagcaagggatcactgtgctgggtttaaatgcggtatttgacatcttggtgataggcaaattcaatgttctggaaattgtccagaaggtactacataaggacaagtcattagagaatctcggcatgctcaggaacgggggcctcctcttcagaatgaccctgctcacctctggaggggctgggatgctctacgtgcgctggaggatcatgggcacgggcccgccggccttcaccgaggtggacaacccggcctcctttgctgacagcatgctggtgagggccgtaaactacaattactactattcattgaatgcctggctgctgctgtgtccctggtggctgtgttttgattggtcaatgggctgcatccccctcattaagtccatcagcgactggagggtaattgcacttgcagcactctggttctgcctaattggcctgatatgccaagccctgtgctctgaagacggccacaagagaaggatccttactctgggcctgggatttctcgttatcccatttctccccgcgagtaacctgttcttccgagtgggcttcgtggtcgcagagcgtgtcctctacctccccagcgttgggtactgtgtgctgctgacttttggattcggagccctgagcaaacataccaagaaaaagaaactcattgccgctgtcgtgctgggaatcttattcatcaacacgctgagatgtgtgctgcgcagcggcgagtggcggagtgaggaacagcttttcagaagtgctctgtctgtgtgtcccctcaatgctaaggttcactacaacattggcaaaaacctggctgataaaggcaaccagacagctgccatcagatactaccgggaagctgtaagattaaatcccaagtatgttcatgccatgaataatcttggaaatatcttaaaagaaaggaatgagctacaggaagctgaggagctgctgtctttggctgttcaaatacagccagactttgccgctgcgtggatgaatctaggcatagtgcagaatagcctgaaacggtttgaagcagcagagcaaagttaccggacagcaattaaacacagaaggaaatacccagactgttactacaacctcgggcgtctgtatgcagatctcaatcgccacgtggatgccttgaatgcgtggagaaatgccaccgtgctgaaaccagagcacagcctggcctggaacaacatgattatactcctcgacaatacaggtaatttagcccaagctgaagcagttggaagagaggcactggaattaatacctaatgatcactctctcatgttctcgttggcaaacgtgctggggaaatcccagaaatacaaggaatctgaagctttattcctcaaggcaattaaagcaaatccaaatgctgcaagttaccatggtaatttggctgtgctttatcatcgttggggacatctagacttggccaagaaacactatgaaatctccttgcagcttgaccccacggcatcaggaactaaggagaattacggtctgctgagaagaaagctagaactaatgcaaaagaaagctgtctgatcctgtttccttcatgttttgagtttgagtgtgtgtgtgcatgaggcatatcattaatagtatgtggttacatttaaccatttaaaagtcttagacatgttattttactgatttttttctatgaaaacaaagacatgcaaaaagattatagcaccagcaatatactcttgaatgcgtgatatgatttttcattgaaattgtattttttcagacaactcaaatgtaattctaaaattccaaaaatgtcttttttaattaaacagaaaaagagaaaaaattatcttgagcaacttttagtagaattgagcttacatttgggatctgagccttgtcgtgtatggactagcactattaaacttcaattatgaccaagaaaggatacactggcccctacaatttgtataaatattgaacatgtctatatattagcatttttatttaatgacaaagcaaattaagtttttttatctcttttttttaaaacaacatactgtgaactttgtaaggaaatatttatttgtatttttatgttttgaatagggcaaataatcgaatgaggaatggaagttttaacatagtatatctatatgcttttccccataggaagaaattgactcttgcagtttttggatgctctgacttgtgcaatttcaatacacaggagattatgtaatgtaatattttacataagcggttactatcaattgaaagttcaagccatgctttaggcaagagcaggcagcctcacatctttatttttgttacatccaaggtgaagagggcaacacatctgtgtaagctgctttttagtgtgtttatctgaaggccgttttccattttgcttaatgtaactacagacattatccagaaaatgcaaaattttctatcaaatggagccacattcggggaattcgtggtatttttaagaattgagttgttcctgctgttttttatttgatccaaacaatgttttgttttgttcttctctgtatgctgttgacctaatgatttatgcaatctctgtaatttcttatgcagtaaaattactacacaaactagc

SEQ ID NO: 1182 - DNA, 3342 bp, Artificial
  cDNA Sequence
gactggtgctggggggcgcccgcgcgcgtggggagctgcgggaggcgcggcgcggggggggtcgggtgcgcggcgggcggcccctccccctgccaggtccgggcgggtgcctggagccgccagagtttccgcacccgggagggagatgcggccggggctcaggctccttgcagattcctaaccagcataatgctggagccgggagccaccaacctgcagttttcagaatggccgtgttggacactgatttggatcacattcttccatcttctgttcttcctccattctgggctaagttagtagtgggatcggttgccattgtgtgttttgcacgcagctatgatggagactttgtctttgatgactcagaagctattgttaacaataaggacctccaagcagaaacgcccctgggggacctgtggcatcatgacttctggggcagtagactgagcaggtacaccagtaaaggccggaggctgcacctcgcccccagggcgtccctgctggccgcgctgctgtttgctgtccatcctgtgcacaccgagtgtgttgctggtgttgtcggccgtgcagacctcctgtgtgccctgttcttcttgttatctttccttggctactgtaaagcatttagagaaagtaacaaggagggagcgcattcttccaccttctgggtgctgctgagtatctttctgggagcagtggccatgctgtgcaaagagcaagggatcactgtgctgggtttaaatgcggtatttgacatcttggtgataggcaaattcaatgttctggaaattgtccagaaggtactacataaggacaagtcattagagaatctcggcatgctcaggaacgggggcctcctcttcagaatgaccctgctcacctctggaggggctgggatgctctacgtgcgctggaggatcatgggcacgggcccgccggccttcaccgaggtggacaacccggcctcctttgctgacagcatgctggtgagggccgtaaactacaattactactattcattgaatgcctggctgctgctgtgtccctggtggctgtgttttgattggtcaatgggctgcatccccctcattaagtccatcagcgactggagggtaattgcacttgcagcactctggttctgcctaattggcctgatatgccaagccctgtgctctgaagacggccacaagagaaggatccttactctgggcctgggatttctcgttatcccatttctccccgcgagtaacctgttcttccgagtgggcttcgtggtcgcagagcgtgtcctctacctccccagcgttgggtactgtgtgctgctgacttttggattcggagccctgagcaaacataccaagaaaaagaaactcattgccgctgtcgtgctgggaatcttattcatcaacacgctgagatgtgtgctgcgcagcggcgagtggcggagtgaggaacagcttttcagaagtgctctgtctgtgtgtcccctcaatgctaaggttcactacaacattggcaaaaacctggctgataaaggcaaccagacagctgccatcagatactaccgggaagctgtaagattaaatcccaagtatgttcatgccatgaataatcttggaaatatcttaaaagaaaggaatgagctacaggaagctgaggagctgctgtctttggctgttcaaatacagccagactttgccgctgcgtggatgaatctaggcatagtgcagaatagcctgaaacggtttgaagcagcagagcaaagttaccggacagcaattaaacacagaaggaaatacccagactgttactacaacctcgggcgtctgtatgcagatctcaatcgccacgtggatgccttgaatgcgtggagaaatgccaccgtgctgaaaccagagcacagcctggcctggaacaacatgattatactcctcgacaatacaggtaatttagcccaagctgaagcagttggaagagaggcactggaattaatacctaatgatcactctctcatgttctcgttggcaaacgtgctggggaaatcccagaaatacaaggaatctgaagctttattcctcaaggcaattaaagcaaatccaaatgctgcaagttaccatggtaatttggctgtgctttatcatcgttggggacatctagacttggccaagaaacactatgaaatctccttgcagcttgaccccacggcatcaggaactaaggagaattacggtctgctgagaagaaagctagaactaatgcaaaagaaagctgtctgatcctgtttccttcatgttttgagtttgagtgtgtgtgtgcatgaggcatatcattaatagtatgtggttacatttaaccatttaaaagtcttagacatgttattttactgatttttttctatgaaaacaaagacatgcaaaaagattatagcaccagcaatatactcttgaatgcgtgatatgatttttcattgaaattgtattttttcagacaactcaaatgtaattctaaaattccaaaaatgtcttttttaattaaacagaaaaagagaaaaaattatcttgagcaacttttagtagaattgagcttacatttgggatctgagccttgtcgtgtatggactagcactattaaacttcaattatgaccaagaaaggatacactggcccctacaatttgtataaatattgaacatgtctatatattagcatttttatttaatgacaaagcaaattaagtttttttatctcttttttttaaaacaacatactgtgaactttgtaaggaaatatttatttgtatttttatgttttgaatagggcaaataatcgaatgaggaatggaagttttaacatagtatatctatatgcttttccccataggaagaaattgactcttgcagtttttggatgctctgacttgtgcaatttcaatacacaggagattatgtaatgtaatattttacataagcggttactatcaattgaaagttcaagccatgctttaggcaagagcaggcagcctcacatctttatttttgttacatccaaggtgaagagggcaacacatctgtgtaagctgctttttagtgtgtttatctgaaggccgttttccattttgcttaatgtaactacagacattatccagaaaatgcaaaattttctatcaaatggagccacattcggggaattcgtggtatttttaagaattgagttgttcctgctgttttttatttgatccaaacaatgttttgttttgttcttctctgtatgctgttgacctaatgatttatgcaatctctgtaatttcttatgcagtaaaattactacacaaactagc

SEQ ID NO: 1183 - DNA, 1278 bp, Artificial
  cDNA Sequence
gtaacaaggagggagcgcattcttccaccttctgggtgctgctgagtatctttctgggagcagtggccatgctgtgcaaagagcaagggatcactgtgctgggtttaaatgcggtatttgacatcttggtgataggcaaattcaatgttctggaaattgtccagaaggtactacataaggacaagtcattagagaatctcggcatgctcaggaacgggggcctcctcttcagaatgaccctgctcacctctggaggggctgggatgctctacgtgcgctggaggatcatgggcacgggcccgccggccttcaccgaggtggacaacccggcctcctttgctgacagcatgctggtgagggccgtaaactacaattactactattcattgaatgcctggctgctgctgtgtccctggtggctgtgttttgattggtcaatgggctgcatccccctcattaagtccatcagcgactggagggtaattgcacttgcagcactctggttctgcctaattggcctgatatgccaagccctgtgctctgaagacggccacaagagaaggatccttactctgggcctgggatttctcgttatcccatttctccccgcgagtaacctgttcttccgagtgggcttcgtggtcgcagagcgtgtcctctacctccccagcgttgggtactgtgtgctgctgacttttggattcggagccctgagcaaacataccaagaaaaagaaactcattgccgctgtcgtgctgggaatcttattcatcaacacgctgagatgtgtgctgcgcagcggcgagtggcggagtgaggaacagcttttcagaagtgctctgtctgtgtgtcccctcaatgctaaggttcactacaacattggcaaaaacctggctgataaaggcaaccagacagctgccatcagatactaccgggaagctgtaagattaaatcccaagtatgttcatgccatgaataatcttggaaatatcttaaaagaaaggaatgagctacaggaagctgaggagctgctgtctttggctgttcaaatacagccagactttgccgctgcgtggatgaatctaggcatagtgcagaatagcctgaaacggtttgaagcagcagagcaaagttaccggacagcaattaaacacagaaggaaatacccagactgttactacaacctcgggcgtctggtaagcgcggggtgccctgtgcctgtggaaggaaagatgggttatttttcttatttataataaaatgacatagtgacaccca

SEQ ID NO: 1184 - DNA, 865 bp, Artificial
  cDNA Sequence
gcgggaggcgcggcgcggggggggtcgggtgcgcggcgggcggcccctccccctgccaggtccgggcgggtgcctggagccgccagagtttccgcacccgggagggagatgcggccggggctcaggctccttgcagattcctaaccagcataatgctggagccgggagccaccaacctgcagttttcagaatggccgtgttggacactgatttggatcacattcttccatcttctgttcttcctccattctgggctaagttagtagtgggatcggttgccattgtgtgttttgcacgcagctatgatggagactttgtctttgatgactcagaagctattgttaacaataaggacctccaagcagaaacgcccctgggggacctgtggcatcatgacttctggggcagtagactgagcagcaacaccagccacaagtcctaccggcctctcaccgtcctgactttcaggattaactactacctctcgggaggcttccaccccgtgggctttcacgtggtcaacatcctcctgcacagtggcatctctgtcctcatggtggacgtcttctcggttctgtttggcggcctgcagtacaccagtaaaggccggaggctgcacctcgcccccagggcgtccctgctggccgcgctgctgtttgctgtccatcctgtgcacaccgagtgtgttgctggtgttgtcggccgtgcagacctcctgtgtgccctgttcttcttgttatctttccttggctactgtaaagcatttagagaaagtaacaaggagggagcgcattcttccaccttctgggtgctgctgagtatctttctgggagcagtggccatgctgtgcaaagagcaagggatc

SEQ ID NO: 1185 - DNA, 430 bp, Artificial
  cDNA Sequence
ctcaagccatccaccggcctcggcctcccaaagtgctgggattacaggcgtgagccattgcaaccagccttgatttgttgttttttaagtagcaggagtaatttctttagctgaaatgtaagcatagaggttggggtctgtgtgctaacctgtgttgtgtttgcagttgtaatttagattcgagaagtggtttatcctttgactggaaaagaaaagtagctgcagtattcccccagcacttgctgagagcatgccgtatgccaggctgtgaggctcgagagacaagcagtggaagagttgcggcctgtttcatctctggattgtaaatctgagcctccttctggcccctggaaggggacagcatcaccatggaatgattcctaaccagcataatgctggagccgggagccaccaacctgcagttttcaga

SEQ ID NO: 1186 - DNA, 333 bp, Artificial
  cDNA Sequence
tccatcagcgactggagggtaattgcacttgcagcactctggttctgcctaattggcctgatatgccaagccctgtgctctgaagacggccacaagagaaggggacattgggaatgatcaggtggttccagaagtgtttcaatgctcagcttcgtatctccctgactgaaatttatggtggtgatgtagcaaccaaaaaatggatccttactctgggcctgggatttctcgttatcccatttctccccgcgagtaacctgttcttccgagtgggcttcgtggtcgcagagcgtgtcctctacctccccagcgttgggtactgtgtgctgctga

SEQ ID NO: 1187 - DNA, 798 bp, Artificial
  cDNA Sequence
gcacttgcagcactctggttctgcctaattggcctgatatgccaagccctgtgctctgaagacggccacaagagaaggatccttactctgggcctgggatttctcgttatcccatttctccccgcgagtaacctgttcttccgagtgggcttcgtggtcgcagagcgtgtcctctacctccccagcgttgggtactgtgtgctgctgacttttggattcggagccctgagcaaacataccaagaaaaaggtatcaactgagagtggtgccagctgatgaacagaatgaccggatgcatctcactggtgacaattaccatgtctttctgttcttaagaaactcattgccgctgtcgtgctgggaatcttattcatcaacacgctgagatgtgtgctgcgcagcggcgagtggcggagtgaggaacagcttttcagaagtgctctgtctgtgtgtcccctcaatgctaaggttcactacaacattggcaaaaacctggctgataaaggcaaccagacagctgccatcagatactaccgggaagctgtaagattaaatcccaagtatgttcatgccatgaataatcttggaaatatcttaaaagaaaggaatgagctacaggaagctgaggagctgctgtctttggctgttcaaatacagccagactttgccgctgcgtggatgaatctaggcatagtgcagaatagcctgaaacggtttgaagcagcagagcaaagttaccggacagcaattaaacacagaaggaaatacccagactgttactacaacctcgggcgtctg

SEQ ID NO: 1188 - DNA, 639 bp, Artificial
  cDNA Sequence
gcgggaggcgcggcgcggggggggtcgggtgcgcggcgggcggcccctccccctgccaggtccgggcgggtgcctggagccgccagagtttccgcacccgggagggagatgcggccggggctcaggctccttgcagttgtaatttagattcgagaagtggtttatcctttgactggaaaagaaaagtagctgcagtattcccccagcacttgctgagagcatgccgtatgccaggctgtgaggctcgagagacaagcagtggaagagttgcggcctgtttcatctctggattgtaaatctgagcctccttctggcccctggaaggggacagcatcaccatggaatggtgtgtcccgttgcctgttggatctgtctccatcttcactcagacagaaggctatagaaagatgcctgtgacttcagattcctaaccagcataatgctggagccgggagccaccaacctgcagttttcagaatggccgtgttggacactgatttggatcacattcttccatcttctgttcttcctccattctgggctaagttagtagtgggatcggttgccattgtgtgttttgcacgcagctatgatggagactttgtctttgatgactcagaagctattgttaacaataag

SEQ ID NO: 1189 - DNA, 2846 bp, Artificial
  cDNA Sequence
ctcgcaagacctggttgtttaaaagtgggcggcaccttccccttcgctcttcctcctgctcctgccctgatgtgtctggatggtgacagatgggaatcttctccagtgaccagaatccatgccttaccttgggagcccaagctgacttctcaagctctggggatgcctcagtgatctctgatgtggaattagtggaggctggccgttgctcacctctacacagcctgctggtcgttagcgagcaggagttctgatgttcctctcatcttggatgtctttcctaggagaatatttctcacgtgtttgacagaaaacattatctgtccatcatttccatggattcctgggtctcacgggcagaaggacaaggcagatatgaggcggatctggtaaaaccataaacaccatgagatcagagcatccatctgtagactcacagagcaagaagcgtgactgccccaatcttgaatggatgagtaagatgaaaatcaatttataaacatcttgtgacaagctggaattcagttatagatcaattacagattgctcactggacaatcaaggacattattagaaaacggtttccaccactagaaattcatctacattgacatccacctaaatatccagaaggtcatccccactttcgtcgctctccacagtcagctgccgggtccaccacttcttaacttcagaaccgcaggaagccgcgtcagtcatggggttcattttgcacacgacagatttcatggttgtccttcctccaaaccgaggaacctagatcttctctgatctctgaaaaataagttcctggatatgaaaggggatactttccttggtggtagtcccagtgaagacccactgaacatcgtcagcctcaaaatgtaagctgtgctgtcatctgctttgtggaacacatatgctacacatcttctcctttcaattgggctgaagttggggcacagttaaagagcattataaagctcctgctttagcatgaacttagttatctatagaaaaaaacatgtacaaggacactgggctgtggggagcattgctctccctccattcctgagtgctcttaatgggattatcctggctttccaaaaccctatagagaagaagctcatagaagaaaattctcttactgaatcagtaaaatatggaaaataatgggactgtttattaaaggattgaatgagagaacacaagtaatgcacttagaagagtgactggcatacagtgagtactacgtgctggcttctcaaccatgatagcctgaaatgtacccggaaaatgggggctaatgtaagtcatatttagagaagttattttgggggacaatgtttttgacaagactacatttttcattatgttgctgtctgtaaacaactgtagatgcagacttgcattttgaaaggcaagacccaaaacacacaaacagagtaaatacctttaaaatgcctcgatcgctggagaaatgcctggatggacctacctgagggcagacgccactgcccaaatttcctctggggtttccctgcgtcggctgcatcttgccgacttcctcctcgatccgacagcgtggggctcaggagctgctgctggctgcttgtctgcatgggaggagaagcacacagttaccgtctttttaaccctgcgctctcctccttttactataagaaaggaaaacacatggcaggaggacaagtgggaagaacaacatggactcagagtgtccacaatggggaaaagtgaaaatgggtataaagggtcacagaagaaaaagagccaccactgcacgccctgctgaaggagacaccactcttcctgggacatcttgtcctgggtaacccccactgcttcgttcccctccatgcctgagaatgtcattgtttcccttcatatcttcgctggcaaaccagggggtaaggaaggggaactgcaggaaggaaggtggggcagtggggacgggctgggcgggggcagtctactgtcaccagcctggagatccacacttagagcttcagggaaagagttctctgcaggcaaagctgtatgatgggccctggtggaggatggagctgataacaatctaagctacagtgaaagaaagagagatgccaagacttcccacacatttcacctgttctcaggttcacctgtcacctctccctttcctaacaaaagccttggtcttcacatctctttagtatccttttttttttttttttgtcacctctttctttcttaggctttttcatctaaaaacagagggctctgaaatcatcactttccccaacctcattagccctgtctcactgtctgtcctgacttcagcctgcctccctctcccatgcgagacattgccaaccatcttcagggtgaccagtggcaaggccactgcagatgcctccccttgccccttggttgactaactccgcagaagtccctgcagtcggtggcagatgatttctaaaggctggggagcccaaaacatgagatctactgaaaactgagctatggcaccagtgggcctcctggagcaccctgctgggccgtggagccttaggcttccaaaggtactctggcccctggctgcgttgctgcacaccatggagcctggtgctgctgggggctctgcacagagcacgggatcagctccacgttgttaacctcaaatcgtaattgctgcctcataaaggggcaggtcctcccagccagctgcttctcacagcacaggactctccaggacgctgataactccttgtacttttttatatagacacatacatagagtttgaaaatgaaaatatgctgtgacttaataaatagaaactcctcaa

SEQ ID NO: 1190 - DNA, 509 bp, Artificial
  cDNA Sequence
acgggcctcaccatctcctctttcttctcccacctctttgacaagaagcagatgcacattctgatggttggattggatgccgctggcaagacgaccattccgtatgaactgaagttaggggagatagtcaccaccattcctaccgttggctgcaatgtggaagcggtagactataaaaacattcgtttcacagtatgggatgctggtggtcaagatagaattaggcctctccggaagtattacttcccaaatacccaatatcttatatttgtggtagatagcaataatcgtgaaagaattaaggaggtagcaggtgagctgcagaaattgcttctggtagatgagttgagagaggcagtgctgctgctttttgagaatcacaggatttgccaaatgctcttcgatctcctcctaacaggacatgatctgttcaagccacgtgcataacacaaggaactggtctgtgtgagagacctgaccagctgtcaaaggagctttcaaaatgttaa

SEQ ID NO: 1191 - DNA, 461 bp, Artificial
  cDNA Sequence
actatgtcatgtgaaaagtagcttgatttggggtcactgctattcagtggaaaatttaaccttgggatggataatgcagcccaaatttgaactctgaaagactattcactggattggaagaccaatagataccaataaattaaaagtaattgctgtttatccttcatcaaaattaccattattctacaaggtggccctccagagttagtgaactgtgacctccacatgggatttggacatgcgtgccctacatctggaatgcagaaacactcttcacagaactctgatagcccaggaatatttatgtaaatctctgtcctggtaaggcacatgttgatgtacttgggcttaagctcataaaccaagaggaacagtttcctacatcccccttctaatgactaaagccaacgggctgagccaaatgggacaatttagacaaagagagactggcgaaaagcaaa

SEQ ID NO: 1192 - DNA, 462 bp, Artificial
  cDNA Sequence
atggctggagggggaccccaggccaaccctgattacctcttccatgtcatctttctgggagactccaacgtgggcaaaacatccttcctgcacctgctgcaccagaattctttcgccaccggattgacagctaccgtgcttcacccctctctatgtgtcctaggagtagattttcgggtcaaaaccttgctggtggacaacaagtgctttgtgctgcagctctgggacacagctggccaagagaggtaccacagtatgacgcgacagctgctccgcaaggctgacggggtggtgctcatgtacgacatcacctcccaggagagctttgcccacgtgcgctactggctagactgtctccaggatgcagggtcggatggggtggtcatccttctcctgggaaacaagatggactgtgaggaggaacggcaagtgtccgtggaagctgggcagcaactggcccag

SEQ ID NO: 1193 - DNA, 1790 bp, Artificial
  cDNA Sequence
gaagaggaagaattgcagttagtgtttctcatgctgaaaacagttgatcccaaggactggaagaatcaggatcattatgcagttcttggacttagccatgtaagatacaaagctacacagagacagatcaaagcagctcataaagtagtggttttaaaacatcatggaaagcagccagtgaaccaataaaagaaagggataatgactacttcacttgcatcactgaaattataaaatgtatgacccagtgaaaagaggagcatttaacagtgtagatcatacatttggaaactcagttccttctaaaagtgaagcaagggatagtttctttgaagtgtttttcccactattcgaaaataattccagatggtccaaaaaaagtttctaaacctggtgttatgaattcatcattttattccttctggtatagtttttatgcttggacagagttttcttatttaaatacagaagaaaaaaaagcagaatattgtgacaagagagggattgaaaagaagaacagagcaacaagagctcaaagaaagaaagaagaaatgaattgaaaacattagttgataatacacatagctgtgatacaaggataaaaaaattcaaagaacagaaagccaaggccaggcatagtggctcatgtctgtgattcttgcactttgggagaccaagacgggtggatcccttgagcccaggagttcgagaccagcctgggcaacatgatgaaaccctgtctctacaaaaaacttagccaggtgtgttggtgcgcacctgtagtcccagcaacttgggaggctgaggtaggataattgcttgagcctgggaggctgaggctgagtgaggtgagccgtgatcacaccactgcactccagcttgggtgagagcaagactctgtttcaacattaaaaaaagaagagaaagccgagaaagaagcaagatggaagaagcgagaggctaaagaaaaacaaagacaagctgaattagaagctgcttgaatagctaaggagaaagaagaggaagttaaataaggagcattgttggcaaagaagggaaaagatatccagaaaagagttgttaaaaggaaaagacaaaccttcaaaattcaaggaagacctgaaatcactttttctgacaataagtggagcagcttaaaaaggtggaagaagtggaaaaactttgtgataggcttcaactagcaagtttatagcacttcagtgaaatacctcatctacaaaaacactaggaatggctgctctcctaaaaacggaagaaataaatgagccaattagaacagagaaagaggaaggggaggcttgtgtgtgacaagcatctaagaatgcagagaaatcaactgtcgaaggtggaaatggcagtaaaaattggtcagaggagcattggtctgcagttactaattaaagccataggccccttttctgcatgaacaaattcaatatgggaagttattaccaattatatgaacacacattctttttttggagtcaagagaactttttggcaaagaaaattgagcctctaaaaacttgaccctcacaaaaaaaagatgacaaaaaaggctttggataacctttaaaagaacatggaatagtctctcaagtacatgaagtaggcctccttcagatgtacctgaagatgaggaaaaatagagggagcagtgcctggcaggacaaaagaggacctcaggaaacaatataaggaagttgttgaggtggtaaaggcaatgaaatgcccaggagcaactgctgaatgcaaatggagccgagaaa

SEQ ID NO: 1194 - DNA, 656 bp, Artificial
  cDNA Sequence
gagagccaagaaccaactgaattgtctcagaatggaaacactatattatttcagaggagttaatttcagaaggaaaatgggtcaaacttgaaaaaacaacatacatggctcctattggtaaaactggaacttgggactcagtgaaacatacaaccaggaaagaacagactggtgatgatgtagcggtcatccctgtgctgcagagaacgcttcactacgagtgtatcgttctggtgaaacagtcctgaccaccaatgggtggctactgcatagagttccctgcagggaactcatagaagatggtgaaaccccaggagcagctgctctttgggagcttgaggaagaaactggctacaaaggggacgctgctgaatgttctccagtggtctatatggacccaggtttgtcaaactgtaccacacacatcgtgacagtaatcattaacggagatgacgcagaaaatgtaaggcccaagccaaagccaggggatggagaatttgtggaagtcatttcgttacccaagaatgacctgctgcagggactcgatgctctcgtagctgaaaaacatcttacagtggatgccaaagtctattcccatgctctagcactgaaacatgcaaatgtgaagccatctgaagtgcccgtcctgaaatttt

SEQ ID NO: 1195 - DNA, 3372 bp, Artificial
  cDNA Sequence
cgtccgcagcgccgccagccaggcgagagccgtgtgggatcccagcgcccgcactcccgcccccgccaaggagccaggaatggcacaactagagaggagcgccatctctggcttcagctctaagtccaggcgaaactcattcgcatatgatgttaagcgtgaagtatacaatgaggagacctttcaacaggaacacaaaaggaaggcctcctcttctgggaacatgaacatcaacatcaccaccttcagacaccacgtccagtgccgctgctcatggcacaggttcctacgatgcgtgcttacaatctttcccttcctagaatggatgtgtatgtatcgattaaaggattggcttctgggagacttacttgctggtataagtgttggccttgtgcaagttccccaaggcctgacacttagtttgctggcaaggcaactgattcctcctctcaacatcgcttatgcagctttctgttcttcggtaatctatgtaatttttggatcgtgtcatcaaatgtccattggttccttcttcctggtgagtgctctgctgatcaacgttctgaaagtgagcccattcaacaacggtcaactggtcatgggatctttcgtcaagaatgagttttcggccccctcctaccttatgggctataataaatccttgagtgtggtggcaaccacaacttttctgactgggattattcagctaataatgggcgtattgggtttgggcttcattgccacttaccttccggagtctgcaatgagtgcttacctggctgctgtggcacttcatatcatgctgtcccagctgactttcatctttgggattatgattagtttccatgccggtcccatctccttcttctatgacataattaattactgtgtagctctcccaaaagcgaattccaccagcattctagtatttctaactgttgttgttgctctgcgaatcaacaaatgtatcagaatttctttcaatcagtatcccattgagtttcccatggaattatttctgattattggcttcactgtgattgcaaacaagataagcatggccacagaaaccagccagacgcttattgacatgattccttatagctttctgcttcctgtaacaccagatttcagccttcttcccaagataattttacaagccttctccttatctttggtgagctcctttctgctcatatttctgggcaagaagattgccagtcttcacaattacagtgtcaattccaaccaggatttaatagccatcggcctttgcaatgtcgtcagttcatttttcagatcttgtgtgtttactggtgctattgctaggactattatccaggataaatctggaggaagacaacagtttgcatctctggtaggcgcaggtgtgatgctgctcctgatggtgaagatgggacactttttctacacactgccaaatgctgtgctggctggtattattctgagcaacgtcattccctaccttgaaaccatttctaacctacccagcctgtggaggcaggaccaatatgactgtgctctttggatgatgacattctcatcttcaattttcctgggactggacattggactaattatctcagtagtttctgctttcttcatcaccactgttcgttcacacagagctaagattcttctcctgggtcaaatccctaacaccaacatttatagaagcatcaatgattatcgggagatcatcaccattcctggggtgaaaatcttccagtgctgcagctcaattacatttgtaaatgtttactacctaaagcataagctgttaaaagaggttgatatggtaaaggtgcctcttaaagaagaagaaattttcagcttgtttaattcaagtgacaccaatctacaaggaggaaagatttgcaggtgtttctgcaactgtgatgatctggagccgctgcccaggattctttacacagagcgatttgaaaataaactggatcccgaagcatcctccattaacctgattcactgctcacattttgagagcatgaacacaagccaaactgcatccgaagaccaagtgccatacacagtatcgtccgtgtctcagaaaaatcaagggcaacagtatgaggaggtggaggaagtttggcttcctaataactcatcaagaaacagctcaccaggactgcctgatgtggcggaaagccaggggaggagatcactcatcccttactcagatgcgtctctactgcccagtgtccacaccatcatcctggatttctccatggtacactacgtggattcacgggggttagtcgtattaagacagatatgcaatgcctttcaaaacgccaacattttgatactcattgcagggtgtcactcttccatagtcagggcatttgagaggaatgatttctttgacgctggcatcaccaagacccagctgttcctcagcgttcacgacgccgtgctgtttgccttgtcaaggaaggtcataggctcctctgagttaagcatcgatgaatccgagacagtgatacgggaaacctactcagaaacagacaagaatgacaattcaagatataaaatgagcagcagttttctaggaagccaaaaaaatgtaagtccaggcttcatcaagatccaacagcctgtagaagaggagtcggagttggatttggagctggaatcagaacaagaggctgggctgggtctggacctagacctggatcgggagctggagcctgaaatggagcccaaggctgagaccgagaccaagacccagaccgagatggagccccagcctgagactgagcctgagatggagcccaaccccaaatctaggccaagagctcacacttttcctcagcagcgttactggcctatgtatcatccgtctatggcttccacccagtctcagactcagactcggacatggtcagtggagaggagacgccatcctatggattcatactcaccagagggcaacagcaatgaagatgtctaggagatgaactagaaataaggggtcagataatgctggcaaatcctcctacccaaaaaggggtcaattgtccagagacctagactggatacgaactagcagtacttccttcctgactgtgactcctactacctgccagccttcttccttgctctgcgctgggatcatactcccaaatcacattactaaatgccaacaattatctctgaattccctatccaggctcccctcatttcaccttcagcatatattctagtcatgaatttccttcttcacacaccccacatctctgggctttgtgccagaccatctctaacttaatcctctcatccctgttcccctttctccaaagagatgaagctcaaataaaatgtataactcta

SEQ ID NO: 1196 - DNA, 649 bp, Artificial
  cDNA Sequence
ggctgagtgaggtctctgggggttgagttgggactgggcctggttctccaggactgtacacttgcaagaccccagagttcatcgggcagatcctcactgttacagacgagtacaccgaggccccaagagggggaggtggctcgccaagttgcagacagagtgagactcccgccctgccgtggatcccgtcgcaatgagacgttgctgcccctggcgctgtgcccctctctcagctcctgcctggcttcctactccctgccctgcgtcccgcggctcccccatattctagctcggccatcgacaagcggtcaggggagaaggtggccatcaagaagctgagccgaccctttcagtccgagatcttcgccaagcgcgcctaccgggagctgctgctgctgaagcacatgcagcatgagaacgtcattgggctcctggatgtcttcaccccagcctcctccctgcgcaacttctatgacttctacctggtgatgcccttcatgcagacggatctgcagaagatcatggggatggagttcagtgaggagaagatccagtacctggtgtatcagatgctcaaaggccttaagtacatccactctgctggggtcgtgcacagggacctgaagccaggcaacctggctgtgaatga

SEQ ID NO: 1197 - DNA, 1637 bp, Artificial
  cDNA Sequence
cgtgcctgggccgcacctgccgcagtggctccgtcgggccgggcggaagcgcgggagcgcagggctggacaggcccgggcgtggcggccccggcgcacctgggcgagccggcaggtgggagcgtagcagcccggggcccccgccctcgcgcgggggaggagcgggcggcgcggggcgggcgcagcgggggtcggggcgctgggagcccgttgggccgcgaacgcagccgccacgctggggccgccgagatcgggtgcccgggatgagcctcatccggaaaaagggcttctacaagcaggacgtcaacaagacagcctgggagctgcccaagacctacgtgtccccgacgcacgtcggcagcggggcctatggctccgtgtgctcggccatcgacaagcggtcaggggagaaggtggccatcaagaagctgagccgaccctttcagtccgagatcttcgccaagcgcgcctaccgggagctgctgctgctgaagcacatgcagcatgagaacgtcattgggctcctggatgtcttcaccccagcctcctccctgcgcaacttctatgacttctacctggtgatgcccttcatgcagacggatctgcagaagatcatggggatggagttcagtgaggagaagatccagtacctggtgtatcagatgctcaaaggccttaaggacctgaagccaggcaacctggctgtgaatgaggactgtgaactgaagattctggattttgggctggcgcgacatgcagacgccgagatgactggctacgtggtgacccgctggtaccgagcccccgaggtgatcctcagctggatgcactacaaccagacagtggacatctggtctgtgggctgtatcatggcagagatgctgacagggaaaactctgttcaaggggaaagattacctggaccagctgacccagatcctgaaagtgaccggggtgcctggcacggagtttgtgcagaagctgaacgacaaagcggccaaatcctacatccagtccctgccacagacccccaggaaggatttcactcagctgttcccacgggccagcccccaggctgcggacctgctggagaagatgctggagctagacgtggacaagcgcctgacggccgcgcaggccctcacccatcccttctttgaacccttccgggaccctgaggaagagacggaggcccagcagccgtttgatgattccttagaacacgagaaactcacagtggatgaatggaagcagcacatctacaaggagattgtgaacttcagccccattgcccggaaggactcacggcgccggagtggcatgaagctgtagggactcatcttgcatggcaccgccggccagacactgcccaaggaccagtatttgtcactaccaaactcagcccttcttggaatacagcctttcaagcagaggacagaagggtccttctccttatgtgggaaatgggcctagtagatgcagaattcaaagatgtcggttgggagaaactagctctgatcctaacaggccacgttaaactgcccatctggagaatcgcctgcaggtggggccctttccttcccgccagagtggggctgagtgggcgctgagccaggccgggggcctatggcagtgatgc

SEQ ID NO: 1198 - DNA, 1036 bp, Artificial
  cDNA Sequence
cccgacgcacgtcggcagcggggcctatggctccgtgtgctcggccatcgacaagcggtcaggggagaaggtggccatcaagaagctgagccgaccctttcagtccgagatcttcgccaagcgcgcctaccgggagctgctgctgctgaagcacatgcagcatgagaacgtcattgggctcctggatgtcttcaccccagcctcctccctgcgcaacttctatgacttctacctggtgatgcccttcatgcagacggatctgcagaagatcatggggatggagttcagtgaggagaagatccagtacctggtgtatcagatgctcaaaggccttaagtacatccactctgctggggtcgtgcacagggacctgaagccaggcaacctggctgtgaatgaggactgtgaactgaagattctggattttgggctggcgcgacatgcagacgccgagatgactggctacgtggtgacccgctggtaccgagcccccgaggtgatcctcagctggatgcactacaaccagacaggccaaatcctacatccagtccctgccacagacccccaggaaggatttcactcagctgttcccacgggccagcccccagggtgagtctcagagcccgctccccaggggcctctcagcgtatcccagagggcgggctctcccagcccctggtgtgaggctcttggctctgcccctgcagctgcggacctgctggagaagatgctggagctagacgtggacaagcgcctgacggccgcgcaggccctcacccatcccttctttgaacccttccgggaccctgaggaagagacggaggcccagcagccgtttgatgattccttagaacacgagaaactcacagtggatgaatggaagcgtaagagctggggcctcgggcttcctcgcctccgcctgcagcctctcttccttgcttcctccatctttgtgcctggcctctgccagccctacctgccacctccttcttggtgggcattgtctcctgggtgcttctttctccttgagctgact

SEQ ID NO: 1199 - DNA, 499 bp, Artificial
  cDNA Sequence
cttggtatccccaccttcctgggctcacctctgccccactcaggtgtttaagacgtgcagcagagaggcgccatcctgacctggtgccacatcctagcccctttccttactggatcctcaaaccagaagaaaacctgaatctctgaggacgtcaacaagacagcctgggagctgcccaagacctacgtgtccccgacgcacgtcggcagcggggcctatggctccgtgtgctcggccatcgacaagcggtcaggggagaaggtggccatcaagaagctgagccgaccctttcagtccgagatcttcgccaagcgcgcctaccgggagctgctgctgctgaagcacatgcagcatgagaacgtcattgggctcctggatgtcttcaccccagcctcctccctgcgcaacttctatgacttctacctggtgatgcccttcatgcagacggatctgcagaagatcatggggatggagttcagtgaggagaagatccagtacc

SEQ ID NO: 1200 - DNA, 2052 bp, Artificial
  cDNA Sequence
cgtgcctgggccgcacctgccgcagtggctccgtcgggccgggcggaagcgcgggagcgcagggctggacaggcccgggcgtggcggccccggcgcacctgggcgagccggcaggtgggagcgtagcagcccggggcccccgccctcgcgcgggggaggagcgggcggcgcggggcgggcgcagcgggggtcggggcgctgggagcccgttgggccgcgaacgcagccgccacgctggggccgccgagatcgggtgcccgggatgagcctcatccggaaaaagggcttctacaagcaggacgtcaacaagacagcctgggagctgcccaagacctacgtgtccccgacgcacgtcggcagcggggcctatggctccgtgtgctcggccatcgacaagcggtcaggggagaaggtggccatcaagaagctgagccgaccctttcagtccgagatcttcgccaagcgcgcctaccgggagctgctgctgctgaagcacatgcagcatgagaacgtcattgggctcctggatgtcttcaccccagcctcctccctgcgcaacttctatgacttctacctggtgatgcccttcatgcagacggatctgcagaagatcatggggatggagttcagtgaggagaagatccagtacctggtgtatcagatgctcaaaggccttaagtacatccactctgctggggtcgtgcacagggacctgaagccaggcaacctggctgtgaatgaggactgtgaactgaagattctggattttgggctggcgcgacatgcagacgccgagatgactggctacgtggtgacccgctggtaccgagcccccgaggtgatcctcagctggatgcactacaaccagacagtggacatctggtctgtgggctgtatcatggcagagatgctgacagggaaaactctgttcaaggggaaagattacctggaccagctgacccagatcctgaaagtgaccggggtgcctggcacggagtttgtgcagaagctgaacgacaaagcggccaaatcctacatccagtccctgccacagacccccaggaaggatttcactcagctgttcccacgggccagcccccaggctgcggacctgctggagaagatgctggagctagacgtggacaagcgcctgacggccgcgcaggccctcacccatcccttctttgaacccttccgggaccctgaggaagagacggaggcccagcagccgtttgatgattccttagaacacgagaaactcacagtggatgaatggaagcagcacatctacaaggagattgtgaacttcagccccattgcccggaaggactcacggcgccggagtggcatgaagctgtagggactcatcttgcatggcaccgccggccagacactgcccaaggaccagtatttgtcactaccaaactcagcccttcttggaatacagcctttcaagcagaggacagaagggtccttctccttatgtgggaaatgggcctagtagatgcagaattcaaagatgtcggttgggagaaactagctctgatcctaacaggccacgttaaactgcccatctggagaatcgcctgcaggtggggccctttccttcccgccagagtggggctgagtgggcgctgagccaggccgggggcctatggcagtgatgctgtgttggtttcctagggatgctctaacgaattaccacaaacctggtggattgaaacagcagaacttgattcccttacagttctggaggctggaaatctgggatggaggtgttggcagggctgtggtccctttgaaggctctggggaagaatccttccttggctctttttagcttgtggcggcagtgggcagtccgtggcattccccagcttattgctgcatcactccagtctctgtctcttctgttctctcctcttttaacaacagtcattggatttagggcccaccctaatcctgtgtgatcttatcttgatccttattaattaaacctgcaaatactctagttccaaataaagtcacattctcaggttccaggtggacatga

SEQ ID NO: 1201 - DNA, 3756 bp, Artificial; identical to SEQ ID NO: 531
  cDNA Sequence

SEQ ID NO: 1202 - DNA, 1445 bp, Artificial
  cDNA Sequence
ggaaccgcgaccactggagccttagcgggcgcagcagctggaacgggagtactgcgacgcagcccggagtcggccttgtaggggcgaaggtgcagggagatcgcggcgggcgcagtcttgagcgccggagcgcgtccctgcccttagcggggcttgccccagtcgcaggggcacatccagccgctgcggctgacagcagccgcgcgcgcgggagtctgcggggtcgcggcagccgcacctgcgcgggcgaccagcgcaaggtccccgcccggctgggcgggcagcaagggccggggagagggtgcgggtgcaggcgggggccccacagggccaccttcttgcccggcggctgccgctggaaaatgtctcaggagaggcccacgttctaccggcaggagctgaacaagacaatctgggaggtgcccgagcgttaccagaacctgtctccagtgggctctggcgcctatggctctgtgtgtgctgcttttgacacaaaaacggggttacgtgtggcagtgaagaagctctccagaccatttcagtccatcattcatgcgaaaagaacctacagagaactgcggttacttaaacatatgaaacatgaaaatgtgattggtctgttggacgtttttacacctgcaaggtctctggaggaattcaatgatgtgtatctggtgacccatctcatgggggcagatctgaacaacattgtgaaatgtcagaagcttacagatgaccatgttcagttccttatctaccaaattctccgaggtctaaagtatatacattcagctgacataattcacagggacctaaaacctagtaatctagctgtgaatgaagactgtgagctgaagattctggattttggactggctcggcacacagatgatgaaatgacaggctacgtggccactaggtggtacagggctcctgagatcatgctgaactggatgcattacaaccagacagttgatatttggtcagtgggatgcataatggccgagctgttgactggaagaacattgtttcctggtacagaccatattgatcagttgaagctcattttaagactcgttggaaccccaggggctgagcttttgaagaaaatctcctcagagtctgcaagaaactatattcagtctttgactcagatgccgaagatgaactttgcgaatgtatttattggtgccaatcccctggctgtcgacttgctggagaagatgcttgtattggactcagataagagaattacagcggcccaagcccttgcacatgcctactttgctcagtaccacgatcctgatgatgaaccagtggccgatccttatgatcagtcctttgaaagcagggacctccttatagatgagtggaaaagcctgacctatgatgaagtcatcagctttgtgccaccaccccttgaccaagaagagatggagtcctga

SEQ ID NO: 1203 - DNA, 6022 bp, Artificial
  cDNA Sequence
attccccctcctcccccgggagcggcggcggcggccgggccggggccccagcgcgggccgggagggggcacggcggaggccacggaggcaggcgcgggagaagaccgcgctccgcttcccgggccgcgccgacctgctcggcggcctgcccgcccgcgcccaggggccccgaacggtggggccgggcaggcggctgaggaggcctgtcccctcagttcccaggtgccatgaggaagcctcgtcggaagtcccggcagaatgccgagggccggcgttccccgtccccctacagtctcaagtgctcacccacccgggagaccctgacatatgcccaggcccagcggattgtcgaggtagacattgatggacgcctgcatcgtatcagcatctatgacccactcaaaatcattactgaagatgagctaactgcccaggatatcaccgaatgcaatagtaacaaggaaaacagtgaacagcctcagttccctggcaagtccaagaaaccctcatccaagggcaaaaagaaggaatcctgctccaagcatgcatctggtacttccttccacctcccacagcccagcttccgtatggtggactcaggcatccagccagaagcacccccgctgcctgctgcctactaccgctacattgagaagccacctgaagacctggatgcagaggtagagtatgacatggatgaggaggaccttgcctggctggacatggtgaatgaaaaacggcgagtagatgggcacagtttggtgtctgcagatacctttgagctgctggtagaccggcttgagaaagagtcatacttggagagtcgcagcagtggggcccaacagtcactcatcgatgaagacgctttctgctgtgtgtgcctggatgatgaatgtcacaatagcaatgttattctcttctgtgacatctgcaacctggctgtacaccaggagtgctatggcgtcccatacatccctgagggccagtggctatgccgctgctgcctgcagtctccctcccggcctgtggattgcatcctttgccccaataagggtggcgccttcaaacagaccagtgatgggcactgggcccatgtggtgtgtgccatctggatccctgaagtctgctttgctaacaccgtgttcttggaacctattgagggcattgacaatatcccgcctgcccgctggaaactaacctgctatatctgcaagcagaaagggctaggtgcagccatccagtgccataaggtgaactgctacacagcattccatgtgacatgtgcacagcgggctgggctcttcatgaagattgagcccatgcgcgaaaccagcctcaatggcaccatctttacagtgcgcaagactgcctactgtgaggcccactcgccaccaggtgcggccactgctaggaggaagggcgactcccctagaagcatcagtgagactggcgatgaggaagggctgaaggagggtgatggagaggaggaagaagaggaagaggtggaggaagaagagcaggaagctcaaggcggggtgagtggctccctcaagggagtgcccaagaaaagcaagatgagtttgaagcagaagatcaagaaggagccagaggaagcaggccaagacacaccctccactctccccatgcttgctgtcccacagataccctcttacaggttgaacaagatctgtagtggtctctcctttcagaggaaaaaccagtttatgcagcggcttcacaattattggctgttgaagcggcaggcacggaatggtgtccctcttatccggcgcttgcactcccatctgcagtcccaaagaaacgctgagcagcgagagcaggatgagaagacaagtgcagtgaaggaggagctgaagtattggcagaagctccggcatgacttggagcgggcgcggctgctgattgagctgattcggaagagagagaagctcaaacgagagcaggtcaaagtccagcaggctgccatggagctggagctgatgccattcaatgttctgttgaggacaacactggacctgctgcaggagaaggatcctgcacacatcttcgcagaaccagtcaacttgagtgaggttccagattacctggaattcatatccaagccaatggatttttctactatgaggcggaagctggagtcccacctgtaccgcaccttggaggagtttgaggaggactttaaccttatagttaccaactgcatgaagtataatgctaaagacacaattttccaccgagcagctgtccgcctgcgggacctgggaggggccatcctacggcacgcccggcggcaggcagagaacatcggctatgaccccgagaggggcactcacctgcccgagtcacccaaattggaagacttttaccgcttctcctgggaagacgtggacaacatcctcatcccagagaaccgggcccatttgtccccagaggtgcagctgaaggagctgctggagaaactggacctggtgagcgccatgcggtccagtggggcccgcacccgtcgtgtccgcctgctacgccgggagatcaatgcccttcggcagaagctggcacagccaccaccaccacagccaccatcactcaacaagacagtatccaatggggagctgccagcagggccccagggggatgcagctgtgctggagcaggccttgcaggaggagccagaagacgatggggacagagatgactccaaactgcctcctccgccaaccctggagcccactgggcctgcaccttccttgtctgagcaagaatcccccccggagccccctactctgaaacccattaatgatagcaaacctccaagcaggttcctaaagcccagaaaggtggaagaagatgagctcttggaaaaatcaccactgcagctagggaatgagcctttgcaacgcttgctcagtgacaatggcatcaacagactatccctcatggcccctgacaccccggccggtaccccacttagtggtgtgggtcgccgcacatcagtcctcttcaagaaggccaagaatggggttaagctacagagaagcccagacagggtcctggagaatggcgaggaccatggtgtggcaggctctcctgcctctccagccagcatcgaggaagagcgccactcccggaagcggccaaggagcaggagctgtagtgagagcgaaggggagaggtccccccagcaggaggaagagacaggcatgaccaacggctttggaaaacacaccgaaagcgggtctgactctgaatgtagtttgggtctcagtggtggactggcatttgaagcttgcagtggtctgacgccccccaaacgcagccgtgggaagccagccctgtctcgagtgcccttcctggaaggtgtgaacggagactctgactacaatggctcaggcagaagcctcctgctgccctttgaagaccgcggagacctggagcccttggagctggtgtgggccaagtgccgaggctacccctcctaccctgccttgatcatcgatcccaagatgccccgggagggcctcctgcacaatggcgttcccatccctgtccccccgctggacgtgctgaagctgggagagcagaaacaggcagaggctggagagaagctcttccttgtcctcttctttgacaacaagcgcacctggcagtggcttccaagggacaaagtcctgcccttgggtgtggaagacaccgtggacaagctcaagatgctggaaggccgcaagaccagcatccgcaagtcagtgcaggtggcctatgaccgtgcgatgatccacctgagcagagtccgggggccccactccttcgtcacttccagctacctgtaagggcagggctgggcctgcatccgcttgccctgcctccatcccgcagggcacagagaagcctcttctgcccctgccagatgtatggccggcagcttccccctctcatggtaggccagggactgggctttctccccactaagggcaaggccccagttttgaccaatcgcatggttctcctggcaggcctgctgtgtgccaaaaactcccacccaaggtccctcaggggatatttcactgaagaaccagttagaagtagaaacagctgtggggcttgggcccagcttaggagattgcccagatggcaagaggtcctgggctccttcttgaggggctgcctggcccgctccatcctactcccactaactacacctcagggcgggtgaggttccgacactgatcccagagatgccgtggatacgccagggtcccagggggaatctccccaagctcacactctctcccgcttatcgcctattctcacacctcttctcggtcccatcttctgcacccattgcccagtcttgctttctctttcccatattccttttctttttctcttgtgccaaactgacagaaaccgtcaccacactggtctttttctttaatgtctcattccccttgaggccagctgctatgccaggtggtgtctctgccaggctcctcaggcccagacagaggccagcccacaacctatgaccccctcccccaggacaccacctcccacccacagaccttccctttagctgttgacacaacttcccagctctgcaagtgtgccccctggatcaaggcgggtcccctcttgtttttttctttgctgccacgaggtggtccaagccttcagggtgggctcctatcaggctgggtgtgcgagtgtccatctgtccacatggatgtcgagggtggtttgtgtggagctgtgctcgtcagctgggtctgccctcttcccccttttctccttcttctctcctcatggactttttctgcaattgcagtcttaagcttcactctccaccacctggatggcatggcgcctgccaccaaacatcttcctggcctgcgctctgccctgccctgcctagcctctgctactcccacttcccaactccagggaatgcattacttttatttcaaaccctctgcctccttccttctttctcttcaaccccctccccaccttcaccttctcaaaaatggaaggaaaaaaaaactgtgaatggggaatgctgactgacaaaccaacacaactttcagaggcttcagtgtctgttctctggacatttcttttcacctcctgagcaccaaagtcgcagggccagttgcaggccgctgattgccatgttgatttttaacctgatattctttttaattgttttaaatttttcataggggagttttggacaaaacagtcactggggagatcactgccatttttacacacttgactttttaaaaatacaaccaaccaaccaccacaacttcttatacatttgggacatgagccagagtttaaaagggaaccaacaaaacactataacttaaaaggatggggttttggattttgtataataataaaaacaatacagcatatggctagggaaggacatggtgtatataattgtaaaatactgttctaaattattcaggcctatagtttccattactggagtcctccattgtgtggccacacagtgtcgttgatttaaaggagccagtgcttcccctctccccaggtagttggtcagctgtggactctgtgacctttgtctaaacctgtgttgtaagatcttgggacttcctctctttctatgtctatctcttccccccaacactttctcttcttagtctctctctttatttttcaatctctgaatattttagtctctctctgagtctcattttttaaaatgctcttttagaacgggaaacggctcagatcctgctgtggcacggggcctatgtgtctctgtcgcgtctgctgtgaagcacatgatgctctatttattgtagagagtgactttatttgctttctagaattgtttataacagatggtataagagaggtaataaacagagaaaaatctatgcttgtaaagaatacaaaagttaattttacctactataatatgactgtctgaaacttattttctctctgagaaataaatgttctaatgggc

SEQ ID NO: 1204 - DNA, 2696 bp, Artificial
  cDNA Sequence
gaagacttttaccgcttctcctgggaagacgtggacaacatcctcatcccagagaaccgggcccatttgtccccagaggtgcagctgaaggagctgctggagaaactggacctggtgagcgccatgcggtccagtggggcccgcacccgtcgtgtccgcctgctacgccgggagatcaatgcccttcggcagaagctggcacagccaccaccaccacagccaccatcactcaacaagacagtatccaatggggagctgccagcagggccccagggggatgcagctgtgctggagcaggccttgcaggaggagccagaagacgatggggacagagatgactccaaactgcctcctccgccaaccctggagcccactgggcctgcaccttccttgtctgagcaagaatcccccccggagccccctactctgaaacccattaatgatagcaaacctccaagcaggttcctaaagcccagaaaggtggaagaagatgagctcttggaaaaatcaccactgcagctagggaatgagcctttgcaacgcttgccctgcctccatcccgcagggcacagagaagcctcttctgcccctgccagatgtatggccggcagcttccccctctcatggtaggccagggactgggctttctccccactaagggcaaggccccagttttgaccaatcgcatggttctcctggcaggcctgctgtgtgccaaaaactcccacccaaggtccctcaggggatatttcactgaagaaccagttagaagtagaaacagctgtggggcttgggcccagcttaggagattgcccagatggcaagaggtcctgggctccttcttgaggggctgcctggcccgctccatcctactcccactaactacacctcagggcgggtgaggttccgacactgatcccagagatgccgtggatacgccagggtcccagggggaatctccccaagctcacactctctcccgcttatcgcctattctcacacctcttctcggtcccatcttctgcacccattgcccagtcttgctttctctttcccatattccttttctttttctcttgtgccaaactgacagaaaccgtcaccacactggtctttttctttaatgtctcattccccttgaggccagctgctatgccaggtggtgtctctgccaggctcctcaggcccagacagaggccagcccacaacctatgaccccctcccccaggacaccacctcccacccacagaccttccctttagctgttgacacaacttcccagctctgcaagtgtgccccctggatcaaggcgggtcccctcttgtttttttctttgctgccacgaggtggtccaagccttcagggtgggctcctatcaggctgggtgtgcgagtgtccatctgtccacatggatgtcgagggtggtttgtgtggagctgtgctcgtcagctgggtctgccctcttcccccttttctccttcttctctcctcatggactttttctgcaattgcagtcttaagcttcactctccaccacctggatggcatggcgcctgccaccaaacatcttcctggcctgcgctctgccctgccctgcctagcctctgctactcccacttcccaactccagggaatgcattacttttatttcaaaccctctgcctccttccttctttctcttcaaccccctccccaccttcaccttctcaaaaatggaaggaaaaaaaaactgtgaatggggaatgctgactgacaaaccaacacaactttcagaggcttcagtgtctgttctctggacatttcttttcacctcctgagcaccaaagtcgcagggccagttgcaggccgctgattgccatgttgatttttaacctgatattctttttaattgttttaaatttttcataggggagttttggacaaaacagtcactggggagatcactgccatttttacacacttgactttttaaaaatacaaccaaccaaccaccacaacttcttatacatttgggacatgagccagagtttaaaagggaaccaacaaaacactataacttaaaaggatggggttttggattttgtataataataaaaacaatacagcatatggctagggaaggacatggtgtatataattgtaaaatactgttctaaattattcaggcctatagtttccattactggagtcctccattgtgtggccacacagtgtcgttgatttaaaggagccagtgcttcccctctccccaggtagttggtcagctgtggactctgtgacctttgtctaaacctgtgttgtaagatcttgggacttcctctctttctatgtctatctcttccccccaacactttctcttcttagtctctctctttatttttcaatctctgaatattttagtctctctctgagtctcattttttaaaatgctcttttagaacgggaaacggctcagatcctgctgtggcacggggcctatgtgtctctgtcgcgtctgctgtgaagcacatgatgctctatttattgtagagagtgactttatttgctttctagaattgtttataacagatggtataagagaggtaataaacagagaaaaatctatgcttgtaaagaatacaaaagttaattttacctactataatatgactgtctgaaacttattttctctctgagaaataaatgttctaatgggc

SEQ ID NO: 1205 - DNA, 752 bp, Artificial
  cDNA Sequence
gacccggacacccctcactccatctccttctcgggcagtggattcctctccttctaccaggcgggggctgtggacgccctgcgggacctggccccccggatgctggaaacagcccaccgctttgcggggacatcggcaggtgctgtgatcgccgccctggccatctgcgggattgaaaatgagtatctcagagtcctcaacgtgggtgtggccgaggtgaagaaatccttcctggggcccttgtccccgtcctgtaagatggtgcagatgatgaggcagtttctgtaccgggtcctgcccgaggactcctacaaggtcaccacggggaagctccatgtgagcctcacccgcttaacggacggggagaatgtggtggtttcagagttcacgtccaaggaggagctcattgaggccctatactgcagctgcttcgtcccggtgtactgtggcctcatccccccgacttaccgcggtgtggtgaaggtacatcgatgggggcttcacgggcatgcagccctgtgccttctggaccgacgccatcaccatctccaccttcagtgggcagcaggacatctgtccccgggactgcccggccatcttccacgacttccgcatgttcaactgctccttccagttctccctggagaacatcgccaggatgacccacgcattgttccccccggacctggtggtgagatcctgcacgattactactaccgagggtacgaggatgcagttttgtacttgaggcg

SEQ ID NO: 1206 - DNA, 1719 bp, Artificial
  cDNA Sequence
gtttcccggaaggatagcgattaccggagcgcctcgcgcgcctgcccgcctgcggaggacccgggcgcacacgccttggcgcttctcgaaagagatttcctcccacgcgaccttccagttctcggagccaggttaggggtttggcggaggaggactgcggggcgcgggcctagggccccagcagccacagccaggggagcgctcaagacagaaagccggtggcttcctcacctccacctgtaatgcaggagggagaattggctatttctcctataagccctgtggcagccatgcctcccctaggcacccacgtgcaagccagatgtgaagctcaaattaacctgctgggtgaaggggggatctgcaagctgccaggaagactccgcatccagcccgcactgtggagcagggaggacgtgctgcactggctgcgctgggcagagcaggagtactctctgccatgcaccgcggagcacgggttcgagatgaacggacgcgccctctgcatcctcaccaaggacgacttccggcaccgtgcgcccagctcaggtgacgtcctgtatgagctgctccagtacatcaagacccagcggcgagccctggtgtgtgggcccttttttggagggatcttcaggctgaagacgcccacccagcactctccagtccccccggaagaggtgactggcccctctcagatggacacccgaaggggccacctgctgcagccaccagacccagggcttaccagcaacttcggccacctggatgaccctggcctggcaaggtggacccctggcaaggaggagtccctcaacttatgtcactgtgcagagctcggctgcaggacccagggggtctgttccttccccgcgatgccgcaggcccccattgacggcaggatcgctgactgccgcctgctgtgggattacgtgtatcagctgctccttgatacccgatatgagccctacatcaagtgggaagacaaggacgccaagatcttccgagttgtggatccaaatgggctcgccagactctggggaaatcacaagaaccgggtgaacatgacctacgagaagatgtctcgtgccctgcgccactattataagcttaatatcattaagaaggaaccggggcagaaactcctgttcagatttctaaagactccgggaaagatggtccaggacaagcacagccacctggagccgctggagagccaggagcaggacagaatagagttcaaggacaagaggccagaaatctctccgtgaggggcaggtggactccaggcacccggtaccgatggggcagggaccgagtctcccatgaaggcagactcctcctcccagcagagcagcaggatccccagccagactctgtacccacaggattacagccattgcttgggaaggctgggaggcctcccatccaggacactgggggcaggagtgtcatcttttgggcagggcaatcctggggctaaatgaggtacaggggaatggactctcccctactgcacccctgggagaggaagccaggcaccgatagagcacccagccccacccctgtaaatggaatttaccagatgaagggaatgaagtccctcactgagcctcagatttcctcacctgtgaaatgggctgaggcaggaaatgggaaaaagtgttagtgcttccaggcggcactgacagcctcagtaacaataaaaacaatggtagctga

SEQ ID NO: 1207 - DNA, 1488 bp, Artificial
  cDNA Sequence
gtttcccggaaggatagcgattaccggagcgcctcgcgcgcctgcccgcctgcggaggacccgggcgcacacgccttggcgcttctcgaaagagatttcctcccacgcgaccttccagttctcggagccaggttaggggtttggcggaggaggactgcggggcgcgggcctagggccccagcagccacagccaggggagcgctcaagacagaaagccggtggcttcctcacctccacctgtaatgcaggagggagaattggctatttctcctataagccctgtggcagccatgcctcccctaggcacccacgtgcaagccagatgtgaagctcaaattaacctgctgggtgaaggggggatctgcaagctgccaggaagactccgcatccagcccgcactgtggagcagggaggacgtgctgcactggctgcgctgggcagagcaggagtactctctgccatgcaccgcggagcacgggttcgagatgaacggacgcgccctctgcatcctcaccaaggacgacttccggcaccgtgcgcccagctcaggtgacgtcctgtatgagctgctccagtacatcaagacccagcggcgagccctggtgtgtgggcccttttttggagggatcttcaggctgaagacgcccacccagcactctccagtccccccggaagactgccgcctgctgtgggattacgtgtatcagctgctccttgatacccgatatgagccctacatcaagtgggaagacaaggacgccaagatcttccgagttgtggatccaaatgggctcgccagactctggggaaatcacaagaaccgggtgaacatgacctacgagaagatgtctcgtgccctgcgccactattataagcttaatatcattaagaaggaaccggggcagaaactcctgttcagatttctaaagactccgggaaagatggtccaggacaagcacagccacctggagccgctggagagccaggagcaggacagaatagagttcaaggacaagaggccagaaatctctccgtgaggggcaggtggactccaggcacccggtaccgatggggcagggaccgagtctcccatgaaggcagactcctcctcccagcagagcagcaggatccccagccagactctgtacccacaggattacagccattgcttgggaaggctgggaggcctcccatccaggacactgggggcaggagtgtcatcttttgggcagggcaatcctggggctaaatgaggtacaggggaatggactctcccctactgcacccctgggagaggaagccaggcaccgatagagcacccagccccacccctgtaaatggaatttaccagatgaagggaatgaagtccctcactgagcctcagatttcctcacctgtgaaatgggctgaggcaggaaatgggaaaaagtgttagtgcttccaggcggcactgacagcctcagtaacaataaaaacaatggtagctga

SEQ ID NO: 1208 - DNA, 298 bp, Artificial
  cDNA Sequence
cagccatgccatgtgcatcctcatgggcctaagagaccactacaattgcacccagttcccatacagggaggaccagccgaacatcacaagtcctaaggttgaaagtccagattgaaagctgtgtcttgcactcaaattcccttgaactagccaaatggttcgcagctttagccaggagaccctgaagatgctctgtgatgtcccaatccctgcttcacaaacgtgatggaagacaagagcagacaatcattctgtgtccataccctagtatctgagaagcacagagcattcttccaca

SEQ ID NO: 1209 - DNA, 319 bp, Artificial
  cDNA Sequence
cttgccttgctggagaaggggctcaaggcacaggacttgcctcggacttgccaaggaggcttgcaggaggctctttgtctactcctctgtcctcatccaacaaatggttgttccagaaaaaatgcagcaacacctgaactcttctaaagaaaaagaagacaaaatgatctagtgcatctctgccatcctgttgaagatcctatttgaaaaaagggagacacagagaaaggtttttttttttttttaaaagtgatagaataatccaaagttaaaaattcaacacaatggaaaatattaattcaatccatgctgcaaacaa

SEQ ID NO: 1210 - DNA, 528 bp, Artificial
  cDNA Sequence
ccgaagttctctttcagccttccctgctcagccacctgtggaggaactaggccaagaacagccccaagctcttcttgtctcttcaaaaccaaaaagcgccgtgcctctggttcatgtgaaggaaaccgtcagcaagccttatgtaacggagagccctgctgaagactcaaactgggtgaataaggtcttcaagaagaacaagcaaaagacaagtggcaccagaaaaggcttcccaagacattcgggatccaaaaaaccaagcagcaaagtgcagaagctgtgagccgagagagagaacgggagctggaacgggagagaacctgaggaccctgaggccaagcctgcttctcactgctgtccggcacactcccctgactctgggcccttttgaggaccaggggcaacacctattcccagccccgatggtgcacaagatctgtttcccttccagggtgagcatctcagcttcctgcgatcctttcaacccttccactaccctactctggacagactgatggatgccagcac

SEQ ID NO: 1211 - DNA, 782 bp, Artificial
  cDNA Sequence
ggggccgcaccgtaaatgggtgtcgcctttcctccagtccactctgcacccaacctcagcgggcgcacttttctgagttgcgcataccctctcaattattaaaggttgcagacggaaaagttagtagttttcggaattgtagaatacgctcgtgcagcgccaggacggctaatgcttacccgaaaatgtggaaccctgatctccccatgcgtggagcgaggttggaggtagcgtagtaagaatactggagttgcttaaacgcatttgctcgaaagtcactaccctggatatacattctggccaaaagaaagggggaaaaactccacatttttctcaaatactgagtttcatgaagagaacctccaacaaatggtatataaaggaaaacaaagcaaacaaaagagggaaactttgcaatttattaactcaagcatgaaaatacagaaaataaagagggctcaacatacttggaaaagtaagtcggaaaaaacatgaagaaaaaacatgatggcattgtttatgaaactaaagaagttctcaatccatctcccaaagtaacacattgttgcaaatcactgtggttaaaatacagttttcagaaggcatacatgacccaacttgtcagctcccagccagttccagccatgtcaaggaacccagatcataatctactttctcagcccaaggagcatagcattgttcagaagcatcaccaggaggaaataattcacaagttggccatgcagctgagacacattggggacaacattgatcataggatg

SEQ ID NO: 1212 - DNA, 5399 bp, Artificial
  cDNA Sequence
cggggcggggggcgcgcgccgctgcggcacagccggtcccggctgcggcttctggctgcgcggcctgcgcgcgcctcccgggcggattccagccccgagcgggacagcgcggcggggagcgacgagatttctctctgatcaaacggacagttcaggactcagaatctaaggatgaatgttcaccgtggcagtgacagtgacaggttattgcggcaggaggccagctgcttagtggatgatactttagctgtagcccaagaaaaagaagcaaacagcctggcttcatctggtcctcataatcttacttatcctctaggtcccaggaatgaagacctctcacttgactatgcctctcagccagcaaatcttcagttccctcacataatgccccttgctgaagacatcaaaggttcttgcttccaaagtgggaataaacggaaccatgaaccttttattgctccagaaagatttggaaacagtagtgtgggctttggcagtaattcccattcccaagcaccagagaaagtgacgcttcttgtagatggcacacgttttgttgtgaatccacagattttcactgctcatccggataccatgctgggaaggatgtttggaccaggaagagagtacaacttcactcggcccaatgagaagggagagtatgagattgctgaaggcatcagtgcaactgtatttcgcacagtgctggattattacaaaaccggtatcatcaattgtcctgatggcatctctatcccagatcttagagatacttgtgattatctctgcattaattttgacttcaacactatccgatgtcaagatctgagtgctttactccatgaactgtctaatgacggtgctcataagcagtttgatcactacctcgaagagctcatcttgcccatcatggtgggctgtgccaagaaaggagaacgagagtgccacattgttgtgctgacggatgaggattctgtggactgggatgaagaccaccctccaccaatgggggaggaatattcccaaattctttatagctccaagctctacagattcttcaaatatattgagaatagggatgttgcaaaaacagtgttaaaggaacggggcctaaaaaacattcgcattggaattgaaggttaccctacctgtaaagaaaaaattaagagaaggcctggcggccggtctgaagtcatctataattatgtacaacgccccttcatccagatgtcatgggaaaaggaagaagggaagagtcgccatgtggatttccagtgtgttcgaagcaaatccctcacgaatctggtagctgctggagatgatgtcttggaggaccaggagatattaatgcatcacccaccccaagtggatgaacttgaccggctaaatgccccactttctcagatggcttctaacgactttcaggattagggccagctgtgggtctactccttgttggagcccatctcacctgggatgcctgcagccagccctccctcgtgatttgtctcaccttgagtaggagacatgcttctcccctaaccttttcctttctgccataattaacatatgtccttttcagtaagtccatgcctctggcaggggatgaagaagtactcactggtaattagctaccatctttgcagcagccctggtaacttgaaaaatttgggtctggtgctgttcattgagtctttgtgtaactgcaaaagcaggaaaggaagtcaagactcctgttgcctcgtgcttagcaaagcagtccttatcctttatactctgttcttgggttttgtttttgtcttgttttataccaggcaaattgcttagtagcaaagggaccaaactgaaaaggtgacaatctctaacttctaaaagcagacaccaatcggatgctcattagaggttaatgaagatgccattcttggtggcctctgcacccaaattgcatctggaaagaactagggtctcattcagaatgtccaaaaggaaattcttaagagcttaaattcagatttgtgtctcattaatgcagtgaacaattcaaaaccacacagattccttggcaggaaggataatggaataacagtgttgatgagacctttttagcttcaaggtttcggagtctaaacaaatggatgattcatttggaatgaaactcacaatgcaagtagaaggacctctccaaatcaggccagttgggttatcctggcttggaatctggtgtgaaaccataggtcttaacactctggagcagcacattgctgtggatatgtccaggagaccttagatatggcttaaaggctttcaagatgaggacagaaattgcttacaattgctcagtttctcaacagaaagactcataagagtgccagcatggggtacatggagtgaagctgggtgggaagcatcatctgcacagtccctgtcctagtgcaggacttttctctgtatgttttcataccatgggatttttggatatcagtgtattttggttcttgaaatagcctaatagctgctcacacattgggtaggaatattataccaatgtcatccccaaaggaagggtgagctgaatggaaattaagcccagtcattttatttgatctattagctctgttatcagtgcatgatcacccagatcaccctcctcagcccacacagtgctgaaccatcttccctcctgttctccatggctattaatagtatagctaaatttagagtgcagagccagatataagtattttggaattatctcccagtttgtggtagaagctgactggaatacaggttgagtatctcttatccaaaatgctagggaccagaaaggtttcagattttttcagattttggaatacttaacagttgagcaccccaaatctgaaaggcttctgaacgtcatgtcagcactcaaaaaagtggattttggagcacttcaaatttcggatttttggatttgggatgctcatcctgtgtaggagaggctactcgattccatttaatgactgtcctagtcataatcatccaaagataaaagccaggtagatgttgaaagctctttccagggctgaaaaagtgttcttacgttctctgcatgtgactagcatcactgtggaaattaatgctctgttcttcactagaatgtagtaagtggttaaactgagctatcccccacctgatgactattggcatccatttgcaaggccaatggcctggattaagggttaggattatttgtagctagaaggtaattttatttctgtgaaactaattggctcatatttgaggttaggtgtggccttgaccttaccagtacatttatacccactaccagttgactagcccagataattgttaaatggtgcttcttttctgcttctcagtagacttccatgccattacaaaggaaatttgaattacctagtgtttgtatattccatgataactatgtataacttctgttacacagcttatgtattgttaacatttaagtgtaaaccatgccacagctaacacttaaaaatgaaaactaattagttcttgcttagggaaaatgccaggtatgaagtatggcatatacttgacactgtcctgtgtaaccctttactttgctcaggctttcaagattgagtcttttttcccccaaattaggttaacatgcatttgaccccaacctgtggggtttgagtaagctggaaatctgtgacggtaggctttctagtgtcacgaggtggtggtgactgaaggaaaagctgggatcacaggttccttctgatggagaggaaggtttatttctatgcccctcccaccaccctccacctagagctcacccaagcctgctccagtcccaggggcaggccattctgcaaaagcaggacctcacagaaacaagggctgggttgaggtcacccccttcagagttggttcctggccagatgggtaagaggcatttgtaattttaaaaatgtgaaacttgggtttggtgttttcttctaagtgcctaaataagcaagccaggctgttgatattttagccagagaaatcggcaagccaagattaacccgaatctgaagtttagaatcttgagtttgcatctgcatcatatcatgctgttttgatgaggaaacatttgccactgaggagttggagggagggcaagacgacagtgttaagtcagatcatttaatggtttcccctaagccctggaaaaatatttgaaagaatggcagcaaaaaggttaagaaagcaagccagatttactgcacaatatgcagtacccagtactactttaaatcccaagagaacagtgtgatgtctaatatatacaggtctatgaaaatactgtggaataagcccaggaaggttagatgtgtttgcaaataagttgcccaaagggtccccctctaagtaaaacaaatattcagaccacaggctttaatgtaaactgtcaaaaagtgggatgtggaggatttttgttaagtgtcaatcgaagttaaaaagcaagggtttttggccaggcgtggtggctcacgcctgtaatcccagcactttgggaggccgaggccggcaaatcacctaaggtcaggagttcgagaccagcctggccaacatggtgaaaccccgtctctactaaaaatacaaaaaaattagcccggtgtggtggcaagtgcctgtagtcccagctacttgggaggctgaggcaggagaactgcttgaacccgggaggtagaggttgcagtgagccacgatcatgccactgcactccagcctgggcaacagagcaagactccatctcaaaaaagaaaaaaaaaaattaaaggttttggctgggtgcagtggctcatgccggtaatcccagcactttgggaggccaaggtgggaggatcacttgaggtcaggagtttcagactggcctgggcaacgtaaaaaattaaaaaaatagccaggcatggacatggtagtgcatacctgtggtcccagccactcaagaggctgagacaggatgattgcttgagcccaggaggatgaggctgcagtgagccatgatgacgctactgcactccagcctggatgacagggcaagaccctgtctcaatattttaagtcaagggtttgtagtaatgtattcagtgccacttcttgccatcactttgcaattattgaaatgggaatactgagctcagaaagcaaatatgatgctttcatgggagatggagccacatttgtgttctgggtgggatcactagtgcaggagaacattacattttcttctgaaggcaaaatgcttgtaggttttgcctctactttgtatttacttttaaaattgcacttgttcacctaccagtgtttacgaaatcctgtatttgggatgctttttctataataaaatattataatttgtg

SEQ ID NO: 1213 - DNA, 3576 bp, Artificial
  cDNA Sequence
ctcggccccgggctgccgcgccagcccgtctccgcggcgggggaccgggctgccttggcccctcagcgctcgcgtcttttccggcagttggaacgcttcctgttgtcctcacccgtaaccgcctgttgccccctgtctcagagtccctcacgcgtcccctcccgtctttggctcgttggctgccgccgccggggcttcgccagccttcaagtcgagactactggccgaaggggcgtctgcggctctccgccgtccccagccctgcctctccctgggctctgcagccatggcaatgacaggctcaacaccttgctcatccatgagtaaccacacaaaggaaagggtgacaatgaccaaagtgacactggagaatttttatagcaaccttatcgctcaacatgaagaacgagaaatgagacaaaagaagttagaaaaggtgatggaagaagaaggcctaaaagatgaggagaaacgactccggagatcagcacatgctcggaaggaaacagagtttcttcgtttgaagagaacaagacttggattggaagattttgagtccttaaaagtaataggcagaggagcatttggtgaggtacggcttgttcagaagaaagatacgggacatgtgtatgcaatgaaaatactccgtaaagcagatatgcttgaaaaagagcaggttggccacattcgtgcggagcgtgacattctagtggaggcagacagtttgtgggttgtgaaaatgttctatagttttcaggataagctaaacctctacctaatcatggagttcctgcctggaggggacatgatgaccttgttgatgaaaaaagacactctgacagaagaggagactcagttttatatagcagaaacagtattagccatagactctattcaccaacttggattcatccacagagacatcaaaccagacaaccttcttttggacagcaagggccatgtgaaactttctgactttggtctttgcacaggactgaaaaaagcacataggacagaattttataggaatctgaaccacagcctccccagtgatttcactttccagaacatgaattccaaaaggaaagcagaaacctggaaaagaaatagacgtcagctagccttctccacagtaggcactcctgactacattgctcctgaggtgttcatgcagaccgggtacaacaagctctgtgattggtggtcgcttggggtgatcatgtatgagatgctcatcggctacccacctttctgttctgagacccctcaagagacatataagaaggtgatgaactggaaagaaactttgacttttcctccagaagttcccatctctgagaaagccaaggatctaattttgaggttctgctgtgaatgggaacatagaattggagctcctggagttgaggaaataaaaagtaactctttttttgaaggcgttgactgggaacatatcagagagagacctgctgcaatatctattgaaatcaaaagcattgatgatacctcaaacttcgatgagtttccagaatctgatattcttaagccaacagtggccacaagtaatcatcctgagactgactacaagaacaaagactgggtcttcatcaattacacgtacaagcgctttgagggcctgactgcaaggggggcaataccttcctacatgaaagcagcaaaatagtactcttgccacggaatcctatgtggagcagagttctttgtataacatcatgcttttcctctcacactcttgaagagcttccaagaagttgatggaacccaccaatatgtcatagtaaagtctcctgaaatgtggtagtaagaggattttcttccataatgcatctgaaaaactgtaaacaaagacaaccatttctactacgtcggccataaacagctatcctgctttggaagagaagcatcatgagccaatttgataggtgttttaaaaataacttgagttttcctaagttcatcagaatgaaggggaaaaacagccatcatccaacattattgagattgtcgtgtatagtcatcgaatatcagccagttcctgtaattttgtgacacgctctctgccaagcccaccaagtatttcctttatagctaaaagttccatagtactaaggaaataaagcaataaagacagtctcagcagccaggattctggctgaaggaaatgatccgccaccctgagggtggtgatggtagtttctacccatacctcagcctcaggcgagtggcttatagcctccattcatggtgcactttatttatggtactaagataaagactgtcaatccattgatttatctcctcctgtcccccatctaaaatacccatgctgcttttctgagtgttgatgggggttaccagcttgatccactgttgctcttagaaggcccagaaagtctttgggcattgccaagaaatcccggattatgtggaaaaccctcactttctcttcacggctgtaccagaaaatccctaagacagatcttgccgtggactagcaatacctgcaagtgctgccaatgggaactcaatttattcctgggaacctaacgaggagagcccaggcctaggcaggaggcctggaaccctcttggctaaggtgctgttcctgttcctgcaaggtctccagaacccctttggaaatggtgaaggaaccagcccaatagaagtacagagccagctgacaagtccttgtaaagctcactcctcagtccttggcacagccatgttttgtcttctctcttggtatttcttctctcccaactttagccattttgccttggaatcatgattacaattttttcctttgcagatgccttcctgggggatactcctccccaccctaaagggtcgcctgcaacttaggcggattgggtctctctgctgtggcgttctctcttgagagaccctctgaattttagcacaaagtgccttctgtttcacagctgccaccacctttagaggaatttcgtcagaaaaatgtggaggctccatattaatgcattattttttaaaaagttttgataactcttaaagcatcatttgcacctatgtgggaactttgcctgttgcaaagtattgtggccgagctgcagctgggagcctgctttctgccagtcttgaggttctgaagatcagctttgaaaggaaagtatgtcctagcttagccattcagaagagaaaaatggaatatcagagttacagttgtcagtgaaactactttggattttaacctcttagaggaagaaaaaaggttagggaagtgtcaactctggatgaaggtgatgtgtttgcctctcagtctttcattcatagcctgctagtgaaaaggaagtaaatgagattcttttgtgtgactttgtagtctctttgtattaccaaatagttggggtgttgactcctgtgtgttttgcaagaatgtgtggtaagcctgggtaaagagaaggaactgcggtgttgggagagtctttgtgttggggagtggcaggggatgatttgtttcaggggaaaatgcccacattttaacttttaaacttctgaataaactgtgtaaaaaca

SEQ ID NO: 1214 - DNA, 1094 bp, Artificial
  cDNA Sequence
gagagttggttggtgttgggccggaggaaagcgggaagactcatcggagcgtgtggatttgagccgccgcattttttaaccctagatctcgaaatgcatcgtgattcctgtccattggactgtaaggtttatgtaggcaatcttggaaacaatggcaacaagacggaattggaacgggcttttggctactatggaccactccgaagtgtgtgggttgctagaaacccacccggctttgcttttgttgaatttgaagatccccgagatgcagctgatgcagtccgagagctagatggaagaacactatgtggctgccgtgtaagagtggaactgtcgaatggtgaaaaaagaagtagaaatcgtggcccacctccctcttggggtcgtcgccctcgagatgattatcgtaggaggagtcctccacctcgtcgcagagtcaccatcatgtctcttctcaccaccctctgaatctgcattagccagtcaactagccctttcagcgtcatgtgaccagcgcgccccattcagcttggctggtgtcgtttcacatgacccaggctggccagtcgtcaggttgcaccgccctttggttcccgagcatgctgttttctctcagccttctctccaaccttaaccaaatcggcagcagccacctcgaccgcccacacattcctggccaatcagctcagctgtttatttaccaaatgtcttcacaacaactacagcagcagccttcggctaacaaaaaagcaggaaaaatccacaacacccccttcgccaaccaactaaatccaacgcaacatctggcaaaaccttttcagcaaattcttcctggccgtcagtccggcagcctcacctcaccatttctagcttgttgaaacccaaaactaatctccaagaaggagaagcttctctcgcagccggagcaggtccctttctagagataggagaagagagagatcgctgtctcgggagagaaatcacaagccgtcccgatccttctctaggtctcgtatcgatctaggtcaaatgaaaggaaatagaagacagtttgcaagagaagtggtgtacaggaaattacttcatttgacagg

SEQ ID NO: 1215 - DNA, 2054 bp, Artificial
  cDNA Sequence
tttcgtggacgccgggtgagtgagagagttggttggtgttgggccggaggaaagcgggaagactcatcggagcgtgtggatttgagccgccgcattttttaaccctagatctcgaaatgcatcgtgattcctgtccattggactgtaaggtttatgtaggcaatcttggaaacaatggcaacaagacggaattggaacgggcttttggctactatggaccactccgaagtgtgtgggttgctagaaacccacccggctttgcttttgttgaatttgaagatccccgagatgcagctgatgcagtccgagagctagatggaagaacactatgtggctgccgtgtaagagtggaactgtcgaatggtgaaaaaagaagtagaaatcgtggcccacctccctcttggggtcgtcgccctcgagatgattatcgtaggaggagtcctccacctcgtcgcagatctccaagaaggagaagcttctctcgcagccggagcaggtccctttctagagataggagaagagagagatcgctgtctcgggagagaaatcacaagccgtcccgatccttctctaggtctcgtagtcgatctaggtcaaatgaaaggaaatagaagacagtttgcaagagaagtggtgtacaggaaattacttcatttgacaggagtatgtacagaaaattcaagttttgtttgagacttcataagcttggtgcatttttaagatgttttagctgttcaaatctgtttgtctcttgaaacagtgacacaaaggtgtaattctctatggtttgaaatggatcatacgaggcatgtaataccaagaattgttactttacaatgttcccttaagcaaaattgaatttgctttgaacttttagttatgcacagactgataataaacctctaaacctgcccagcggaagtgtgtttttttttaaatttaaatacagaaacaactggcaaaaattgaactaagatttacttttttttccatagctgggatataggctgcagctatagttgaacaagcagtctttaaaaactgctgtgaaacacaggccatcagggaaaacgaaatgctgcactattaaattagaggtttttgaaaaatccaactctcatcctgggcagaggttgcctagttggtatagaatgttaagtttcaagaaagtttacctttgctttaggtcataagttccttatttgattgctgtatatggatacatggctgttcgtgacattctttatgtgcaaatttgtgatttcaaaaatgtcctgccagtttaagggtacattgtagagccgaactttgagttactgtgcaagatttttttttcatgctgtcatttgtaatatgttttgtgagaatccttgggattaaagttttggttacaaattgttctttaacttgaaagcctgtttttccttgcaaactcaaatctgtgagcttggtaccaagtccaggtataacattcctattggaagccatacttatattttcttgtaaagtgcttttgaattaataaaatattagcataattgtgtatagtcagttgaacccactgttaccattgttcttatcccatgggaagcagttggttacacgattcttattttataagaaacagctgagaggcactatggattagtcttctgaagtgaaggaaatatagatgtcacctaagtgatagttaacccattttttttttttttaggcatagaagccagttcagggtccataatatttagtgaccaacattttaaagtatagcagcaacctggttcttaaacacaaagtaagttgcccattaacaaatggcttttatctttagcatgaaaactttccacaggtctaaaaattgcttccattttataatttgaggtgttgcatgggaattctaagctgatccatcatgatgtaaaagttcacaatatggttcaaatgtaacagtgcagaattgaatatggaggcatgcataaccttcctcttagaaaatggcaggtgttgtaatttcaaatttttgtgcaattagattaaatcataatgcaacagtc

SEQ ID NO: 1216 - DNA, 1454 bp, Artificial
  cDNA Sequence
atgacgaagggccttgttttaggaatctattccaaagaaaaagaagatgatgtgccacagttcacaagtgcaggagagaatcttgataaattgatagctggaaagctgagagagactttgaacatatctggaccacctctgaaggcaggcaagactcgaaacttttatggtctgcatcaggacttccccagcgtggtgctagttggcctcggcaaaaaggcagccagaatcgacgaacaggaaaactggcaggaaggcaaagaaaacatcagagctgctgttgcagcaggatgcaggcagattcaagacctggagctctcttccgtggaggtggatccctgtagagatgctcaggctgctgaggagggcgcggtgcttggtctctatgaatacgatgacctaaagcaaaaaaagaagatggctatgtcggtgaagctctatggaactggggatcaggaggcctggcagaaaggagtcctgtttgcttctgggcagaacttggcatgatggagacgccagccagcgagatgatgccaaccagatttgccgaaattattgagaagaatctcaaaagcgctagtagtaaaccgagtttcatatcagacccaggtcttggattgaggaacaggcaatgggatcattcctcagtgtggccaaaggatctgacgagccctcagtcttcttggaaattcactacataggcagccccaatgcagacaaaccaccccttgtttgttgggaaaggaattacctttgacagtggtggtatctccatcaaggcttctgcaaatatggacctcatgagggccgacatgggaggagctacaactatatgctcagccattgtgtctgctgcaaatctcagtttgcccattaatattataggtctggcccctctgtgaaaacatgcccagcggcaaggccaacaagctgggggatgttgttagagccaggaacaggaagaccatccaggttggtaacactgatgctgaggggaggctcatactggctgatgcgctctgttacgtgcacacatttaacccgaaggtcatcctcaatgccaccaccttaacaggtgtcatagatgtagctttggggtcaggtgccactggggtctttaccaattcatcctggctctggaacaagctcttcgaggccagcattgaaacaggggaccgtgtctggaggatgcctctcttcaaacattgtacaagacaggttgtagattgccagctggctgatgttaacaacattggaaaatatagatctgcgggagcatgtacatctgcggcattcctgaaagaattcgtgactcatcctaagtgggcacatttagacatagcaggtgtgatgaccaacaaagatgaggttccctatctatggaaaggcatgaccgggaggcccacaaggactctcatagagttcttacttcgtttcagtcaagacaatgctta

SEQ ID NO: 1217 - DNA, 937 bp, Artificial
  cDNA Sequence
gagcgactgctccgactcatctctgctggggtctgtggcctcatcctgctggtggggctgtcagctaatgggctcatgctgctggtggtgggccggggcccgggctccccccacccgctccactccctgacccacagcctcatgatgaacatcacgccatctgacctgctcttcctggcctgcgtggtgcctgtgctgctgctgagcttcctgcagcacaactggtggctgggccctgccatctgcaccattagccaggccaccaacacagccaccacgttctgcatcttctatagcatggtggccacagctctcctgcgccatgtggctgtggcccggcctgacctggccttcccagccggctggggcaccctcttgctgctctgtggggccatgtgggccctgggccttacagaatccctgcccaactggctgttccagagggtggcagtggaggaggagacagcgggggctcccaagacccaggcctgcctcttgctcctgagccctgctgggacctcctgctacatcagcctgctgggagccctggccttcctgccatgcacgctggggctgggctgctctttcagccacgtgggctggctcctgtggacccagccccaaggtcccatgggagagagcatccaggagcattaagagaacatagggctcagccttgtggtgctggtggtttttgtgctgatgtgggggccctgctccatgctgggttatgtggcagccatgggctacctgcctgccacaccggctgcttttgtggcctccagcctctgcaccatcctggcctactccaattgcgctgtcagccctatcctctgcttctacctctcccgccccttccaggcaggactcagggacctcttctgcaggccgatgatggccaggcatcccagaggtgtgggagtggcagcctcagtgg

SEQ ID NO: 1218 - DNA, 3897 bp, Artificial; identical to SEQ ID NO: 527
  cDNA Sequence

SEQ ID NO: 1219 - DNA, 2455 bp, Artificial
  cDNA Sequence
gaagagaccacggtaaagatcagctgacggcctctgtgggaacaaagacagggaaaggggaaatgagttcaccagaaaccaacaggcagcacaggaggtggtaaacccgaaaaagaaaatgaagaaaaagaaatacgtgaattctggcacagacccagatcaacttcactgtggccattgatttcactgcctccaatgggaacccctcacagtccacatccctgcactacatgagcccctaccagctgaacgcctacgcgctggcgctgactgccgtcggagagatcatccagcactacgacagtgacaagatgttccctgccctgggcttcggggccaagctgcccccggatggcagagtgtcccacgagttcccactgaatggcaaccaggagaacccctcatgctgtggcatcgacggcatcctggaggcctaccaccgcagcctgcgcactgtgcagctgtacggccccaccaactttgcccccgtggtcacccacgtggccaggaatgcagcggccgtgcaggatggctcccagtactcggtgctgctcatcattactgatggggtcatctcggacatggcgcagaccaaggaggccattgtcaacgctgccaagctccccatgtccatcattatcgtcggcgtgggccaggcagagttcgacgccatggtggagctggatggcgacgacgtgcggatctcctcccgggggaagctggctgaacgcgacatcgtccagtttgtacccttccgggactacgtggaccgcacaggcaaccacgtgctgagcatggcccgcctggcccgagacgtgctggcagagatccctgaccaactggtgtcctacatgaaggcacagggcattcgcccgcgtcccccacccgcagcaccaacccactcgccctcgcagtccccagcccgcacgccccctgcgtcccccctgcacacgcacatctgaacctggtctcagcaggcaggtggctggggcctgggagaggccaggtgaatgggaggccagggccccagactccccgaagttggcctgcccggcctttgggacatctgtgtgcctgggaggctgccagggggtggggcttctgaagacccctcctcaatttcttggcctcacttattgcccaaacccagggagttaggggggtacgggtgaaagaggggtacacagggacccagcccttctcttcttccccaatacctggctctaacccagccaggaaggtgtaaacaataagggtgattggggtccctgtcgcccacccccggcaatcctatttgcttacctgtcaccctgaagcctgggcttggcctcctccagccccccatctccgtcccatcctcccatggtgtctactcctgtccctgagccccgccctgtggtctatcctgtgcccgatttccagtgaaccccatgaagctgatgggtttgcaggaaggcctgaacatgtgcaccctcccagggacactggatgcgctgggagccccggggaccccatggggtgctgtaatcatggaccgtaggccatgtgatgggcctgaagtggaggctgctcagcacagagccctttctggtgcctctcgaactcagtacgatgcaagttctagacacacagatggcctgtggaggcctctccctggtgtgggcccacaggtacttccatggttgactcctggcttcaggaatcccttcctccctccagaggcttcccagggccctcggtgcccacgcctctgcccatctggaggcctgagtaaggagtggctcagccccacgttcccacactgctcctgctctttgccctgtatcccatgaggctaggagacaggagtcctgggtttgagccctgcctccccccactgcctaatgtgggaacccaagcaaggcccttctaccttttgggcctcagtttccatgtctgtaccacaagagggttgaccagatggccccaggttttcctttaggtctgacatcctgagggtcattcatcccatgcccagttccccccatcctactcctaacagatgtgaccctacttgaggccgccttggcttttgggtcaccctgtctcatcccatcaccccaaacataccctagtccttcagcctggggctctggcatctgagcccgagctcctgcccctgctgtgggaaaggtggggaagaaggggatctccctcccgggcccacccagctgcccagcctttgcccactcggggagcagatcatgcatgccaatccctgttgccgcatggagctcctcagcccactgacctctccgtgcctggtgcaggccaggcccccgtcttccgcctgcctctgcttccccgtcatgcatggtggtggtgtttctacggtgtctggttctgtgcccgtctctgagacagtctctgtgtggaatttgccttaaactgaagtaaatttggttcttttagtaaa

SEQ ID NO: 1220 - DNA, 612 bp, Artificial
  cDNA Sequence
gaagagaccacggtaaagatcagctgacggcctctgtgggaacaaagacagggaaaggggaaatgagttcaccagaaaccaacaggcagcacaggaggtggtaaacccgaaaaagaaaatgaagaaaaagaaatacgtgaattctggcacagtcaccctgctttcctttgctgtggagtcagagtgcaccttccttgactacatcaaaggaggggtatcagtttcctcctctgtacacaaagagaacggaataggacccagatcaacttcactgtggccattgatttcactgcctccaatgggaacccctcacagtccacatccctgcactacatgagcccctaccagctgaacgcctacgcgctggcgctgactgccgtcggagagatcatccagcactacgacagtgacaagatgttccctgccctgggcttcggggccaagctgcccccggatggcagagtgtcccacgagttcccactgaatggcaaccaggagaacccctcatgctgtggcatcgacggcatcctggaggcctaccaccgcagcctgcgcactgtgcagctgtacggccccaccaactttgcccccgtggtcacccacgtggccagg

SEQ ID NO: 1221 - DNA, 2565 bp, Artificial
  cDNA Sequence
atgctgcagagggagaggacaacagctccagtaaacaaaaaggtcagggcagacaggagtattatggaactgctccaggactcttgattttcaagcttatggtgtcaggaatgggatctaaagtggagcttctagcgacccccaggagcactgagtgaacatgcaaggtacctgcaggatccacttgtgtctattgatctctcacagcagctggggatcacagaacctgcagattggatcgtctgagaacaccagagaaagagaaagactgtccttgccatccacactacagcaaaactttggagctttaaaccttgggttcataatctcacagctgagaagggtccctccacactcctggaactgtacatccattggaacccttaagggattttatattggaagacatggatcttgctgccaacgagatcagcatttatgacaaactttcagagactgttgatttggtgagacagaccggccatcagtgtggcatgtcagagaaggcaattgaaaaatttatcagacagctgctggaaaagaatgaacctcagagaccccccccgcagtatcctctccttatagttgtgtataaggttctcgcaaccttgggattaatcttgctcactgcctactttgtgattcaacctttcagcccattagcacctgagccagtgctttctggagctcacacctggcgctcactcatccatcacattaggctgatgtccttgcccattgccaagaagtacatgtcagaaaataagggagttcctctgcatgggggtgatgaagacagaccctttccagactttgacccctggtggacaaacgactgtgagcagaatgagtcagagcccattcctgccaactgcactggctgtgcccagaaacacctgaaggtgatgctcctggaagacgccccaaggaaatttgagaggctccatccactggtgatcaagacgggaaagcccctgttggaggaagagattcagcattttttgtgccagtaccctgaggcgacagaaggcttctctgaagggtttttcgccaagtggtggcgctgctttcctgagcggtggttcccatttccttatccatggaggagacctctgaacagatcacaaatgttacgtgagctttttcctgttttcactcacctgccatttccaaaagatgcctctttaaacaagtgctcctttcttcacccagaacctgttgtggggagtaagatgcataagatgcctgacctatttatcattggcagcggtgaggccatgttgcagctcatccctcccttccagtgccgaagacattgtcagtctgtggccatgccaatagagccaggggatatcggctatgtcgacaccacccactggaaggtctacgttatagccagaggggtccagcctttggtcatctgcgatggaaccgctttctcagaactgtaggaaatagaactgtgcacaggaacagcttccagagccgaaaaccaggttgaaaggggaaaaataaaaacaaaaacgatgaaactgctttctgggggttggttacttagttacctgccctttgcatgcatgtgtgaaccagctgtgagctgcaaggcagtggccagagcctcgccctcctgactcttcctgcaggtggctcaggaaggattcagcctggccacttggctaggactctgccagcacccatctgagactgacctcttccgggcctttggacactatgaccttgatgctgcccttcaggcaggaaacagggctggtgcctttcttcacctgcatggccagcttccttccctggcagtggagagggcagccaacaggttctaatgtcagagccatcctttaccaggtgggcctgcttgtccctgtcttgcctgccacatcactctactttttggaaggccatggctgattaaagaagttcttgtagtttcccaagcaaagtggaatctagaaacagtgaaaaaagttcagataactttgaattgcattcaagaagtacacttctttcccattgtccgtggctcttggagtctccgtgatgccaggctagagtctgattatataataattcaaaatggtaactcccaaggtaatgctttcttccatttcatcaggttcttttatccccactgcaccccctccccttctcccttgcctatctggatggcttctcagaagctcggccctagtcctccctgccttggcggggccagagcccactactgctgaggcagcactgctctcgtcagctgtgttgcctttaccaagtgtcttcagagggttatgagttagagtagctggcctggggagagggtgcctccctgggtttgatctttagggtctgactttctgcagagaagatgttttacagatgtgtcaaagctgatgtaatgtggttgggggaggaaatccagacccaaagtgtttgtcagctgggtgtacaactgcctatgtgatcctctgtcttaaaatgatttctgtctgtgctgcgaaacaaagacaaggtgaggtgtttttcttttttgtaataatataaagctgtgtgtttctg

SEQ ID NO: 1222 - DNA, 1309 bp, Artificial
  cDNA Sequence
gaagcgctggacgagaggaggaattactctagggtacaaggcctcgcccaggagtggggggttgcttccgggtcgcgctcccggaaacaggaagttgcccatcctcctcgcccggcggcagctgtccccgaggcgggaggagcccgaggggcgcgagccccgcatggattttatattggaagacatggatcttgctgccaacgagatcagcatttatgacaaactttcagagactgttgatttggtgagacagaccggccatcagtgtggcatgtcagagaaggcaattgaaaaatttatcagacagctgctggaaaagaatgaacctcagagaccccccccgcagtatcctctccttatagttgtgtataaggttctcgcaaccttgggattaatcttgctcactgcctactttgtgattcaacctttcagcccattagcacctgagccagtgctttctggagctcacacctggcgctcactcatccatcacattaggctgatgtccttgcccattgccaagaagtacatgtcagaaaataagggagttcctctgcatgggggtgatgaagacagaccctttccagactttgacccctggtggacaaacgactgtgagcagaatgagtcagagcccattcctgccaactgcactggctgtgcccagaaacacctgaaggtgatgctcctggaagacgccccaaggaaatttgagaggctccatccactggtgatcaagacgggaaagcccctgttggaggaagagattcagcattttttgtgccagtaccctgaggcgacagaaggcttctctgaagggtttttcgccaagtggtggcgctgctttcctgagcggtggttcccatttccttatccatggaggagacctctgaacagatcacaaatgttacgtgagctttttcctgttttcactcacctgccatttccaaaagatgcctctttaaacaagtgctcctttcttcacccagaacctgttgtggggagtaagatgcataagatgcctgacctatttatcattggcagcggtgaggccatgttgcagctcatccctcccttccagtgccgaagacattgtcagtctgtggccatgccaatagagccaggggatatcggctatgtcgacaccacccactggaaggtctacgttatagccagaggggtccagcctttggtcatctgcgatggaaccgctttctcagaactgtaggaaatagaactgtgcacaggaacagcttccagagccgaaaaccaggttgaaaggggaaaaataaaaacaaaaacgatgaaa

SEQ ID NO: 1223 - DNA, 1400 bp, Artificial
  cDNA Sequence
gaagcgctggacgagaggaggaattactctagggtacaaggcctcgcccaggagtggggggttgcttccgggtcgcgctcccggaaacaggaagttgcccatcctcctcgcccggcggcagctgtccccgaggcgggaggagcccgaggggcgcgagccccgcatgtctatgccactgttagaatcaggctaactcttcagaacttccccctgtagcaaagctcactttggccagagttggaactactttctgcagggattttatattggaagacatggatcttgctgccaacgagatcagcatttatgacaaactttcagagactgttgatttggtgagacagaccggccatcagtgtggcatgtcagagaaggcaattgaaaaatttatcagacagctgctggaaaagaatgaacctcagagaccccccccgcagtatcctctccttatagttgtgtataaggttctcgcaaccttgggattaatcttgctcactgcctactttgtgattcaacctttcagcccattagcacctgagccagtgctttctggagctcacacctggcgctcactcatccatcacattaggctgatgtccttgcccattgccaagaagtacatgtcagaaaataagggagttcctctgcatgggggtgatgaagacagaccctttccagactttgacccctggtggacaaacgactgtgagcagaatgagtcagagcccattcctgccaactgcactggctgtgcccagaaacacctgaaggtgatgctcctggaagacgccccaaggaaatttgagaggctccatccactggtgatcaagacgggaaagcccctgttggaggaagagattcagcattttttgtgccagtaccctgaggcgacagaaggcttctctgaagggtttttcgccaagtggtggcgctgctttcctgagcggtggttcccatttccttatccatggaggagacctctgaacagatcacaaatgttacgtgagctttttcctgttttcactcacctgccatttccaaaagatgcctctttaaacaagtgctcctttcttcacccagaacctgttgtggggagtaagatgcataagatgcctgacctatttatcattggcagcggtgaggccatgttgcagctcatccctcccttccagtgccgaagacattgtcagtctgtggccatgccaatagagccaggggatatcggctatgtcgacaccacccactggaaggtctacgttatagccagaggggtccagcctttggtcatctgcgatggaaccgctttctcagaactgtaggaaatagaactgtgcacaggaacagcttccagagccgaaaaccaggttgaaaggggaaaaataaaaacaaaaacgatgaaa

SEQ ID NO: 1224 - DNA, 1053 bp, Artificial
  cDNA Sequence
gttttgggcggaagcgctggacgagaggaggaattactctagggtacaaggcctcgcccaggagtggggggttgcttccgggtcgcgctcccggaaacaggaagttgcccatcctcctcgcccggcggcagctgtccccgaggcgggaggagcccgaggggcgcgagccccgcatgaatcattgtagtcaatcattttccagttctcagccgctcagttgtgatcaagggacacgtggtttccgaactgccagctcagaataggaaaataacttgggattttatattggaagacatggatcttgctgccaacgagatcagcatttatgacaaactttcagagactgttgatttggtgagacagaccggccatcagtgtggcatgtcagagaaggcaattgaaaaatttatcagacagctgctggaaaagaatgaacctcagagaccccccccgcagtatcctctccttatagttgtgtataaggttctcgcaaccttgggattaatcttgctcactgcctactttgtgattcaacctttcagcccattagcacctgagccagtgctttctggagctcacacctggcgctcactcatccatcacattaggctgatgtccttgcccattgccaagaagtacatgtcagaaaataagggagttcctctgcatgggggtgatgaagacagaccctttccagactttgacccctggtggacaaacgactgtgagcagaatgagtcagagcccattcctgccaactgcactggctgtgcccagaaacacctgaaggtgatgctcctggaagacgccccaaggaaatttgagaggctccatccactggtgatcaagacgggaaagcccctgttggaggaagagattcagcattttttgtgccagtaccctgaggcgacagaaggcttctctgaagggtttttcgccaagtggtggcgctgctttcctgagcggtggttcccatttccttatccatggaggagacctctgaacagatcacaaatgttacgtgagctttttcctgttttcactcacctgcca

SEQ ID NO: 1225 - DNA, 821 bp, Artificial
  cDNA Sequence
aggagtggggggttgcttccgggtcgcgctcccggaaacaggaagttgcccatcctcctcgcccggcggcagctgtccccgaggcgggaggagcccgaggggcgcgagccccgcatggattttatattggaagacatggatcttgctgccaacgagatcagcatttatgacaaactttcagagactgttgatttggtgagacagaccggccatcagtgtggcatgtcagagaaggcaattgaaaaatttatcagacagctgctggaaaagaatgaacctcagagaccccccccgcagtatcctctccttatagttgtgtataaggttctcgcaaccttgggattaatcttgctcactgcctactttgtgattcaacctttcagcccattagcacctgagccagtgctttctggagctcacacctggcgctcactcatccatcacattaggctgatgtccttgcccattgccaagaagtacatgtcagaaaataagggagttcctctgcatgggggtgatgaagacagaccctttccagactttgacccctggtggacaaacgactgtgagcagaatgagtcagagcccattcctgccaactgcactggctgtgcccagaaacacctgaaggtgatgctcctggaagacgccccaaggaaatttgagaggctccatccactggtgatcaaggaaatagaactgtgcacaggaacagcttccagagccgaaaaccaggttgaaaggggaaaaataaaaacaaaaacgatgaaactgctttctgggggttggttacttagttacctgccctttgcatgcatgtg

SEQ ID NO: 1226 - DNA, 290 bp, Artificial
  cDNA Sequence
atgttggctgcagtcttcccttccttcacctccaccctggggaagggtcagtaaccaatgccgagggtcggggaaggaggagtcacaggcaagacagggactcagcgcagtgctcccgccatcatcggggacaggtgccagggtcagctgcagctctccttccgggagcagggtgtggtggccctggatggtcccagggagcagagggaggcaggcagctgtcacagccacagcggctctgaatggcttgagcttttagtatgtgttcaagtgcaggatactacaaactg

SEQ ID NO: 1227 - DNA, 479 bp, Artificial
  cDNA Sequence
atgttttgaaacacgtaaaacaacattacctattgtgtatggatacagaagaggctcacagggtttccatgaacaggtgtcgcctcagttggcggcggagctgacagcgggatggtgttgaggggtggtcagggtggtgggaacaggggaggcaaggctgtagctccgaatacaaaagggcagaggcagggagccgctcgacaatccaggaagtgccagggactgcgatggggatgggagacacttctagtctctgtgaggatcccagacataagcccttgggcgtaaggaatggagggctggtactttcttctccatgacccccttgctcagaacgacctattttcagcattttgtgcagactggcttccatccatgcaccttaggcattgttctctgatgctatctgaggcacttgtctgtcctttaaaatagtctctgcatttttcagatgactgctacccctggtttggagtttg

SEQ ID NO: 1228 - DNA, 2190 bp, Artificial
  cDNA Sequence
cctgggtgcaaccagtcacagctctgcagaggttactgtgattttgcccctgaaggatctgtccacaacttaggaactcacacagcttttggcctgagcccccgttaccaagagaaaggaggtttttgccaaggactccaaggggagtgcacttgatgctggtcgggacccaaagcgcccagccctccctgagacattgtgtgagtcgggctgggcctcaaacacggcccccactgccccaccccagccagggtggtgcttgtgtgggaaggactttaaatccagctgccagacccctggacgggagaaggagagacggctggccaccatgcacggctcctgcagtttcctgatgcttctgctgccgctactgctactgctggtggccaccacaggccccgttggagccctcacagatgaggagaaacgtttgatggtggagctgcacaacctctaccgggcccaggtatccccgacggcctcagacatgctgcacatgagatgggacgaggagctggccgccttcgccaaggcctacgcacggcagtgcgtgtggggccacaacaaggagcgcgggcgccgcggcgagaatctgttcgccatcacagacgagggcatggacgtgccgctggccatggaggagtggcaccacgagcgtgagcactacaacctcagcgccgccacctgcagcccaggccagatgtgcggccactacacgcaggtggtatgggccaagacagagaggatcggctgtggttcccacttctgtgagaagctccagggtgttgaggagaccaacatcgaattactggtgtgcaactatgagcctccggggaacgtgaaggggaaacggccctaccaggaggggactccgtgctcccaatgtccctctggctaccactgcaagaactccctctgtgaacccatcggaagcccggaagatgctcaggatttgccttacctggtaactgaggccccatccttccgggcgactgaagcatcagactctaggaaaatgggtactccttcttccctagcaacggggattccggctttcttggtaacagaggtctcaggctccctggcaaccaaggctctgcctgctgtggaaacccaggccccaacttccttagcaacgaaagacccgccctccatggcaacagaggctccaccttgcgtaacaactgaggtcccttccattttggcagctcacagcctgccctccttggatgaggagccagttaccttccccaaatcgacccatgttcctatcccaaaatcagcagacaaagtgacagacaaaacaaaagtgccctctaggagcccagagaactctctggaccccaagatgtccctgacaggggcaagggaactcctaccccatgcccaggaggaggctgaggctgaggctgagttgcctccttccagtgaggtcttggcctcagtttttccagcccaggacaagccaggtgagctgcaggccacactggaccacacggggcacacctcctccaagtccctgcccaatttccccaatacctctgccaccgctaatgccacgggtgggcgtgccctggctctgcagtcgtccttgccaggtgcagagggccctgacaagcctagcgtcgtgtcagggctgaactcgggccctggtcatgtgtggggccctctcctgggactactgctcctgcctcctctggtgttggctggaatcttctgaaggggataccactcaaagggtgaagaggtcagctgtcctcctgtcatcttccccaccctgtccccagcccctaaacaagatacttcttggttaaggccctccggaagggaaaggctacggggcatgtgcctcatcacaccatccatcctggaggcacaaggcctggctggctgcgagctcaggaggccgcctgaggactgcacaccgggcccacacctctcctgcccctccctcctgagtcctgggggtgggaggatttgagggagctcactgcctacctggcctggggctgtctgcccacacagcatgtgcgctctccctgagtgcctgtgtagctggggatggggattcctaggggcagatgaaggacaagccccactggagtggggttctttgagtgggggaggcagggacgagggaaggaaagtaactcctgactctccaataaaaacctgtccaacctgtggcaa

SEQ ID NO: 1229 - DNA, 466 bp, Artificial
  cDNA Sequence
cccatccttccgggcgactgaagcatcagactctaggaaaatgggtgcagagggccctgacaagcctagcgtcgtgtcagggctgaactcgggccctggtcatgtgtggggccctctcctgggactactgctcctgcctcctctggtgttggctggaatcttctgaaggggataccactcaaagggtgaagaggtcagctgtcctcctgtcatcttccccaccctgtccccagcccctaaacaagatacttcttggttaaggccctccggaagggaaaggctacggggcatgtgcctcatcacaccatccatcctggaggcacaaggcctggctggctgcgagctcaggaggccgcctgaggactgcacaccgggcccacacctctcctgcccctccctcctgagtcctgggggtgggaggatttgagggagctcactgcctacctggcctggggctgtctgccca

SEQ ID NO: 1230 - DNA, 559 bp, Artificial
  cDNA Sequence
atgcagtgtgtgtcccgcatgttggcccaccccctgcatgtcatctcaatgcgctgcatggtccagtttgtgggacgggaggccaagtacagctgtcctgcggggccaccatcccaggaagctcagctgccatggtgcctcattttggggtcattaatgggaaattggcccattcccctagactgattatgagtggtgtgctgagctccattgggaagattttcaaagaggaagggctgctgggattcttcgttggattaatccctcacctcctgggcgatgtggttttcttgtggggctgtaacctgctggcccacttcatcaatgcctacctggtggatgacagcttcagccaggccctggccatccggagctataccaagttcgtgatggggattgcagtgagcatgctgacctaccccttcctgctagttggcgacctcatggctgtgaacaactgcgggctgcaagctgggctccccccttactccccagtggccagctcttccgaggctccagcctgcttttccgccgggtgtcatcaggatcatgctttgcc

SEQ ID NO: 1231 - DNA, 629 bp, Artificial
  cDNA Sequence
atccctcttaccgggtctccttctcgggactcccttcagtccacttaccccgtttctgccccccaggccttctctgggcagtgactgtgagggctgacaggaaaggcatgtgcagcgtgcttgtgaggagctcagcacagagggtggggtgagggcatgtgttgctgaagtctgcatcctgaggtgcctgtggcaaaccactcttcccttctgtctcctcagttcagccaggccctggccatccggagctataccaagttcgtgatggggattgcagtgagcatgctgacctaccccttcctgctagttggcgacctcatggctgtgaacaactgcgggctgcaagctgggctccccccttactccccagtgttcaaatcctggattcactgctggaagtacctgagtgtgcagggccagctcttccgaggctccagcctgcttttccgccgggtgtcatcaggatcatgctttgccctggagtaacctgaatcatctaaaaaacacggtctcaacctggccaccgtgggtgaggcctgaccaccttgggacacctgcaagacgactccaacccaacaacaaccagatgtgctccagcccagccgggcttcagttccatatttgccatg

SEQ ID NO: 1232 - DNA, 817 bp, Artificial
  cDNA Sequence
gggctgtaacctgctggcccacttcatcaatgcctacctggtggatgacagcttcagccaggccctggccatccggagctataccaagttcgtgatggggattgcagtgagcatgctgacctaccccttcctgctagttggcgacctcatggctgtgaacaactgcgggctgcaagctgggctccccccttactccccagtgttcaaatcctggattcactgctggaagtacctgagtgtgcaggtgagcaagcactggacggcggaggcctttcctgttctttgctacatccttcagctgaaatggttttgtggatgcttcattgcatgcaaagataagtggtttcatggaattcaatattgtgaggagatacttggtatctataaggcatttaagttttcatcttacataatttcagaaaggatttgaggtggctaagtgtgggtttattttaagattatacatcagacaagaccttttcttctttgagtcttaaagactcttaggataaggataagagaactctggcccaggtggcaggtggtaaagcccaagaactgcttctccttcaagtaacatgggctgaaaattcgaggtctgtaaccagttgagctgagttcctgggttgttagggcggctggcattggaaaccgactcctccctcctgcaggacattcctgggcccaggagagcctgtgggtggggctgggccacgtggggaactggcagcagtaccaaccttgggttctcgtgttctgtaccgaagctacctctccgtagctggagctcttgggcccagcagtcaggggtccaggc

SEQ ID NO: 1233 - DNA, 373 bp, Artificial
  cDNA Sequence
aaacgaccagaatccaggttcccagttcagccaggccctggccatccggagctataccaagttcgtgatgggggtaagttgtgccagctgtccttccttcccactgccttgcggacccaagcggggcctaggaggccaaccctggtaatggctggaggcaggtcttggtacagggtgttggcgtggtgtgtccctgctccctgggccggggtgggtcactggcactcaggcctctctgggtttcagattgcagtgagcatgctgacctaccccttcctgctagttggcgacctcatggctgtgaacaactgcgggctgcaagctgggctccccccttactccccagtgttcaaatcctggattcactgctgga

SEQ ID NO: 1234 - DNA, 1074 bp, Artificial
  cDNA Sequence
atggatggcgggtcagggggcctggggtctggggacaacgccccgaccactgaggctcttttcgtggcactgggcgcgggcgtgacggcgctcagccatcccctgctctacgtgaagctgctcatccaggtgggtcatgagccgatgccccccacccttgggaccaatgtgctggggaggaaggtcctctatctgccgagcttcttcacctacgccaagtacatcgtgcaagtggatggtaagatagggctgttccgaggcctgagtccccggctgatgtccaacgccctctctactgtgactcggggtagcatgaagaaggttttccctccagatgagattgagcaggtttccaacaaggatgatatgaagacttccctgaagaaagttgtgaaggagacctcctacgagatgatgatgcagtgtgtgtcccgcatgttggcccaccccctgcatgtcatctcaatgcgctgcatggtccagtttgtgggacgggaggccaagtacagtggtgtgctgagctccattgggaagattttcaaagaggaagggctgctgggattcttcgttggattaatccctcacctcctgggcgatgtggttttcttgtggggctgtaacctgctggcccacttcatcaatgcctacctggtggatgacagcgtgattcagccaggccctggccatccggagctataccaagttcgtgatggggattgcagtgagcatgctgacctaccccttcctgctagttggcgacctcatggctgtgaacaactgcgggctgcaagctgggctccccccttactccccagtgttcaaatcctggattcactgctggaagtacctgagtgtgcagcctgcttttccgccgggtgtcatcaggatcatgctttgccctggagtaacctgaatcatctaaaaaacacggtctcaacctggccaccgtgggtgaggcctgaccaccttgggacacctgcaagacgactccaacccaacaacaaccagatgtgctccagcccagccgggcttcagttccatatttgccatgtgtctgtccagatgtggggttga

SEQ ID NO: 1235 - DNA, 2057 bp, Artificial
  cDNA Sequence
cccgccgcaccacgctcccgagctcccccgcggcctggagtggtgcgccccggccccgccccctgacgccggtgagggggcgtggccccgtcacgtgacggggagtgacctcgccgccgggcgccatgggagcttcggacccggaagtggcgccctgggctcgcggcggtgccgcggggatggcgggagccggagctggagccggagctcgcggcggagcggcggcgggggtcgaggctcgagctcgcgatccaccgcccgcgcaccgcgcacatcctcgccaccctcggcctgcggctcagccctcggcccgcaggatggatggcgggtcagggggcctggggtctggggacaacgccccgaccactgaggctcttttcgtggcactgggcgcgggcgtgacggcgctcagccatcccctgctctacgtgaagctgctcatccaggtgggtcatgagccgatgccccccacccttgggaccaatgtgctggggaggaaggtcctctatctgccgagcttcttcacctacgccaagtacatcgtgcaagtggatggtaagatagggctgttccgaggcctgagtccccggctgatgtccaacgccctctctactgtgactcggggtagcatgaagaaggttttccctccagatgagattgagcaggtttccaacaaggatgatatgaagacttccctgaagaaagttgtgaaggagacctcctacgagatgatgatgcagtgtgtgtcccgcatgttggcccaccccctgcatgtcatctcaatgcgctgcatggtccagtttgtgggacgggaggccaagtacagtggtgtgctgagctccattgggaagattttcaaagaggaagggctgctgggattcttcgttggattaatccctcacctcctgggcgatgtggttttcttgtggggctgtaacctgctggcccacttcatcaatgcctacctggtggatgacagcgtgagtgacaccccaggggggctgggaaacgaccagaatccaggttcccagttcagccaggccctggccatccggagctataccaagttcgtgatggggattgcagtgagcatgctgacctaccccttcctgctagttggcgacctcatggctgtgaacaactgcgggctgcaagctgggctccccccttactccccagtgttcaaatcctggattcactgctggaagtacctgagtgtgcagggccagctcttccgaggctccagcctgcttttccgccgggtgtcatcaggatcatgctttgccctggagtaacctgaatcatctaaaaaacacggtctcaacctggccaccgtgggtgaggcctgaccaccttgggacacctgcaagacgactccaacccaacaacaaccagatgtgctccagcccagccgggcttcagttccatatttgccatgtgtctgtccagatgtggggttgagcgggggtggggctgcacccagtggattgggtcacccggcagacctagggaaggtgaggcgaggtggggagttggcagaatccccatacctcgcagatttgctgagtctgtcttgtgcagagggccagagaatggcttatgggggcccaggttggatggggaaaggctaatggggtcagaccccaccccgtctacccctccagtcagcccagcgcccatcctgcagctcagctgggagcatcattctcctgctttgtacatagggtgtggtcccctggcacgtggccaccatcatgtctaggcctatgctaggaggcaaatggccaggctctgcctgtgtttttctcaacactacttttctgatatgagggcagcacctgcctctgaatgggaaatcatgcaactactcagaatgtgtcctcctcatctaatgctcatctgtttaatggtgatgcctcgcgtacaggatctggttacctgtgcagttgtgaatacccagaggttgggcagatcagtgtctctagtcctacccagttttaaagttcatggtaagatttgacctcatctcccgcaaataaatgtattggtgatttgga

SEQ ID NO: 1236 - DNA, 2006 bp, Artificial
  cDNA Sequence
cccgccgcaccacgctcccgagctcccccgcggcctggagtggtgcgccccggccccgccccctgacgccggtgagggggcgtggccccgtcacgtgacggggagtgacctcgccgccgggcgccatgggagcttcggacccggaagtggcgccctgggctcgcggcggtgccgcggggatggcgggagccggagctggagccggagctcgcggcggagcggcggcgggggtcgaggctcgagctcgcgatccaccgcccgcgcaccgcgcacatcctcgccaccctcggcctgcggctcagccctcggcccgcaggatggatggcgggtcagggggcctggggtctggggacaacgccccgaccactgaggctcttttcgtggcactgggcgcgggcgtgacggcgctcagccatcccctgctctacgtgaagctgctcatccaggtgggtcatgagccgatgccccccacccttgggaccaatgtgctggggaggaaggtcctctatctgccgagcttcttcacctacgccaagtacatcgtgcaagtggatggtaagatagggctgttccgaggcctgagtccccggctgatgtccaacgccctctctactgtgactcggggtagcatgaagaaggttttccctccagatgagattgagcaggtttccaacaaggatgatatgaagacttccctgaagaaagttgtgaaggagacctcctacgagatgatgatgcagtgtgtgtcccgcatgttggcccaccccctgcatgtcatctcaatgcgctgcatggtccagtttgtgggacgggaggccaagtacagtggtgtgctgagctccattgggaagattttcaaagaggaagggctgctgggattcttcgttggattaatccctcacctcctgggcgatgtggttttcttgtggggctgtaacctgctggcccacttcatcaatgcctacctggtggatgacagcttcagccaggccctggccatccggagctataccaagttcgtgatggggattgcagtgagcatgctgacctaccccttcctgctagttggcgacctcatggctgtgaacaactgcgggctgcaagctgggctccccccttactccccagtgttcaaatcctggattcactgctggaagtacctgagtgtgcagggccagctcttccgaggctccagcctgcttttccgccgggtgtcatcaggatcatgctttgccctggagtaacctgaatcatctaaaaaacacggtctcaacctggccaccgtgggtgaggcctgaccaccttgggacacctgcaagacgactccaacccaacaacaaccagatgtgctccagcccagccgggcttcagttccatatttgccatgtgtctgtccagatgtggggttgagcgggggtggggctgcacccagtggattgggtcacccggcagacctagggaaggtgaggcgaggtggggagttggcagaatccccatacctcgcagatttgctgagtctgtcttgtgcagagggccagagaatggcttatgggggcccaggttggatggggaaaggctaatggggtcagaccccaccccgtctacccctccagtcagcccagcgcccatcctgcagctcagctgggagcatcattctcctgctttgtacatagggtgtggtcccctggcacgtggccaccatcatgtctaggcctatgctaggaggcaaatggccaggctctgcctgtgtttttctcaacactacttttctgatatgagggcagcacctgcctctgaatgggaaatcatgcaactactcagaatgtgtcctcctcatctaatgctcatctgtttaatggtgatgcctcgcgtacaggatctggttacctgtgcagttgtgaatacccagaggttgggcagatcagtgtctctagtcctacccagttttaaagttcatggtaagatttgacctcatctcccgcaaataaatgtattggtgatttgga

SEQ ID NO: 1237 - DNA, 772 bp, Artificial
  cDNA Sequence
tggtccagtttgtgggacgggaggccaagtacagtggtgtgctgagctccattgggaagattttcaaagaggaagggctgctgggattcttcgttggattaatccctcacctcctgggcgatgtggttttcttgtggggctgtaacctgctggcccacttcatcaatgcctacctggtggatgacagcgtgagtgacaccccaggggggctgggaaacgaccagaatccaggttcccagttcagccaggccctggccatccggagctataccaagttcgtgatggggattgcagtgagcatgctgacctaccccttcctgctagttggcgacctcatggctgtgaacaactgcgggctgcaagctgggctccccccttactccccagtcgcccatcctgcagctcagctgggagcatcattctcctgctttgtacatagggtgtggtcccctggcacgtggccaccatcatgtctaggcctatgctaggaggcaaatggccaggctctgcctgtgtttttctcaacactacttttctgatatgagggcagcacctgcctctgaatgggaaatcatgcaactactcagaatgtgtcctcctcatctaatgctcatctgtttaatggtgatgcctcgcgtacaggatctggttacctgtgcagttgtgaatacccagaggttgggcagatcagtgtctctagtcctacccagttttaaagttcatggtaagatttgacctcatctcccgcaaataaatgtattggtgatttgga

SEQ ID NO: 1238 - DNA, 1739 bp, Artificial
  cDNA Sequence
cggtatcgccacttggagaccaccgcgaatgaagtttgcattttcctctgttcttgagcccagcttcttctcgtctcccaccccagcttcccggcattggaagaagggaccgtcctcttccttgtcttggccacccaaatcctggtatcgaaagggttgaacggaccggaagtgtgcagcagcgacgggtccccagctaatcgacgccggaagtagcaattactagacaagcattccgccgccggcttcgctatggcggcaattcccccagattcctggcagccacccaacgtttacttggagaccagcatgggaatcattgtgctggagctgtactggaagcatgctccaaagacctgtaagaactttgctgagttggctcgtcgaggttactacaatggcacaaaattccacagaattatcaaagacttcatgatccaaggaggtgacccaacagggacaggtcgaggtggtgcatctatctatggcaaacagtttgaagatgaacttcatccagacttgaaattcacgggggctggaattctcgcaatggccaatgcggggccagataccaatggcagccagttctttgtgaccctcgcccccacccagtggcttgacggcaaacacaccatttttggccgagtgtgtcagggcataggaatggtgaatcgcgtgggaatggtagaaacaaactcccaggaccgccctgtggacgacgtgaagatcattaaggcatacccttctgggtagacttgctaccctcttgagcagctcttctgagatggccccagtgaaccagcttctagatgacatagaatgacatgtaatgctaaattcattttggctttgcaagtcatgaagcttaggaggcctggcatcttgggtgagttagagatggaagtacattttaataggatgcttcttttctcttcccccagtgcctaggttgccagagcatttgcacaaatgcccctgtttatcaataggtgactacttactacacatgaaccataatgctgcttcttgtgcatgtctgctctgatatacgtcgaacaatgtagcagccactgtcatttctcagtggttttgcctaaccaaacttcttcctaaggagatttatattctggcctacacagcagtccttgatggctgacagccacagaattccaaaccaagtagtgtctgtcagccctcttaactctgtgcacgccctatttcagtcttttacatttgttcttctagggaatgtatgcatctctatatatattttccctctcaaaaccagaacatcaacagtgctgtttctgacacttcagacatcccacgcaaagccacattgaatttttgccaaatgaaaaacacatccaacaatcaagtttctaagaaggtgtcaagtggggaataataataatgtataataatcaagaaattagtttattaaaaggaagcagaagcattgaccattttttcccagagaagaggagaaatctgtagtgagcaaaggacagaccatgaatcctccttgagaagtagtactctcagaaaggagaagcgccactcaagttcttttaacccaagactttagagaaattaggtccaagatttttatatgttcagttgtttatgtataaaaataactttctggattttgtggggaggagcaggagaggaaggaagttaatacctatgtaatacatagaaacttccacaataaaatgccattgatggttgaaatt

SEQ ID NO: 1239 - DNA, 1347 bp, Artificial
  cDNA Sequence
gagaacagtgttttcttccggaaaagaaacgggggctgtgacaggctccctgtggtgaagccgactaaaaggtcgaggtggtgcatctatctatggcaaacagtttgaagatgaacttcatccagacttgaaattcacgggggctggaattctcgcaatggccaatgcggggccagataccaatggcagccagttctttgtgaccctcgcccccacccagtggcttgacggcaaacacaccatttttggccgagtgtgtcagggcataggaatggtgaatcgcgtgggaatggtagaaacaaactcccaggaccgccctgtggacgacgtgaagatcattaaggcatacccttctgggtagacttgctaccctcttgagcagctcttctgagatggccccagtgaaccagcttctagatgacatagaatgacatgtaatgctaaattcattttggctttgcaagtcatgaagcttaggaggcctggcatcttgggtgagttagagatggaagtacattttaataggatgcttcttttctcttcccccagtgcctaggttgccagagcatttgcacaaatgcccctgtttatcaataggtgactacttactacacatgaaccataatgctgcttcttgtgcatgtctgctctgatatacgtcgaacaatgtagcagccactgtcatttctcagtggttttgcctaaccaaacttcttcctaaggagatttatattctggcctacacagcagtccttgatggctgacagccacagaattccaaaccaagtagtgtctgtcagccctcttaactctgtgcacgccctatttcagtcttttacatttgttcttctagggaatgtatgcatctctatatatattttccctctcaaaaccagaacatcaacagtgctgtttctgacacttcagacatcccacgcaaagccacattgaatttttgccaaatgaaaaacacatccaacaatcaagtttctaagaaggtgtcaagtggggaataataataatgtataataatcaagaaattagtttattaaaaggaagcagaagcattgaccattttttcccagagaagaggagaaatctgtagtgagcaaaggacagaccatgaatcctccttgagaagtagtactctcagaaaggagaagcgccactcaagttcttttaacccaagactttagagaaattaggtccaagatttttatatgttcagttgtttatgtataaaaataactttctggattttgtggggaggagcaggagaggaaggaagttaatacctatgtaatacatagaaacttccacaataaaatgccattgatggttgaaatt

SEQ ID NO: 1240 - DNA, 571 bp, Artificial
  cDNA Sequence
ttgcggcgctgcggcagtccagatcaaaaatggcggcagttggtgtgttctcggtttctcggctgctgggtcggtcccgcccacagctggggcggcctatgtcgagtggcgcccatggagaagagggctcagctcgcatgtggaagaccctcaccttcttcgtcgcgctccccggggtggcagtcagcatgctgaatgtgtacctgaagtcgcaccacggagagcacgagagacccgagttcatcgcctacccccatctccgcatcaggaccaagccgtttccctggggagatggtaaccatactctattccataaccctcatgtgaatccacttccaactggctacgaagatgaataaagagaatctggaccactacccgggcaccagggaccacagcactggtttggaccattactctgcacatggaccagaaaaagtatatgggaccttaagctcaccttctttacttgtatcaaatgatgactggtatactggtctcccatccctttgcttgtggcgggagatggcttaaataaataacttaaacttaaaaaaataaaataaaataa

SEQ ID NO: 1241 - DNA, 2401 bp, Artificial
  cDNA Sequence
tctttcttcactctgaagccaagagccgaccttctgagccctcaagaaagatcagaacagattcatgggtgatttagcctatctgtcccaggccagcgtggctgagtgtgctggctggaggcctctctctctgcttcgagggtagctgagatccaccccggaaaccggcaggatgaagggggcaagtgaggagaagctggcatctgtgtccaacctggtcactgtgtttgagaatagcaggaccccagaagcagcacccagaggccagaggctagaggacgtgcatcaccgccctgagtgcaggcctcccgagtccccaggaccacgggagaagacgaatgtcggggaggccgtggggtctgagcccaggacagtcagcaggaggtacctgaactccctgaagaacaagctgtccagcgaagcctggaggaaatcttgccagcctgtgaccctctcaggatcggggacgcaggagccagagaagaagatcgtccaggagctgctggagacagagcaggcctatgtggcgcgcctccacctgctagaccaggccatgagtgacctgtcgtggcggctacaggtgtttttccaggagctgctgaagacagcccgcagcagcaaggccttcccagaggatgtggtcagggtcatcttctccaacatctcctccatctatcagttccattctcagttcttcctcccagagctgcagcggcgcctggacgactggacagctaacccccgcatcggtgacgtgatccagaagctggcccccttcctgaagatgtacagtgagtatgtcaagaactttgagcgagcggctgagctgctggccacctggaccgacaagtctccactcttccaggaggttctcactcgcatccagagcagcgaggcttcgggcagcctgaccctgcagcaccacatgctggaaccagtgcagagaattccacgttacgagctgctgctcaaggagtacatccagaagctgccagcccaggccccagaccaggccgatgcccagaaagccctggacatgatcttctcagctgcccagcactccaatgcagccatcactgagatggagcggctgcaggacctgtgggaggtgtaccagcgcctgggcctcgaggacgacatagtagacccctctaacaccctgctccgtgagggcccggtcctcaagatctccttccgccgcaacgaccccatggagcgctaccttttcttgttcaacaacatgctgctctactgtgtgcccagggtgatccaggtgggcgcccagttccaggtgaggacccgcatcgatgtggccgggatgaagatgcaccggaatttcttcaaccagtcttctgctgagagacacttagattgttttcagttgtcagcagctgcaaatgaggctgcagtgaatagcctggtgcgggagctgatggatgctgagtttccccactccttcctggtgtccgggaagcagcgcaccctggagctgcaagcccggtcccaggaggaaatgatttcctggatgcaggccttccaagcagccattgaccaaatcgagaagcggaatgaaaccttcaaggctgcggcccaggggcctgagggagacatccaggagcaggagctgcagtctgaggagctgggcctccgggcaccgcagtgggtccgggacaagatggtgaccatgtgcatgcgctgccaggagcccttcaacgctctgacgcgccgtcgccaccactgccgggcctgcggctatgtggtgtgtgccaggtgctccgactaccgggccgaactgaaatacgacgacaacaggcccaaccgagtctgcctccactgctacgcattcctcactggaaatgtgctgcctgaggccaaggaggacaagaggcggggcatcctggagaaagggtcctcagccacgcctgaccagagcctgatgtgcagcttcctgcagctcatcggggacaagtggggcaagagcggcccccggggctggtgtgtgatccctcgggatgaccccctcgtgctctatgtctatgctgcccctcaggacatgagggctcacacctccatccccctgctgggctaccaggtgactgttgggccccagggggaccctcgggtcttccagctacagcagtcaggccagctctacaccttcaaggccgagacggaggagctgaagggccgctgggtgaaggccatggagcgggcggccagtggctggagccccagctggcccaacgatggggacctgtccgactgagccactgccagccgctctcctgcccacctctccccaccctgaacccagctcctgccacagactgaccctgtggcctcagtgacccactgccccaagtggtgctttcagagaattgattcagccatctgcgcccag

SEQ ID NO: 1242 - DNA, 640 bp, Artificial
  cDNA Sequence
gcttttcggctctcagctcagaggaggccaaggtgcaactttcttcggcggtccagaatctgtgttcatccaacaccagccgcctccaccatgtggccgaagttcaaccccagcgagatcaaagtcgtatacctgaggtgcactgggggtgaagtcagtgccacgtctgcgctgggccccaagatcggccccctggacctgtctccaaaaaaggttggtgatgacattgccaaggcaacgggtgactggaagggcctgaggattacagtgaaactgaccattgagaacagacaggcccagattgaggtggtgccttctgcttctgccctgatcatcaaagcccttaaggaaccaagagacagaaagaaacagaaaaacattaaacacagtgggaatatcacttttgatgagatcgtcaacattgctccacggatgcggcaccgatctttagccagagatctcactggaaccattaaagagatcctggggactgcccagtctgtgggctgcaatgttgatggccgccaccctcatgacatcatagatgacatcaacagtggtgctgtggaatgcccagcagttaagcacaaaggaaaatatttcaataaaggatcatttgacaaacaaaacaaaaataaaa

SEQ ID NO: 1243 - DNA, 2026 bp, Artificial
  cDNA Sequence
gccgtccccaaagctcgctgttcgcttcgctgcctgacagctgccctgccgccaccaggcagtcccagcttccccaaaccagtcttctggcctctgtggcgccccaggcccgcgggattcagggattaggatctggaagggtttggtccaatcccctatccctctcagcgtcctgggctcacctccccggcagcttagcgctcctcttccaaaactgcttgctgttctcagcggccattgctctggccgggggaagtccttgtaggcgggccaagggtttgcccggcgagatgcccccagaccccgcaatctgagggccaacccaggccgcttccccgccgccggtcacccgctcccagctcctggggacgccatcttggatgtgggcacccctccacccagcaccgctgccattggtgagctgcgcaagccgtggacgggccgaccaattgggagccggaatcctgcaggccgctgaagccgaccggtaacgtcaggggctgggcacacaggtggacggggaaggcggagcttggacgagccgagaggcggggctcaaagttcctacccgcgagagggaagaagcaggtaaggaggtctcagcatgaaacagcagcagtggtgtgggatgactgccaaaatgggcaccgtgttgtcaggggtcttcaccatcatggccgtagacatgtatctcatctttgaacagaagcacctagggaatggcagttgcactgagatcacaccaaagtacaggggtgcaagtaacatcataaataacttcatcatctgctggagttttaaaatcgtcctcttcctgtctttcatcaccatcctcatcagctgcttcctcctgtactcagtgtatgcccagatcttcaggggcctggtcatctacattgtctggatttttttctatgaaactgcaaacgtcgtaatacaaatcctcaccaacaatgactttgacattaaagaggtcagaatcatgcgctggtttggcttggtgtctcgtacagtcatgcactgtttctggatgttctttgtcatcaactatgcccacataacctacaaaaaccggagccagggcaatataatttcctacaagagacgaatttctacagcggagattctccacagcagaaataaaagattatcaatttcgagtgggttcagtggctcacacctggaatcccagtactttgagaggcagaggaggtgctctggtaaaacaagtataaaatgaatgtcaggatgttctccctcatggtgggcatcttctctgtccttaataccacccagttcttcatctttgacctgaaccagaagacacacatttgctatgaggccaagttcagcatctacgtggactcaaagtcggagctagtcacttggaccctgttccacagggctaatatcagcactggcctctccctcaccaccatcatcatcggctgcttcctcttttattgtatccacaagaatatctacatggggctgctgatctatgccatgtggatcatcacttacgagctcatcaacttctccatagtcctgctcctcaacgggatcatcaaagatcacttcaagacgctgagttatttgcactggatcttccaaatctcacacatgctcctgcactttttctgtctgcccttcatcgtcaagcatgcatacaacctttacaaggaatcccagactgtgggcaggaaacgccgccacaggctctgctccaccattgcagtgaactcatgactacctgtccgtctgggaatgttgtaccggaagttaaactgaaccatgccagatgccaggaaaggtgggagggaatggtgttcctcaacaatggaaccctccctaccctgcctgtcttctgttgatgctgcttggtttgtcagggcttttgagttttacgcactgaggaatgattctcgggagagggcaggttgtgcggatcaattattttacagatgtgttgtgtgacttgttttagcagttaatgatatgtggccttgtgcttacttaaccatct

SEQ ID NO: 1244 - DNA, 630 bp, Artificial
  cDNA Sequence
gggaaggcggagcttggacgagccgagaggcggggctcaaagttcctacccgcgagagggaagaagcaggaggtgctctggtaaaacaagtataaaatgaatgtcaggatgttctccctcatggtgggcatcttctctgtccttaataccacccagttcttcatctttgacctgaaccagaagacacacatttgctatgaggccaagttcagcatctacgtggactcaaagtcggagctagtcacttggaccctgttccacagggctaatatcagcactggcctctccctcaccaccatcatcatcggctgcttcctcttttattgtatccacaagaatatctacatggggctgctgatctatgccatgtggatcatcacttacgagctcatcaacttctccatagtcctgctcctcaacgggatcatcaaagatcacttcaagacgctgagttatttgcactggatcttccaaatctcacacatgctcctgcactttttctgtctgcccttcatcgtcaagcatgcatacaacctttacaaggaatcccagactgtgggcaggaaacgccgccacaggctctgctccaccattgcagtgaactcatgactacctgtccgtctgggaatg

SEQ ID NO: 1245 - DNA, 3462 bp, Artificial
  cDNA Sequence
acatccaagatggcgtccccaggagctgggagcgggtgaccggcggcggggaagcggcctgggttggccctcagattgcggggtctgggggcatctcgccgggcaaacccttggcccgcctacaaggacttcccccggccagagcaatggccgctgagaacagcaagcagttttggaagaggagcgctaagctgccggggagcattcagcctgtatatggagcacagcatcctcctcttgacccacggctcaccaaaaatttcattaaagaacgatcaaaagtcaacacagttcctctgaagaataagaaggcctccagttttcatgagtttgcacggaataccagtgatgcttgggacattggcgatgatgaggaagaggacttttcctcaccttctttccaaactctgaactcaaaagttgctttggcaactgcagcccaagttctagaaaaccacagcaagctgagagtaaaaccagaacggtcccagtcaacgacatcggacgtccctgccaactacaaggtcataaagtccagcagtgatgcccagctgtccagaaactctagtgatacatgcctgaggaacccactccacaaacagcaatcactccctctccggcccatcatccccctcgttgcccggatctcggatcagaacgcttctggggcccccccaatgactgtccgggagaaaacccgcctagaaaaattccgtcaacttctctccagccagaacactgacttagatgaactgaggaagtgtagctggccaggggttcccagggaggttcgacctataacctggagactcctgtcgggctatctcccagcaaacactgagaggaggaagttgaccctgcagcggaagcgggaggaatattttggcttcattgaacagtattatgactctcgaaacgaggaacatcaccaggatacctacagacagattcacattgacattccaaggacgaatcctctcattccgttgttccagcaaccacttgtacaggagatctttgaaagaattctatttatttgggccatccgccaccctgccagtgggtatgtccagggaattaatgacctggtcactccattctttgtcgtcttcctctcagaatatgtggaagaggatgtggagaactttgacgtgaccaacttgtctcaagacatgctgcgaagcattgaggctgacagcttttggtgcatgagcaagctgctggatggaatccaggataactacacctttgcacaaccaggaatccagaagaaggtgaaggcactggaagagcttgtcagccggattgatgagcaggtacataatcacttcaggaggtacgaggtagaatacctgcagtttgccttccgctggatgaacaacctgcttatgcgggagcttcctcttcgctgcaccatccgcctgtgggacacatatcagtctgaaccagaagggttctcccactttcatctctacgtgtgtgcagccttcttgatcaagtggaggaaagagatcttggatgaggaggattttcagggtctcctcatgctgctacagaacctacctacaatacactggggcaacgaagaaattgggctgcttctcgccgaggcatacagactcaagtacatgtttgccgatgccccaaatcactaccgccgataggtgctgtctcctccggggacccagactgccttcatctctgatggcagtctgatcactgtggccactgtgcgagccgtggaccccggccaggaaccactcctgttgtacaaagctcacacccaccgcccaggtcttaactttctggcatccaccactccatgtctctggatgtgtcacttggaccactgtcagtattccatgccgcgtggatgggcccagttctgggagaggacagaaaaggtggtacagggttgtctgcccctttaaaagaaactggacaaagaaggggaaggctcagggtctcacctcacattgtccctacaaggacaggccccaactgataaccgttgcttttttttttttgtgaacatagtttgatttgatcacaggtcaaaaacgccttatattttcgaaagactcctggcccctcttccctcttcctggtttcctagccgttccccttctgccccagtctgagccagtgaggggtagctttttaaaaccattattctagatggaggaggcactgatgcttgtaactctggaaagaggcctacacccaagggctaggaattttatttttccttttctcaccaggtgtctgcatgtgtgtgtgggtgtgaatgtgtatacatgcccatcagcatttagtcacatgtctgaatttctgtgtccagacgagccccatcaaactagttgggaagggccccagtgaccaagtgtataagcatcccttgaagagggattggggcaggggaggcagaaggggctctccagaccccttttccatgatgacccactccaagatattatgtgtaaattgtgttattatgtatatgggtaaagatgtacaaatatatgtcctctttgtagcagatatgattttatatttataatgtgcatcaacatgtgaaagcaatctaggtcactagcacagaggaagttgccaggaaggtggcttcagcacctccaggttggttctgggtgtcctgctgtgaggggtagaacgggaggctgctgaagtgagtagctgagcagctggagccatcccaagcatcagtgtctcagagtcctcctcgcccctttcttcaccccgccccccaacccccagactttcctggagcatctgccctttgctcctagcagcctccccaggaagggactgcagaggcgggcaagccctctctatgtgtttttatccccaccttccccggaatctggggagggcttttgtttttacgttttcaagttcagcattgtattcggacagaagctgtgactgaagactcagtgccaaggaaaggggcttcttgtgtgtccctcgggtttggggctcttctcagagagcagcactccatatcccttactgtcaccttcactccccacacagctcatgagatgtgtgacccctgtttgagttttggtatttggtagtggagggtggggggatgggggccagcagctgtcatcctcctgggaagccgagcagtgtccctggtgggtaacaccctcaagtctctttgccagtgaggccccaccacatcggtgtgagttaggtttctcatctggagctgtttctcaggcattcttcccaaccctcttccttttccccttcggtgtgcctcagtggtctccttcatagagtgagagggcttgagaccctccctcaaccggactaattaaagaaagacacttgtgttcccaagtggtggttttatttttttagtttttatgtttgtatgggaaattgtggataaagtgaaaagaattgtaaataaatggtgtatttcctcctcca

SEQ ID NO: 1246 - DNA, 5545 bp, Artificial
  cDNA Sequence
cgattgcttctgtctgttatttagatatggaagctgaggggatgcacagaggcagccagaacctaggtcagggtctcgctcggtgctgaccgcccccggggtcgagtaggcgatgggggagcccggcttcttcgtcacaggagaccgcgccggtggccggagctggtgcctgcggcgggtggggatgagcgccgggtggctgctgctggaagatgggtgcgaggtgactgtaggacgaggatttggtgtcacataccaactggtatcaaaaatctgccccctgatgatttctcgaaaccactgtgttttgaagcagaatcctgagggccaatggacaattatggacaacaagagtctaaatggtgtttggctgaacagagcgcgtctggaacctttaagggtctattccattcatcagggagactacatccaacttggagtgcctctggaaaataaggagaatgcggagtatgaatatgaagttactgaagaagactgggagacaatatatccttgtctttccccaaagaatgaccaaatgatagaaaaaaataaggaattgagaactaaaaggaaattcagtttggatgaattagcaggtcctggagctgaaggcccctcaaatttgaaatccaaaataaataaagtgtcttgtgaatctggtcagccagtgaaatcacaggggaaaggtgaagtggccagtacaccctctgacaatttggatcctaagttgactgcccttgagccaagtaagaccacaggggctcccatttaccctggcttccccaaagtcacagaggttcatcatgagcagaaagcctcaaactcttcagcatctcagagaagcttacagatgtttaaggtgaccatgtccaggattctgaggctcaaaatacagatgcaggaaaaacatgaagccgttatgaatgtgaaaaagcagacccaaaaggggaactcaaagaaagttgtgcaaatggagcaggaacttcaggacttacagtcccagctgtgtgcagagcaggctcagcagcaggcaagagtggagcaactagagaagactttccaggaagaggaacagcatcttcagggtttggagatagcccaaggagaaaaggacctgaagcaacagctggcccaggctctgcaggagcattgggctctaatggaagagctaaatcgcagcaagaaggactttgaagcaatcattcaagccaagaacaaagaattagagcagaccaaggaagagaaggagaagatgcaagcacagaaggaagaagttcttagccacatgaatgatgtgctagagaatgagctccaatgtattatttgttcagaatacttcattgaggctgtcaccttgaactgtgcccacagtttctgctcctactgtatcaatgaatggatgaagcggaagatagaatgccccatttgtcggaaggacattaagtccaaaacgtactctttggttctggacaattgcattaataagatggtaaataatctgagctcagaagtgaaagaacgacgaattgttctcattagggaacgaaaagcaaagagattgttctgaagaccgtgctctaagggcatttgaaagactgccaggtagtgcgagcctgagatggtctggaggattctctctagccgtgactccgctgctctgaaggtcaactgagaagtcttgtgggacagagacttgagttaggaagccctcagtcacttgccttccacggtggccagccctgctgccatcattggctgaagcaccaccaggattcacggcacccaactgcttcagggtacttcgtagactctgcctcactacatgtcgaaagagttatttgagttctcttctgtttttttttaatttgttgttgttgttactgttttgatacctcggaaacacctccgttgacagttgttttggataggttgggtgtaccccatggctgcctctgaaggcagtgtctattttgagaggatggcttacctcttctttgtgaaaatactatctcatttcctggaaataaaatgtaaaacctgtcagttgctcagctgggctttggtgtatttaccttccttcccttcctgctcccagacagtctcacaagtaaacaccagcagctcatagattacaaccaagaaagtgactgtatcagatgatagacttcaagtgaatgtcagcctaagaggccaagctgcagatcgtggcaacagatgagctctgttaacctcctgactgtcgtgtttcctttttattacagaggtgggtcactgtttaccttgtttcaggggtgggagaaactcctttccttcagctggcatttgaatgtttccaaatctattttatctgacgtcatgaacacacaggcaatgattttatgacaacttgatgtgcttttttctttatttttcttttacattagaagttttctctcttttctccacctctcctttatttttaattttaattttaatttttgaaacaagatctgactctgttgcccaagctggagtacagtagtgcaatctcagctcactgcaacctccacctcccagactcaagccatcctcccacctcaacctcccaagtagctgggactacaggcatatgccatcacacccagctaatttttgtttttctgtagagacagggtttcaccatgttggccaggctggtctcaaattcctgaccttaagtgatccacctgcctaggcctctaaaatgctgggattacaggcgtgagccaccacgcccagcctataccccatgtattttcataaagggttggaaactattgattgccaactttttaaggatggtagggattttttctttgttgaatatactgtgaattttgggattctggagtccttagtcttcatttccattcttctgcccatgattactgatcaaaatactggtagagtcatggaggaagtaagttaaatgtggaaaaaatgctttaaaagtacttactataaccacatcataagaattctggaaaaatagagaacaaaaggaaaagattgttaccaccttgatttaataacttcttgtttccccatacatgtgttttgtttatagattgcatgggtatatgtcaatttttatatgttctgtgtttagtttacatattgtaattcatttttaagagagtacagacatacactttttgagtaggcaatatgttcacatagtttgaaattaaaggtacaaaatggcgtagaatgaaatgcctctcaccctttccccacagcgactacttcccactcagaggcaacaagtattacagttgcttgtatattcttccagagatctctgtctatacaagcaaaaacacatgtggtctttttccttgctttgcacaaatggtaaactgtacgctattctgaaccttgcttttttcagatatatgttggcaacagttccatgtcagtacatagtttcctttctttattacagctgcctgttttttcattgtgtatttgcaccatcatttacttttctggcttacttttgatagaaatctaggttggttcaaacctttttactcttaaaacaatgctgcagttaacacccttgtacatatatctttagagagaagatattttaaaaagaaatacctttttaaaaattattttattattttttaatagagactatgttgcctaggctggtcttgaaattctgggctaaagcaatcctaccaccttggcctcccaaagtgctgagattacaggcatgagccattgcacctggccaagaagagacatcttgacttgagcctgaagactatgtacagagactgacctcacagactgaccattccatcccacagctgctggacatagagtgatttgcagcccctcctttcagagtaccacatccctctcaagtgttccacaacatctaggaaagtgagctcttaaagacagactaaaaagagtaataaatcaatacaacaacattaaaagccagactagcggagtttgaatcttggccctgctgttagtaactgtgtgagccttgggcaagttactcagcctccttgtgtcttggttttggtttcttcatctctaagtaattatatctgtcattattgccctgatcacaaacaaaagcctgaatgtactatgtttaaaagacaaaccaaaaattaacccaaacttgcattatttgtctgagctacagaatgttctttccttggagagatatctgatattaaacatcatctgcattttacttgcctagaaaatacacggtaacttttctgccttgcagcatcaaactatagtacagctgagccccagtgctgtgcagtctgactctaattaaaggcaccttctttacagcagggctctggggaactggaaaagggggtttgtttcattatctggttttattaagcagatgaatgcagccagctatatgaagcactttgcagtgaatggcaggtgtcccatatctggttatgttaacctagaaagggctcactctacctctaggcatgtttcatcccaacaatcagactgtgccaaagcaggggactttgtcctttgtggattgcatagctggatacccatcatctgtttctctgattggaagctgctgttgtacagaaagacctgcatttcccccttgtctccagttctctcactactttttcctcctctgtgagtgaccatccaggcagtcaccataactgctggagtgtctgggattggtagctctctccaactgcctgcttgctctttacagcctctctctgtgactggaatctctccacctcatcgtatctaaggataacccagaaacatggggtgtcctaggtatgtttatctcgacactgaaccccctaggcttctgatgaatccagtgattagctaaatttgacatagaaagtaagaaggaatgtctactttgtattgtggtcctaatctaagatcaggagaatcctggaattgttatctgtctcttgctctgagatacagacttgttcataggtgtggggcctgattggaacaggatctgccattggtcacaataggtcaagggcttgttctgaaccctagttagcttcattcagagaaagaaacttcctacctggtcagctttttcagcttctccaacaaatgggagttgaggcagtaggagtgtggggttcttgggaagacgatggggccttgtattaaggagaaataatgaactatcttcttgattcttccattgagaaaagcatatgaatcctaggaaagggctcagcctgtgataggcattcaataaatactccaatgctgtcattcctttgtctacagcatccccaaacaatgtaccagtgatgggctacctgagctcatctagtcgccaagcagtatctcctgcttgctgctgctttactacattccagatgcccacctcatccaatttccagagccactatctctgctgtccactttccttcaggctctgtgaatacttcaacctgctgtgatttggggccgtttgtactctgcatgtattcaataaattcaattcagcaat

SEQ ID NO: 1247 - DNA, 484 bp, Artificial
  cDNA Sequence
acaggggctcccatttaccctggcttccccaaagtcacagaggttcatcatgagcagaaagcctcaaactcttcagcatctcagagaagcttacagatgtttaaggtgaccatgtccaggattctgaggctcaaaatacagatgcaggaaaaacatgaagccgttatgaatgtgaaaaagcagacccaaaaggggaactcaaagaaagttgtgcaaatggagcaggaacttcaggacttacagtcccagctgtgtgcagagcaggctcagcagcaggcaagagtggagcaactagagaagactttccaggaagaggaacagcatcttcagggtttggagatagcccaaggagaaaaggacctgaagcaacagctggcccaggctctgcaggaggaagagaaggagaagatgcaagcacagaaggaagaagttcttagccacatgaatgatgtgctagagaatgagctccaatgtattatttgtt

SEQ ID NO: 1248 - DNA, 735 bp, Artificial
  cDNA Sequence
aacaacaaaaacttgtggtgcaggttctaagacgcagggtgtcttccagataagaatccacaagtgactcattgacttgcaccgtcctctgaggttatcagctcattacttccattagtaatgtgcccaggagtgaaggctgaagtcaccattgcagatgcttaggtcaactattttaattcattgattactagttgttaaaaaaatcatagcagccacctcctagtgctgttgttaggattaaacaatcccatggacaaggtttcaaacagccccaggcacaggctatgggctcaatgatcatcagctgctggagtccctgcaacacggtgggccacaggatagagcattaaagggcctggtagaaactggaaagacctgggtctccttggcgtagcagatggcctaggggcaggaccaggtccttgcagcaggtgtggcaggtgccccgtgcatactggaggaagaaaggactacgtctttgcaccacagcatacttccacgttcagccacaggcattcacgcttttgacaagccatcaaatggcttttctatagcaagcttcattaaaatggaagcacattgctctagtatgcagatggggccactttattactttttaatttgtttacggaaagcccatgtttggtgtacaccatctttgcaaatagtaacaaatgggcatgtttgctgcctccaaagctgtggtgtccctggataaatagaccgaaacca

SEQ ID NO: 1249 - DNA, 514 bp, Artificial
  cDNA Sequence
tttttaacaactagtaatcaatgaattaaaatagttgacctaagcatctgcaatggtgacttcagccttcactcctgggcacattactaatggaagtaatgagctgataacctcagaggacggtgcaagtcaatgagtcacttgtggattcttatctggaagacaccctgcgtcttagaacctgcaccacaagtttttgttgttggtgattctcaaagtcctgggaggcatcagaattggtcctgtcacttttgagagttctttccttggggcctctgatcaagtcagcacacacctccagggatttttctttgcagctggttagggtaattctaattcggtgatttgccacctctggctccatgagtgtttctctggtgtccttaaaagccacagctggctgcagtgcagcttcctgaccaacttgtttcttggtgagtgaacagcggtgacttgcagcaggaactggcggaccagagctccgtagcacccataacctcatcttcctgaaaaa

SEQ ID NO: 1250 - DNA, 442 bp, Artificial
  cDNA Sequence
gagatgacttgcccaaggtcccacagccagtaatttgaatgcaggcagtcaaaccaaggaggaagcagggagcagctgtgcctggatgggcgagggtggaggactgcacaggtcagggagctcgttctggctcctgccaggggagtcggccatgcagtgtgtgaaaggtctcctggttcctgggagtgttggctgtgatgacatcatcctagaagtcactgactggattggcaatggggctgatgctgagtgcctggcacgctatgtgctgggcactgggctacacaacggacactgaatactttccatagacaaccctgcacgatgcatgaccttgggcaagttacttgacctttgtgggcctcagttgccttgtcagtaaattggggataataataggactcacttcccaggaataaatgactttctccaagtaaagcaa

SEQ ID NO: 1251 - DNA, 457 bp, Artificial
  cDNA Sequence
ccgcagtactggacccgagcgcgacggtgcggctggcggacccgggctggcttgtggggaaacgaaactgagggaggaggcggcggctctggcagcggcggcgacagtgtcggcctgaccccccctccgctccccggcagctcgctctctcccctcagcttaacgatgaagaggagaactgacccagaatgcactgcccccatcaagaaacagaaaaaaagagttgcagagcttgccctgagcctcagctccacgtccgatgatgaacctccctcctctgtcagtcatggagcaaaagggttattcacagtttccatagatgctttctgaggaatggtaaaatgtctgggagcttgcctcaaatacctcaagcatctactacaagccttagtgggtctgatagtgagaccgaggggaaacaacacagctctgactcttttgacgatgcattcaaagc

SEQ ID NO: 1252 - DNA, 4033 bp, Artificial
  cDNA Sequence
cgcagtactggacccgagcgcgacggtgcggctggcggacccgggctggcttgtggggaaacgaaactgagggaggaggcggcggctctggcagcggcggcgacagtgtcggcctgaccccccctccgctccccggcagctcgctctctcccctcagcttaacgatgaagaggagaactgacccagaatgcactgcccccatcaagaaacagaaaaaaagagttgcagagcttgccctgagcctcagctccacgtccgatgatgaacctccctcctctgtcagtcatggagcaaaagcatctactacaagccttagtgggtctgatagtgagaccgaggggaaacaacacagctctgactcttttgacgatgcattcaaagcagactctcttgtggaaggaacttcttctcgctattccatgtataatagcgtctcccagaagcttatggccaagatgggcttcagggaaggtgaaggattgggtaaatacagccagggtcggaaggacatcgttgaggcttccagtcagaaaggtcgaagaggcttgggtctgacactccggggctttgaccaggagctgaacgtggactggcgagatgagccagagcccagtgcttgtgagcaggtgtcatggtttccagaatgtaccactgaaattcctgacactcaggaaatgagcgattggatggtggtgggaaagagaaagatgattattgaagatgaaacagagttttgtggggaagagctgcttcacagtgtgttgcagtgtaagagcgtgtttgatgtcttggatggggaagagatgcggcgagctcggactcgggccaatccctatgagatgatccgaggagtcttctttctaaacagggcagcaatgaagatggctaacatggattttgtatttgatcgcatgttcacaaatccgcgggactcttatgggaagccactggtgaaggaccgggaagctgagcttctgtactttgctgatgtctgcgcaggcccaggtggcttctcagagtatgtgctgtggaggaagaagtggcatgcaaagggctttggaatgactttgaagggccctaatgacttcaagctggaggacttctactctgcttccagtgaactcttcgaaccctactatggtgagggtgggattgatggagatggagatatcacccgcccagagaacatctctgcttttcggaattttgtcctggataacacagatcgcaagggtgtccattttctgatggctgatgggggtttctcggtggaggggcaggagaacctgcaggagatcctcagcaagcagctgcttctgtgtcagttcctcatggcgctgtccattgtccggacaggaggccacttcatctgtaaaacctttgacctgttcacaccgtttagtgtggggcttgtctacctgctgtactgctgctttgaacgagtttgtctcttcaagcctattaccagccgtcctgccaactcagagaggtatgtggtgtgcaagggcctgaaggtgggcatagatgatgttcgggattacctcttcgcagtgaatattaaactcaatcagctgcggaacacggattccgacgtcaacttggtggtccccctggaggtgatcaagggagaccatgaatttactgactacatgatacggtccaatgagagccactgtagtctgcagatcaaagctctggcgaaaatccatgcctttgttcaagacacgacactgagtgagcctcgacaggcagagatacggaaggagtgcctccgactctgggggatcccagaccaggctcgtgtggctccttcttcctccgaccctaaatcgaagttctttgagctaatccagggcactgagattgacatcttcagctacaagcccacactgctcacctctaaaaccctggagaagatccgccctgtgtttgactaccgctgcatggtatctggcagtgagcagaagttcctcatcggcctggggaaatcccagatctacacatgggatggccgccagtcagaccgctggatcaagctagacctgaagacagagctgccccgggacactctgctatctgtggaaattgtgcatgagctgaaaggggaggggaaggcccagaggaagatcagtgccatccacatcctcgatgtccttgtgctgaatggcaccgacgttcgggagcagcactttaaccagcgaattcagcttgccgagaaatttgtgaaagccgtttccaagcctagtcggcccgacatgaatcccatcagggtgaaggaggtgtacagactggaagagatggagaagatttttgtcaggttggagatgaagatcatcaagggctccagtggcaccccaaagctcagctacacagggcgtgatgaccggcactttgtacccatgggcctctacatcgtcaggacagtgaatgagccctggactatgggattcagcaaaagcttcaagaagaagttcttctacaacaagaaaaccaaggactctacttttgacctccctgcagactccattgccccatttcacatttgctactatggccggctcttctgggagtggggggatggcattcgtgtgcatgactcccagaagccccaggaccaggacaagctgtccaaggaggacgtcctctccttcatccagatgcacagggcctaagagcctcagaatgtgccacccctgcagaatgccctgtcattcctgagatggggccacctggggcccacagtgctggcttcttccccctcttgaaaagggactggggagcattgcacctggcatgaggagtgggtggcctcctctccatcccctgaagagctcaggcagggccctgcagagaacactcatgttccttctgggacacctgcctgggaactttcccctgccaggactcagcctgaaggaagctgctcctgaggcaggtatgaggtcagtgcctagggcacgtgggactgatggaggacatatcagagtggcagagctgtgggctctgctgttctctcctgcatcctgtagactcacttttctgagttccatgcactgccctgagggtagccatgcccttgctttgcccaactttttattgggccatccctgagtgggtggagacctgctgtcatgagctggccaggagaacctgctataaaaaaatcaaggttttgtttctttgaacttactctgttttgatgccaaattggagaccattttcttgtctccttcccccactcatcctggccttccctggagttcttcctagcccagagctctgacagtccagcagggtgggaaggagggagtttgggcaaactctcatccctgataccacattgagatcctgggagccctcttttcgtactgagtatggagttgtagagccatcctaggtgccatccccttttggtccaaacattgggcagcgctagatggcaggaagcagccttgaagacccgtctttcccccacagcagcaggggccccagcagtaacaaagggtacctccaggggtttgggtagcgctgccctctggcagtcatgcaccgctgtctgccatagccgctctagggtcttggcagaattctgagcttgaagtgcagctcccttactaccctttcccttcctttttcttccctaataggaggtacaatctgcttttgtttgtcgttaagtggtcactcccatttcctttatcttggccgacaacacagagaggagggggagctgggcagtagcttggggtgggggtgggcacctgtggttgtttttaatgggaaatacctctcagagatgttcatgcaggctccctagggccccatcccagtgccaggctggtttccatggagatagggcactgaggctcccgtgaggttggaatcgacttcaccatgggggtccttcagccagcatccagctccccacccccaggctggcagtagcactgctgagatgctgtatttccacccaattctgggtatatcagtgtgtcttgcagaatcttggatcattaaagataaacatattttt

SEQ ID NO: 1253 - DNA, 1280 bp, Artificial
  cDNA Sequence
cgcagtactggacccgagcgcgacggtgcggctggcggacccgggctggcttgtggggaaacgaaactgagggaggaggcggcggctctggcagcggcggcgacagtgtcggcctgaccccccctccgctccccggcagctcgctctctcccctcagcttaacgatgaagaggagaactgacccagaatgcactgcccccatcaagaaacagaaaaaaagagttgcagagcttgccctgagcctcagctccacgtccgatgatgaacctccctcctctgtcagtcatggagcaaaagcatctactacaagccttagtgggtctgatagtgagaccgaggggaaacaacacagctctgactcttttgacgatgcattcaaagcagactctcttgtggaaggaacttcttctcgctattccatgtataatagcgtctcccagaagcttatggccaagatgggcttcagggaaggtgaaggattgggtaaatacagccagggtcggaaggacatcgttgaggcttccagtcagaaaggtcgaagaggcttgggtctgacactccggggctttgaccaggagctgaacgtggactggcgagatgagccagagcccagtgcttgtgagcaggtgtcatggtttccagaatgtaccactgaaattcctgacactcaggaaatgagcgattggatggtggtgggaaagagaaagatgattattgaagatgaaacagagttttgtggggaagagctgcttcacagtgtgttgcagtgtaagaagccactggtgaaggaccgggaagctgagcttctgtactttgctgatgtctgcgcaggcccaggtggcttctcagagtatgtgctgtggaggaagaagtggcatgcaaagggctttggaatgactttgaagggccctaatgacttcaagctggaggacttctactctgcttccagtgaactcttcgaaccctactatggtgagggtgggattgatggagatggagatatcacccgcccagagaacatctctgcttttcggaattttgtcctggataacacagatcgcaagggtgtccattttctgatggctgatgggggtttctcggtggaggggcaggagaacctgcaggagatcctcagcaagcagctgcttctgtgtcagttcctcatggcgctgtccattgtccggacaggaggccacttcatctgtaaaacctttgacctgttcacaccgtttagtgtggggcttgtctacctgctgtactgctgctttgaacgagtttgt

SEQ ID NO: 1254 - DNA, 550 bp, Artificial
  cDNA Sequence
gtgtccattttctgatggctgatgggggtttctcggtggaggggcaggagaacctgcaggagatcctcagcaagcagctgcttctgtgtcagttcctcatggcgctgtccattgtccggacaggtgacacttcctcagctgtctcctcaccccaggacccacttagaggccctattggacaagaacatgtacaaggggttggtggggaagttaaaaaaatctgcttatattagaggacaggtagctaaatgagtaatttagggaagaaagggctgtggaatcctcaaagtcccctccaaagatggttctcccccttaaattgtctctgagttttaacagacccaggtgctggtttccttgactttgtcatatttactcccaagactacttcacccatctcttggaatagacccattggctgcttttggtgttttctctctaatctaggaggccacttcatctgtaaaacctttgacctgttcacaccgtttagtgtggggcttgtctacctgctgtactgctgctttgaacgagtttgtctcttcaagcc

SEQ ID NO: 1255 - DNA, 1032 bp, Artificial
  cDNA Sequence
tggcagtgagcagaagttcctcatcggcctggggaaatcccagatctacacatgggatggccgccagtcagaccgctggatcaagctagacctgaagacagagctgccccgggacactctgctatctgtggaaattgtgcatgagctgaaaggggaggggaaggcccagaggaagatcagtgccatccacatcctcgatgtccttgtgctgaatggcaccgacgttcgggagcagcactttaaccagcggtctgacctgggccccagggtagggagggtgggggtaggccagggcagcttgggaggacagcggcctcccgaggtgtggccccttatctaggccttctctgcttgttgacatcctgagagtttccccctcccacccactgactggtcccaaagtcagggtgagaattggagttgccacttcagagtttgctagggcttgggccctggttatcagagataccagcacactccattttgccacagctgctcaggttgaggtatttatgttaaggttgagcaagagggtgaccttgcgggtagagggggtactccttggaagaaatatcctgtgcttgagtggtcccatttaagttgctcatctgagtgggtgcactgtagtttccatgctttggggtgacagggcagacacatacaataaagatgatacttgaagttctagtggaggtgactgagcacagctgaaggcacacttcaggaaaaccaaccgacatagtgaaattagagaattcagcttgccgagaaatttgtgaaagccgtttccaagcctagtcggcccgacatgaatcccatcagggtgaaggaggtgtacagactggaagagatggagaagatttttgtcaggttggagatgaagatcatcaagggctccagtggcaccccaaagctcagctacacagggcgtgatgaccggcactttgtacccatgggcctctacatcgtcaggacagtgaatgagccctggactatgggattcagcaaaagcttcaagaagaagttcttcta

SEQ ID NO: 1256 - DNA, 446 bp, Artificial
  cDNA Sequence
tcgggattacctcttcgcagtgaatattaaactcaatcagctgcggaacacggattccgacgtcaacttggtggtccccctggaggtgatcaagggagaccatgaatttactgactacatgatacggtccaatgagagccactgtagtctgcagatcaaagctctggcgaaaatccatgcctttgttcaagacacgacactgagtgagcctcgacaggcagagatacggaaggagtgcctccgactctgggggctcccttactaccctttcccttcctttttcttccctaataggaggtacaatctgcttttgtttgtcgttaagtggtcactcccatttcctttatcttggccgacaacacagagaggagggggagctgggcagtagcttggggtgggggtgggcacctgtggttgtttttaatgggaaatacctctcagagatg

SEQ ID NO: 1257 - DNA, 445 bp, Artificial
  cDNA Sequence
gccatccacatcctcgatgtccttgtgctgaatggcaccgacgttcgggagcagcactttaaccagcgaattcagcttgccgagaaatttgtgaaagccgtttccaagcctagtcggcccgacatgaatcccatcagggtgaaggaggtgtacagactggaagagatggagaagatttttgtcaggttggagatgaagatcatcaagggctccagtggcaccccaaagctcagctacacagggcgtgatgaccggcactttgtacccatgggcctctacatcgtcaggacagtgaatgagccctggactatgggattcagcaaaagcttcaagaagaagttcttctacaacaagaaaaccaaggactctacttttgacctcccttactaccctttcccttcctttttcttccctaataggaggtacaatctgcttttgtttgtcg

SEQ ID NO: 1258 - DNA, 769 bp, Artificial
  cDNA Sequence
aggggaaggcccagaggaagatcagtgccatccacatcctcgatgtccttgtgctgaatggcaccgacgttcgggagcagcactttaaccagcgaattcagcttgccgagaaatttgtgaaagccgtttccaagcctagtcggcccgacatgaatcccatcagggtgaaggaggtgtacagactggaagagatggagaagatttttgtcaggttggagatgaagatcatcaagggctccagtggcaccccaaagctcagctacacagggcgtgatgaccggcactttgtacccatgggcctctacatcgtcaggacagtgaatgagccctggactatgggattcagcaaaagcttcaagaagaagttcttctacaacaagaaaaccaaggactctacttttgacctccctgcagactccattgccccatttcacctccccagccttgcctgcctgtcgaagatggattaactccgcactcccctgggatcgccacatgaccacttcaagtccccaagccgcccttcgctgcacagactgcatttttttctgccataattacaagcaatggcactgactggagggcatgacagtgtgtggtggggggatggacaggtggcacaatgtctgctgctcaaccccagcagtgcccgagccctggaagtaactcccactatttggcttggaaagtgcttcccactgtctccttcccactcgagctgggggccttctcctctattctgaattgtaatccagagctttcccttgaa

SEQ ID NO: 1259 - DNA, 356 bp, Artificial
  cDNA Sequence
cctcacagattttattttttggcaggcatagggttgggaatatccataaggtgactggagctcaggtaatgtgaggatttctttatctagagaggaaattggtcaggggaagcgtgtttgatgtcttggatggggaagagatgcggcgagctcggactcgggccaatccctatgagatgatccgaggagtcttctttctaaacagggcagcaatgaagatggctaacatggattttgtatttgatcgcatgttcacaaatccgcgggactcttatgggaagccactggtgaaggaccgggaagctgagcttctgtactttgctgatgtctgcgcaggcccaggtggcttctcagag

SEQ ID NO: 1260 - DNA, 619 bp, Artificial
  cDNA Sequence
gcgcacatagcgacttggtgggcgcgtccagtgatgactgggggatcccggcaagtaacatgactaaaaagaagcgggagaatctgggcgtcgctctagagatcgatgggctagaggagaagctgtcccagtgtcggagagacctggaggccgtgaactccagactccacagccgggagctgagcccagaggccaggaggtccctggagaaggagaaaaacagcctaatgaacaaagcctccaactacgagaaggaactgaagtttcttcggcaagagaaccggaagaacatgctgctctctgtggccatctttatcctcctgacgctcgtctatgcctactggaccatgtgagcctggcacttccccacaaccagcacaggcttccacttggccccttgatcaggatcaagcaggcacttcaagcctcaataggaccaaggtgctggggtgttcccctcccaacctagtgttcaagcatggcttcctggcggcccaggccttgcctccctggcctgctggggggttccgggtctccagaaggacatggtgctggtccctcccttagcccaagggagaggcaataaagaacacaaagctgttcccgtctgctgagtaaa

SEQ ID NO: 1261 - DNA, 401 bp, Artificial
  cDNA Sequence
gcgcacatagcgacttggtgggcgcgtccagtgatgactgggggatcccggcaagtaacatgactaaaaagaagcgggagaatctgggcgtcgctctagagatcgatgggctagaggagaagctgtcccagtgtcggagagacctggaggccgtgaactccagactccacagccgggagctgagcccagaggccagagaaggaactgaagtttcttcggcaagagaaccggaagaacatgctgctctctgtggccatctttatcctcctgacgctcgtctatgcctactggaccatgtgagcctggcacttccccacaaccagcacaggcttccacttggccccttgatcaggatcaagcaggcacttcaagcctcaataggaccaaggtgctggggtgtt

SEQ ID NO: 1262 - DNA, 648 bp, Artificial
  cDNA Sequence
tcttcgtcgccgctctctctctcacctctcagggaaagggggggacataggggcgtcgcggggccccggcgaatgcgccccccgccgcctctcgggctgcgccgcctcgcggggatgaagcaccggccgtgaagatggaggtgacctgccttctacttctggcgctgatccccttccactgccggggacaaggagtctacgctccagcccaggcgcagatcgtgcatgcgggccaggcatgtgtggtgaaagaggacaatatcagcgagcgtgtctacaccatccgggagggggacaccctcatgctgcagtgccttgtaacagggcaccctcgaccccaggtacggtggaccaagacggcaggtagcgcctcggacaagttccaggagacatcggtgttcaacgagacgctgcgcatcgagcgtattgcacgcacgcagggcggccgctactactgcaaggctgagaacggcgtgggggtgccggccatcaagtccatccgcgtggacgtgcagtacctggatgagccaatgctgacggtgcaccagacggtgagcgatgtgcgaggcaacttctaccaggagaagacggtgttcctgcgctgtactgtcaactccaacccgcctgcccgcttcatctggaagcggg

SEQ ID NO: 1263 - DNA, 692 bp, Artificial
  cDNA Sequence
cgcgtgagcgctggagcttcatccgggcacttcataagggatccgcagctgctcccgctctccagaaagacagcaagaagcgagtattttccggcattcaacctacaggaatcctccacctgggcaattacctgggagccattgagagctgggtgtctgaacacacacaattaagttggatcctttcctgcatggtcagactacctcgattacaacatttacatcagtggaaggtccacacacgttcctgttggggaggatcaagtccagcacatggaactagttcaggatctagcacaaggtttcaacaagaagtatggggagttctttccagtgcccgagtccattctcacatccatgaagaaggtaaaatccctacgtgatccttctgccaaaatgtcgaaatcagaccctgacaaactggccaccgtccgaataacagacagcccagaggagatagtgcagaaattccgcaaggctgtgacagacttcacctcggaggtcacctatgacccggctggccgcgctggcgtgtccaacatagtggcggtgcatgccgcggtgacggggctctccgtggaggaagtggtgcgccgcagcgcgggcatgaacactgctcgctacaagctggccgtggcagatgctgtgattgagaagtttgccccaattaagcgtgaaattgaaaaactgaa

SEQ ID NO: 1264 - DNA, 829 bp, Artificial
  cDNA Sequence
ttaggtgtctgaacacacacaattaagttggatcctttcctgcatggtcagactacctcgattacaacatttacatcagtggaaggcaaagactaccaagcagaagcacgatggcacggtgggcctgctcacatacccagtactccaggcagccgacattctgttgtacaagtccacacacgttcctgttggggaggatcaagtccagcacatggaactagttcaggatctagcacaaggtttcaacaagaagtatggggagttctttccagtgcccgagtccattctcacatccatgaagaaggtaaaatccctacgtgatccttctgccaaaatgtcgaaatcagaccctgacaaactggccaccgtccgaataacagacagcccagaggagatagtgcagaaattccgcaaggctgtgacagacttcacctcggaggtcacctatgacccggctggccgcgctggcgtgtccaacatagtggcggtgcatgccgcggtgacggggctctccgtggaggaagtggtgcgccgcagcgcgggcatgaacactgctcgctacaagctggccgtggcagatgctgtgattgagaagtttgccccaattaagcgtgaaattgaaaaactgaagctggacaaggaccatttagagaaggttttacaaattggatcagcaaaagccaaagaattagcatacactgtgtgccaggaggtgaagaaattggtgggttttctataggaagtttcaacgaatcacagcaaggcttttgtgccttgcactccatgcattctgataacggcagctttcctaaaaagaaaaagttatagt

SEQ ID NO: 1265 - DNA, 410 bp, Artificial
  cDNA Sequence
cctcccctgccccctcagcctgcgggcagcagaaggcggcggccagcctcctcctgcccctcggccggacgaaccgcggctgccgcgcctgtcacctctgcacctgcccggctgaggtgagatgcctggcgcgcaagaaaaatctgaaatttgaaacagaaatggccacataaggacaactcagatgaagtgcaggcgggctgacatcgcgcacttgggtctttccgggaaagacagccgcgctctgggagaagcctagtcctccggcttgtccccggacccgccccaaaggccgctgggagctcggtgaggacgtggcggtccccttgctcatctgactccggaggcaggttccgcagaaagagctctcaatctcggccgctgggctccaagataatctcctggcgaaa

SEQ ID NO: 1266 - DNA, 657 bp, Artificial
  cDNA Sequence
ctcagcctgcgggcagcagaaggcggcggccagcctcctcctgcccctcggccggacgaaccgcggctgccgcgcctgtcacctctgcacctgcccggctgagtagaaaaatctgaaatttgaaacagaaatggccacataaggacaactcagatgaagtgcaggcgggctgacatcgcgcacttgggtctttccgggaaagacagccgcgctctgggagaagcctagtcctccggcttgtccccggacccgccccaaaggccgctgggagctcggtgaggacgtggcggtccccttgctcatctgactccggaggcaggttccgcagaaagagctctcaatctcggccgctgggctccaagataatctcctggcgaaagctaagaggcggccatcccttcccggggactcagcccctagattcagcttcttccgccgcaaaaaactcccaagccctgcgaactcgcaacttgcctctccaggcttccggcgtgggcgtcccagctacactttcgagcactttgcttggccggcatctacccgctcttcgattaaggaaagcgcagtggggacagaggcaactcctgcctcctgtaccaggcctacgtagtcgcccaggtggccgggtcacaaataaacaattccaccatcaagaaa

SEQ ID NO: 1267 - DNA, 495 bp, Artificial
  cDNA Sequence
gccaatgcttctcccgtcctttgcatggcacccaagaaggagaaaggaggaactgtgaacaccagttctaagatatgggaaccctcgctcatagctgcacagttcaatcagaacgattggcaggcctccattgcttttgtggttgggaaccagattgaagatgatcttctcatccaagcccttaccgtggctgtccaggtccctcagcgtaaactcttcagtatggtgtcgtggcaagacattctccagcagattaatgaaataaatacacttgttggatctgcttcatctaaaaaggcaaaaaaacctgtaggtggtaatgctcctttatattatgaggtaagtgaaagtgtttatagaagatatttttgtgtttttagaaaaaagaattgaagtaataatttgatagccatttttaaatttcattctttgaaaataaatgcctgctcctcattggagatatttgttcctgatggtgaacacacacaaaaaaaa

SEQ ID NO: 1268 - DNA, 2878 bp, Artificial
  cDNA Sequence
cggccgcggcggctggccggactcaggtgtttcggacgctattgcccttcgcgccagccgtcgagtgggcagcagcgggactcagccgggcgccaggttcctgccaggcagcgccgggaagcgcgggcggccgagaactccttcctgctacttcgcccagcgccgctgcttcggcttcccagcgaagtgggagaccttcctccctgtttgcagacgtccgtgggagacccttattttttccaccgctaaggttaagagattctggaatagaagcgtcgaaggagatcaagtgaaccttctacaactcctcggatgtcgccagtctccctttcggggcggaagactacgtttgagcatctcactgaggtgcaggaatggaagaacccaccttgcagcttttctgcagtgtggcttgcctgatctacccctaggaatgaagaggaggcttgtaataatccgatgaagtacagatgttgaagaggatatcgcaggacctaaacttgtgatcgtttgggggaggtcacacacgtttctgagtgggaatggatgggcgtgaatgacgtgccctcttaaaaagcacaacagtcctttaagaggagcaaaattgagttttcccattttggccaagattttgaagacagttcaatgtattctacatttgacataagatgagaactttctaaagtattctctccaagagcgtaaacgatgactaccccagccctgctgcccctctctggacgtaggataccacctctgaacctggggccgccttccttcccacatcacagggctaccttgagactttctgagaagtttattcttctccttattcttagtgccttcatcactctgtgttttggggcattctttttccttccagactcttcaaaacacaaacgctttgatttgggtttagaagatgtgttaattccacatgtagatgccggtaaaggggctaaaaaccccggagtcttcctgatccatggacccgatgaacatagacacagggaagaggaagaacgtctgagaaataaaattcgagctgatcatgagaaggccttggaagaagcaaaagaaaaattaagaaagtcaagagaggaaattcgagcagaaattcagacagagaaaaataaggtagtccaagaaatgaagataaaagagaacaagccactgccaccagtccctattcccaaccttgtaggaatacgtggtggagacccagaagataatgacataagagagaaaagggaaaaaattaaagagatgatgaaacatgcttgggataactataggacatatgggtggggacataatgaactcagacctattgcaaggaaaggacactcccctaacatatttggaagttcacaaatgggtgctaccatagtagatgctttggataccctttatatcatgggacttcatgatgaattcctagatgggcaaagatggattgaagacaaccttgatttcagtgtgaattcagaggtgtctgtgtttgaagtcaacattcgatttattggaggcctacttgcagcatattacctatcaggagaggagatattcaagattaaagcagtgcaattggctgagaaactccttcctgcctttaacacacctactgggattccttgggcaatggtgaatttgaaaagtggagtagggcgaaactggggctgggcatctgcaggtagcagcattctggctgaatttggtacactacatatggagttcatccacctcagctacttgacaggggacctgacttactacaaaaaggttatgcacattcggaaactacttcagaaaatggatcgtccaaatggtctttatccaaattatttgaaccccagaacagggcgctggggtcagtatcatacatctgtcggtggcctgggagacagtttttatgaatacttactgaaagcatggttgatgtcagataaaacagaccatgaggcaagaaagatgtatgatgatgctattgaggctatagaaaaacatcttattaagaagtctcgtggaggtcttacctttattggagaatggaagaatgggcacttggaaaaaaagatggggcatttggcctgctttgctgggggaatgtttgcactaggagcagatggttccagagcagataaagctggtcattatttagagctaggggcagaaattgcacgtacttgtcatgagtcatatgacagaactgcattaaagctaggtcctgaatcattcaagtttgatggtgcagtggaggctgtggctgtccggcaggctgaaaagtattatatcctccgtccagaagtaattgaaacctattggtacctatggcgattcactcacgatccaagatacaggcagtggggctgggaagcagcactggccattgaaaagtattgccgagttaatggtgggttttctggagtcaaagatgtatattcctctactcctacacatgatgatgtacagcagagcttttttcttgctgaaacattaaaatatttgtatctgctgttctccggtgatgaccttttacctttagaccactgggtgtttaatacagaggctcaccctctgcctgtgttacatttagccaacaccacactttcaggaacttctcaagggatgaggagacagaacccctacttccaagtgctctatttgtattacccagatgactgaagcttaagagaaggcagggaagtatacaagcagagccagttctggtacaaacaaagaatttgacagggacaatggaagggtcttcttcaccactccttaccttctatgtgatggaaagactagagcttataaaagtacttccatttttttattctcctgaataccaaaggcaattaaagtcagctacaaatga

SEQ ID NO: 1269 - DNA, 2998 bp, Artificial
  cDNA Sequence
cggccgcggcggctggccggactcaggtgtttcggacgctattgcccttcgcgccagccgtcgagtgggcagcagcgggactcagccgggcgccaggttcctgccaggcagcgccgggaagcgcgggcggccgagaactccttcctgctacttcgcccagcgccgctgcttcggcttcccagcgaagtgggagaccttcctccctgtttgcagacgtccgtgggagacccttattttttccaccgctaaggttaagagattctggaatagaagcgtcgaaggagatcaagtgaaccttctacaactcctcggatgtcgccagtctccctttcggggcggaagactacgtttgagcatctcactgaggtgcaggaatggaagaacccaccttgcagcttttctgcagtgtggcttgcctgatctacccctaggaatgaagaggaggcttgtaataatccgatgaagtacagatgttgaagaggatatcgcaggacctaaacttgtgatcgtttgggggaggtcacacacgtttctgagtgggaatggatgggcgtgaatgacgtgccctcttaaaaagcacaacagtcctttaagaggagcaaaattgagttttcccattttggccaagattttgaagacagttcaatgtattctacatttgacataagatgagaactttctaaagtattctctccaagagcgtaaacgatgactaccccagccctgctgcccctctctggacgtaggataccacctctgaacctggggccgccttccttcccacatcacagggctaccttgagactttctgagaagtttattcttctccttattcttagtgccttcatcactctgtgttttggggcattctttttccttccagactcttcaaaacacaaacgctttgatttgggtttagaagatgtgttaattccacatgtagatgccggtaaaggggctaaaaaccccggagtcttcctgatccatggacccgatgaacatagacacagggaagaggaagaacgtctgagaaataaaattcgagctgatcatgagaaggccttggaagaagcaaaagaaaaattaagaaagtcaagagaggaaattcgagcagaaattcagacagagaaaaataaggtagtccaagaaatgaagataaaagagaacaagccactgccaccagtccctattcccaaccttgtaggaatacgtggtggagacccagaagataatgacataagagagaaaagggaaaaaattaaagagatgatgaaacatgcttgggataactataggacatatgggtggggacataatgaactcagacctattgcaaggaaaggacactcccctaacatatttggaagttcacaaatgggtgctaccatagtagatgctttggataccctttatatcatgggacttcatgatgaattcctagatgggcaaagatggattgaagacaaccttgatttcagtgtgaattcagaggtgtctgtgtttgaagtcaacattcgatttattggaggcctacttgcagcatattacctatcaggagaggagatattcaagattaaagcagtgcaattggctgagaaactccttcctgcctttaacacacctactgggattccttgggcaatggtgaatttgaaaagtggagtagggcgaaactggggctgggcatctgcaggtagcagcattctggctgaatttggtacactacatatggagttcatccacctcagctacttgacaggggacctgacttactacaaaaaggttatgcacattcggaaactacttcagaaaatggatcgtccaaatggtctttatccaaattatttgaaccccagaacagggcgctggggtcagtatcatacatctgtcggtggcctgggagacagtttttatgaatacttactgaaagcatggttgatgtcagataaaacagaccatgaggcaagaaagatgtatgatgatgctattgaggctatagaaaaacatcttattaagaagtctcgtggaggtcttacctttattggagaatggaagaatgggcacttggaaaaaaagatggggcatttggcctgctttgctgggggaatgtttgcactaggagcagatggttccagagcagataaagctggtcattatttagagctaggggcagaaattgcacgtacttgtcatgagtcatatgacagaactgcattaaagctaggtcctgaatcattcaagtttgatggtgcagtggaggctgtggctgtccggcaggctgaaaagtattatatcctccgtccagaagtaattgaaacctattggtacctatggcgattcactcacgatccaagatacaggcagtggggctgggaagcagcactggccattgaaaagtattgccgagttaatggtgggttttctggagtcaaagatgtatattcctctactcctacacatgatgatgtacagcagagcttttttcttgctgaaacattaaaatatttgtatctgctgttctccggtgatgaccttttacctttagaccactgggtgtttaatacagaggctcaccctctgcctgtgttacatttagccaacaccacactttcaggtaatcctgctgttcgatgaaagcagttccagaaggaccattctcacctgtgttttgtttacatggaccactacagaaattagtttgaaggggcggcttttgaaaacctggacctctatgtcaacatgacagggtgaaactattccccctaagactgttcaacttgtagatacatcaactttgaaattattccattttatacctgaccaaaacatgttctgatatgtgtaggacagagacctggatgtgctttgatcgttaatgaggtggtcacatgagaaatgatacctgttactactgtattgtttttagagtcctgaagtctggaggctagacttcctgaaagcaagtcaagaatatagagcaccttgcaggagttcaaga

SEQ ID NO: 1270 - DNA, 507 bp, Artificial
  cDNA Sequence
agatattcaagattaaagcagtgcaattggctgagaaactccttcctgcctttaacacacctactgggattccttgggcaatggtgaatttgaaaagtggagtagggcgaaactggggctgggcatctgcaggtagcagcattctggctgaatttggtacactacatatggagttcatccacctcagctacttgacaggggacctgacttactacaaaaaggttatgcacattcggaaactacttcagaaaatggatcgtccaaatggtctttatccaaattatttgaaccccagaacagggcgctggggtcagtatcatacatctgtcggtggcctgggagacagtttttatgaatacttactgaaagcatggttgatgtcagataaaacagaccatgaggcaagaaagatgtatgatgatgctattgaggctatagaaaaacatcttattaagaagtctcgtggaggtcttacctttattggagaatggaagaatgggcacttgg

SEQ ID NO: 1271 - DNA, 914 bp, Artificial
  cDNA Sequence
cccgggagggcggctcaggggcggggacgggggcgtggtcccgccgtataagaacggagggggcggcggcgggacggctcactcggtgccgctgcctaggggctgtagaggtcgcgccgctcctgctggggcctgcccacgccaaggacctgcctctgtcgcctcctcttctattgcccagtttccccagccagaacatcccctgaagatggcagaggagagcagctgtaccagggattgcatgtccttcagcgtgctcaactgggatcaggttagccggctgcatgaggtcctcactgaagttgtacctatccacggacgaggcaactttccaaccttggagataactctgaaggacatcgtccagaccgtccgcagtcggctggaggaggcaggcatcaaagtgcacgacgtccggctgaatggctccgcagctggccacgttttggtcaaagacaatggcttgggctgcaaagacctggacctaatcttccatgtggctcttccaacagaggcagaatttcagctggttagagatgtggttctgtgttcccttctgaacttcctgccagagggtgtgaacaagctcaaaatcagtccagtcactctgaaggaggcatatgtgcagaagctagtgaaggtttgcacggacactgaccgctggagcctgatctccctctccaacaagaacgggaagaacgtggagctgaagtttgtcgactccattcggcgtcagtttgagttcagtgtggactctttccaaatcatcctggattctttgcttttcttctatgactgttccaataatcccatctctgagcacttccaccccaccgtgattggggagagcatgtacggggactttgaggaagcttttgaccatctgcagaacagactgatcgccaccaagaacc

SEQ ID NO: 1272 - DNA, 564 bp, Artificial
  cDNA Sequence
aggctgaggtgagtcctggaggtgcgtggttggggcggagagcattatctgcggctccgattttgcagattctggctgaggcgttcgtgatgtcagcagcagccgagacgggcgtgttaaaggccggttgctagggctgggggaactcagattgcttcacctgtggtatcagacatcacaacatggggctcaccaagcagtacctacgctatgttgctagtgcggtctttggcgttatcggcagccaaaaaggtaatattgtctttgtgacacttcgtggtgagaaaggacgttatgtggcagtaccagcttgtgaacacgttttcatctgggacttaaggaaaggagagaagattcttatccttcaggggcttaaacaagaagttacttgcttatgcccctccccagatgggctacacttagctgttgggtatgaggatgggtcgatccgaatcttcagtctcctgagtggggaaggaaatgtgaccttcaatggtcacaaagcagctatcactaccttgaagtatgatcagctaggaggcagactggcatctgggtccaagg

SEQ ID NO: 1273 - DNA, 2455 bp, Artificial
  cDNA Sequence
atgttgaaatgagtctgcaagatgaaatccagcgggtgactaatataaaaacttctgccaaaatcaagtcctttgacttgattcattcacctcacggagagttaaaggctgtcttcctgctgcagaacaacctggtggaattgtattcactgaatccatccttgcctactcctcagcctgtcaggacaagcagaatcactattgggggtcatcgcagtgatgtgcggactttgtcattcagctcagacaatattgctgttctttcagctgcagctgattccattaaaatatggaacaggtctacactgcagtgtattcgcacaatgacctgtgaatatgcactttgctcattctttgtacctggtgatagacaggtagtcataggaacaaagacagggaagctgcagctttatgacttggcttcagggaatctgctggagacaatagatgcacatgatggagctttgtggtccatgtccctctctccagatcagcgtggctttgtgacaggtggtgcagataaatctgtcaaattctgggattttgagttagtgaaagatgaaaatagtacccaaaagagactttctgtgaagcaaacccgaactttgcaactagatgaagatgttctgtgtgtcagttactctcccaatcaaaagctattggctgtgtctttgctggactgtactgtgaaaattttctacgttgatactttaaagttttttctgtcactgtatggacacaaactgcctgttatatgcatggacatctctcatgatggagcactcatagcaactggctccgctgataggaatgtgaaaatctggggtttggactttggggactgccacaagtctctctttgcacatgatgacagtgtgatgtacctacagtttgtacccaagtctcacctcttcttcactgccggaaaagatcataagattaaacagtgggatgcagacaaatttgaacacatacagactctggagggtcatcaccaggaaatatggtgtttggctgtaagccccagtggagactatgttgtatcatcgtcccatgacaaatctctgagactttgggagagaacaagggagcctcttattcttgaggaagaaagggagatggaaagagaagcagaatatgaggagagtgtggccaaagaagaccaaccagcagttccaggagagactcaaggtgacagttactttactggaaagaaaactattgaaacagtgaaagcagctgagaggattatggaggctattgagttgtaccgagaagaaactgcaaaaatgaaggaacacaaagccatttgtaaagctgcagggaaagaggttccacttcccagcaaccccatcctaatggcttatggcagtatctcaccttcagcttatgtattagagatttttaaagggatcaagtcgagtgagctggaagaatctctacttgtgctgcctttctcttatgtcccagacattcttaaactctttaacgaattcattcagctgggctctgatgttgaacttatatgccggtgcctcttcttcctccttaggattcactttggacagatcactagcaatcaaatgcttgtgccagtgatagaaaaattaagggaaacaactatttcaaaagtcagccaagtccgggatgttatcggcttcaatatggctggtcttgattatctcaagagggaatgcgaggcaaaaagtgaagttatgttttttgctgatgctactagccacttggaagagaagaagaggaagaggaaaaagagggagaagttgattctaacgttgacttagaactgaaatgtggtatctttttttttttcaactttttcctttaaaggactcctaaactaagcacagaagagttggcgtcatcttaaaaataccaaataacagaagatcgcattgcagatgatatcaggatgtggtttccagctttgcctgagggaattccaacatgagattatgggctggctccatttcttggacttaaaatgcattattagtttaaaaatctttctgtgctctcaaagcttgagccttgcagctcaagcttgttgttccctttatattctagcagggaataaataattgttttaattaggtatttgtttcattggagttgaaattaacatttcaaaagtttttcgtatttttttatggcagatgatttgtcatttatttatattaggttttactgcctattgagacaaccaggtgcataattgattgccctttggccataaaaatgcagtgtcatggatcttagagctaaaaaggactgtaaaaattacccagaacagcgtcctcagacttaaccttctgcaagttatgtctgtatataagaagattctaattgctaactgtttatacttttctgaataaaatagttgtttctaattaaaaagtagccaagctaagatgcctggctgggcttctgaggaatt

SEQ ID NO: 1274 - DNA, 501 bp, Artificial
  cDNA Sequence
cactgatagtttcctgccattttgtgtcatcagtggtacttgggtcccagaaatggactggttcttactaagcagtgggaatgcagcaatgagcagtgagtatcactaaagagcggacccttacaccaattcctctcattgttgatttcaacaggttgttgcaactgaagaagatctcgtcccacccagtctgcgggagccatcccccagagcagacgggctagaccacagaatcgcagctcacattgtgtcccttctgccctcactctgtctctcagagagggagaaaaagaatcttcatgacatatttttatctgaagaagaaaatgaaagcaaagcagtgcccaaaggccccctcctactgaactatcatgatgcacacgcccacaagaagtacgcactacaggaccaaaagaattttgatccagttcaaattgagcaggagatgcagtccaagttgccactgtgggaatttcttcaattccctctacccccaccatg

SEQ ID NO: 1275 - DNA, 513 bp, Artificial
  cDNA Sequence
ccagatttgctaaacagataaggcagcaatatgtcatgaaaatgaatactcaagaggccaagcagaaagcagatattaaaatcaaagacagaacactatttgtggatcagaatttgtcaatgtctgtgcaagataatgaaagcaaccgagaaccttcagatcctagtcagtgtgatgctaacaatatgaagcattctgacttgaataatctcaaactctcagtccctgataatagacagctgttagagcaggagagcatcatgaaggctcagccccaacatgagtctctgggaattatttggaacttgttgcaaaatctattcaagattggattacaaaagaagaagctatatatcaggaatctaaaatgaatgagaaaatcatcaggaccagagctgagctggaattgaaatcttctgctaatgccaaacttacttctgctagcaaaattttttccattaaagaatctaaaagtaacaaaggaatcagcaaaacagagatatcagatcaaga

SEQ ID NO: 1276 - DNA, 485 bp, Artificial
  cDNA Sequence
ctatttgtggatcagaatttgtcaatgtctgtgcaagataatgaaagcaaccgagaaccttcagatcctagtcagtgtgatgctaacaatatgaagcattctgacttgaataatctcaaactctcagtccctgataatagacagctgttagagcaggagagcatcatgaaggctcagccccaacatgagtctctggatttcatatcaattgcttcaaggacacatgagacatcatggtctatttagagttatagttggcctgagttttctcttcagtggatgtatttatataaatgctgaactgaattggctgtatggttttcccctaaatcaaaatggaacgttcatgctgtcaccttcaccagcccaaggcaagatggaactagtagcaaaaatagcagaccacaaacaatgagatcaaagatgatgcagtcacaaaggctgattctcatgaaaagaaacccaagaagatgatggtggaagca

SEQ ID NO: 1277 - DNA, 443 bp, Artificial
  cDNA Sequence
cagcagcgcagtctaatggactggagttttactgaacattttaaaccgaaagtactgcttcaggtccttcaagaagcccataagcaatataggtgtgttgattcttactaccacacccaagacaactctttacttttagtctttcacaatccaatgaatagacaacgtttgcattgtgaatattggaacattgctctccactccaatgttggattcaggaattatttggaacttgttgcaaaatctattcaagattggattacaaaagaagaagctatatatcaggaatctaaaatgaatgagaaaatcatcaggaccagagctgagctggaattgaaatcttctgctaatgccaaacttacttctgctagcaaaattttttccattaaagaatctaaaagtaacaaaggaatcagcaaaacagagatatcagatcaagaaaa

SEQ ID NO: 1278 - DNA, 901 bp, Artificial
  cDNA Sequence
agagaaggaaaagattcctttcattttagaaggctctctcaaggcatggaaagaagagcaacatcgattagcagaagaggagcgcttaagggaagaaaagaaagcagagaagaagggtaaagaagctggtaaaaagaaaggcaaggataacgcagagaaagaggatagtaggtctttgaagaaaaaatcaccttacaaggagaaatctaaagaagaacaagtcaagatccaagaagtaacagaagagtccccccaccaaccagaacctaagataacttacccgtttcacggatacaatatgggaaatatacccactcaaatctcagggtcaaattactacctgtatccttctgatggggggcagattgaagtggaaaagacaatgtttgaaaaaggcccaacttttatcaaagtgagagtggtaaaggacaaccacaattttatgattcatttaaatgaccctaaggaaattgtgaaaaaggaagagaaaggggattattatttagaagaggaagaagaaggagatgaggaacaaagtcttgaaacggaagtatcagatgcaaagaataaagctttcagcaagtttggatctttttctgccaccttagaaaatggaatctgcctctcgataagttactatggatcaaatggaatggcaccagaagataaggatcctgatttagaaacaatattgaatatcccttcagcactcactccaacagtggttcctgttatagtgaccgttcctcaaagcaaagctaaagggaaaataaaaggcaaagaaaaacccaaagaatcccttaaagaagaagaacacccaaaagaagaagagaaaaaggaagaagaagtagaaccagaacctgttttacaagagactttggatgttcccaccttccagagc

SEQ ID NO: 1279 - DNA, 435 bp, Artificial
  cDNA Sequence
gattattatttagaagaggaagaagaaggagatgaggaacaaagtcttgaaacggaagtatcagatgcaaagaataaagctttcagcaagtttggatctttttctgccaccttagaaaatggaatctgcctctcgataagttactatggatcaaatggaatggcaccaggtgaaatgaacacaacagcaaggataagtgtgccccacagccaagggtccctgccactgcccattctcagtctgctcacttgtcaataacatgttatgatttaatgctcctcattgtttttcctgcaggatggtaatagaagagaagataaggatcctgatttagaaacaatattgaatatcccttcagcactcactccaacagtggttcctgttatagtgaccgttcctcaaagcaaagctaaagggaaaataaaaggcaaagaa

SEQ ID NO: 1280 - DNA, 740 bp, Artificial
  cDNA Sequence
aaaagtcacaaaagtcagtcatcaatggcccataagggtgaaatccatgaccctcctccagaggcagttcaaactgtaactcctgtggaggttcacataggcacctggtttacaaccacacctgaaggaaatcggatcggcaccaaaggattagaaagaatagcagacttgaccccattgttatcctttcaggccacagatcctgtcaatggaacggttatgacaactcgagaagacaaagttgtcatagttgaaaggaaagatggtactcggatagtggatcatgctgatggtaccagaatcacaaccttttatcaagtttatgaagatcaaattattctgccagatgatcaagaaacaaccgagggtcctcggactgtcaccaggcaggtgaagtgtatgcgggtagaaagctcacgctatgccactgttatcgccaactgtgaggacagtagctgctgtgccacctttggagatggaacaactattattgcaaagccacagggaacataccaggtgttacctccaaacacaggctctctttatattgacaaggattgttcagctgtgtactgccatgagtcaagcagtaatatatactatccttttcaaaagcgtgagcagctgcgagctggcaggtacatcatgaggcatacttcagaggttatctgtgaggttctggatcctgagggaaacacttttcaggtcatggctgatggtagcatatcaactatattacc

SEQ ID NO: 1281 - DNA, 811 bp, Artificial
  cDNA Sequence
attacataaactatattctaaagaaagaagatgagctgcaggaaatgatggttaaagattccagaactgaggaggagagaggcaatgctgctgatctcctcaagctggttatgtctttccctaaaatggaggaaactacaaaaagtcatgttactgaagttgcagctcacctaactgatttattcaagcagtctttggctacgcctccaaaatgcccaccagacacatttggtaaagatttctttgaaaagacatggagacacacagcatcctcaaaacgctggaaagaaaagatagacaaaacgaggaaggaaattgagacaacacagaattacctaatggatattaagaaccgcataataccacccttttttaaatctgaattgaaccagttatatcagtctcagtataatcacctggacagtctttccaaaaaactgccttcttttacaaagaaaaatgaagatgcaaacgaaacagctgttcaagatacatctgatcttaatctagatttcaagccacataaggtttcagaacagaaatcctcaagtgtgcctagtcttccaaaaccagagatttctgcagataagaaggatttcactgctcagaaccaaactgaaaatttaacaaaatctcctgaagaagcagaatcttatgagcccgtgaaaattccaacccagtccttgctgcaggatgttgcgggacaaacaagaaaagaaaaagtgaagttgcctcattatttgctgagttccaagcctaagtctcaacctcttgcaaaggtgcaagattctgttggaggaaaagtgaacac

SEQ ID NO: 1282 - DNA, 574 bp, Artificial
  cDNA Sequence
tcatctcccatactattaataattcatcatatagtggtgagggtttttggttttgtttttaagctgaaatcattgccccttttcaccatactttcctttcctttcacatagacacacagcatcctcaaaacgctggaaagaaaagatagacaaaacgaggaaggaaattgagacaacacagaattacctaatggatattaagaaccgcataataccacccttttttaaatctgaattgaaccagttatatcagtctcagtataatcacctggacagtctttccaaaaaactgccttcttttacaaagaaaaatgaagatgcaaacgaaacagctgttcaagatacatctgatcttaatctagatttcaagccacataaggtttcagaacagaaatcctcaagtgtgcctagtcttccaaaaccagagatttctgcagataagaaggatttcactgctcagaaccaaactgaaaatttaacaaaatctcctgaagaagcagaatcttatgagcccgtgaaaattccaacccagtccttgctgcaggatgttgcgggacaaacaagaaaagaaaaa

SEQ ID NO: 1283 - DNA, 634 bp, Artificial
  cDNA Sequence
aggtttaaagtaaagcagcccccacccagcacaggactgaaagtgacttacaaacctggacctgtggcagctggtatgcagacagaactgaatatagagttatttgccacagctgttggagaggatggggccaagggatcagcacacatctctcacaatatcgagattatgacagagcatgaggttctgttcctaccttgtcttcagccaaacagatattagatagatatcaagaacctattacctccaagatgccgaaacgcctgcctttatgtagcttacattccagtgggaggacagacaatacataaacagcaattatgataaacgaccaaaagactttccccagggaaaagaaaatccaatggtccagagaacttctacaatttattcctccacacttggagtcttcatgtctcgtaaagtttctccacattagtttcttctcggtacaactcaatagcctccataatcctctcagcctacagaggatgagaaaggaaagaagtcatcacaacatactccatcatcccaggacactgaaactggaagaactgaccagaaatttgccaaatgaaatagcttcaatctgtttaataaagacgtgcgaatagagtgccaaaaagcatttaaa

SEQ ID NO: 1284 - DNA, 498 bp, Artificial
  cDNA Sequence
cttataggtggcagctggtatgcagacagaactgaatatagagttatttgccacagctgttggagaggatggggccaagggatcagcacacatctctcacaatatcgagattatgacagagcatgaggttctgttcctacctgtggaagcaaatatcctttaaatattttacctgttttaacaagcagcaattatgataaacgaccaaaagactttccccagggaaaagaaaatccaatggtccagagaacttctacaatttattcctccacacttggagtcttcatgtctcgtaaagtttctccacattagtttcttctcggtacaactcaatagcctccataatcctctcagcctacagaggatgagaaaggaaagaagtcatcacaacatactccatcatcccaggacactgaaactggaagaactgaccagaaatttgccaaatgaaatagcttcaatctgtttaataaagacgtgcgaatagagtgccaaaaa

SEQ ID NO: 1285 - DNA, 476 bp, Artificial
  cDNA Sequence
ggagaggatggggccaagggatcagcacacatctctcacaatatcgagattatgacagagcatgaggttctgttcctacctgtggaagcaaatatcctttaaatattttacctgttttaacaagcagcaattatgataaacgaccaaaagactttccccagggaaaagaaaatccaatggtccagagaacttctacaatttattcctccacacttggagtcttcatgtctcgtaaagtttctccacattagctttacaaatggctttgtgttccttcatttttgcagtttcttctcggtacaactcaatagcctccataatcctctcagcctacagaggatgagaaaggaaagaagtcatcacaacatactccatcatcccaggacactgaaactggaagaactgaccagaaatttgccaaatgaaatagcttcaatctgtttaataaagacgtgcgaatagagtgccaaaaagca

SEQ ID NO: 1286 - DNA, 453 bp, Artificial
  cDNA Sequence
aacttgtgtcagatagcactgatgtcaataaatgaagtttagttcatttgttcatttatgctttcaaagatgccgaaacgcctgcctttatgtagcttacattccagtgggaggacagacaatacataaacaattatgataaacgaccaaaagactttccccagggaaaagaaaatccaatggtccagagaacttctacaatttattcctccacacttggagtcttcatgtctcgtaaagtttctccacattagtttcttctcggtacaactcaatagcctccataatcctctcagcctacagaggatgagaaaggaaagaagtcatcacaacatactccatcatcccaggacactgaaactggaagaactgaccagaaatttgccaaatgaaatagcttcaatctgtttaataaagacgtgcgaatagagtgccaaaaagcatttaaagaca

SEQ ID NO: 1287 - DNA, 437 bp, Artificial
  cDNA Sequence
aaagactttccccagggaaaagaaaatccaatggtccagagaacttctacaatttattcctccacacttggagtcttcatgtctcgtaaagtttctccacattaggaacccctccttcttacttcagaaaaagtattctaaaatggcaagatctgcatgagtttagagtcagtcagatctgggttgacaactgaactctgccccttaccaactatgctacaagtcaagccagattccttatctataagtttcttctcggtacaactcaatagcctccataatcctctcagcctacagaggatgagaaaggaaagaagtcatcacaacatactccatcatcccaggacactgaaactggaagaactgaccagaaatttgccaaatgaaatagcttcaatctgtttaataaagacgtgcgaatagagtgccaaaaagca

SEQ ID NO: 1288 - DNA, 2193 bp, Artificial
  cDNA Sequence
agcggaagccggtgtttcgcagcccagagcatttgcagctggtcactccagtctcctgggactttgactcgccgtactcggcgcgctcctgctgagggtcgccggagatgtcgctcggccgccttctaccaggagcctgatccgtgccgcccgccgcccggatgggaccaccagagtgctctaaagtctccagtgaatattgaattgctgaggattttgggaaaagacaaatcaaagttcccattccatggatcccttaggtgcaccttcccagtttgtggatgtggatacactaccaagctggggtgactcatgccaagatgaattaaattcctctgatactacagctgaaatatttcaggaagacactgttcgatcaccttttctttataataaggacgtcaatggaaaagtggttctttggaaaggagatgtggcattactgaactgtacagccattgtgaataccagcaatgaaagtctcacagataagaatcctgtgtcagaaagtatcttcatgcttgcagggcctgatttgaaggaagatctccagaaacttaaagggtgccgaacaggtgaagcaaaattgacaaaaggattcaatctagctgcccggttcatcattcacacagtgggacctaaatataaaagccgctatcgcacagcagctgagagttccctttatagctgctacagaaacgtacttcaactagcaaaagagcagtcaatgtcttctgttggcttctgtgtcatcaattctgcaaaacgtggttatcctttagaggatgcaacacacatagcacttcgcactgtaagaagattcctagagattcatggggaaaccattgaaaaagtagtatttgctgtctctgatcttgaagagggtacttaccaaaagctgctacctctctacttcccaaggtcattaaaagaggagaatcgatcattgccctacctacctgcagatattggaaatgcagaaggggagcctgtggtacctgaacgacagattagaataagtgagaaacctggtgctccagaagataaccaagaagaggaggatgaaggcttgggagttgatctctctttcattggctctcatgcttttgctcgaatggaaggagatattgacaagcaaagaaaactgatccttcagggacaattatcagaggcagctctgcagaagcagcatcaaagaaattataatcgctggttatgtcaagcaagatctgaggatctgtctgatattgcttctctaaaagccttataccaaacaggtgttgataactgtggtcgaacagtgatggtggtagttggaagaaacattcctgtaacattaatagatatggacaaggctctcttatatttcattcatgtaatggatcacattgctgtgaaggagtatgtattagtgtattttcacaccctgaccagcgaatacaatcacctggactccgacttcctgaagaaactctacgatgttgttgatgtcaagtacaagaggaatttgaaggctgtttattttgtacatcccacatttcgttcaaaggtgtcaacatggttttttaccaccttttctgtctcaggactgaaggacaaaatccaccatgtggacagcctccaccagctgttttctgccatatcaccagaacagattgactttcctccttttgtccttgaatatgatgccagggaaaaggatttgtcccaagagaggcattttctccagataaacgtttcagtgggagatctctctgctgaaaacgggccttactatacatcatatcccccatcaccagatttgtgacctgccatctttcagtgcttcttggttcccaggatgccacttcctccacgaatagctacctgttgaagtgatattcattgttgctgtacagatccagagagccttttgtccccacctctctggtatttttttattgactgtatattttctggcacataagcaatctaaaaatggtaggccattctgaactgcacacattttaaatttgtatatttatatgaaatggaaatgttcatttttagattgttaatagaaattggggagcaacttttgagtatctttagtttcctgaaggacaccgaattctccattagataaaccaccaagactgttcacatcatctctctaacattgcacgcttcctttgtgtacttaagtgattctcg

SEQ ID NO: 1289 - DNA, 2032 bp, Artificial
  cDNA Sequence
agcggaagccggtgtttcgcagcccagagcatttgcagctggtcactccagtctcctgggactttgactcgccgtactcggcgcgctcctgctgagggtcgccggagatgtcgctcggccgccttctaccaggagcctgatccgtgccgcccgccgcccggatgggaccaccagagtgctctaaagtctccagtgaatattgaattgctgaggattttgggaaaagacaaatcaaagttcccattccatggatcccttaggtgcaccttcccagtttgtggatgtggatacactaccaagctggggtgactcatgccaagatgaattaaattcctctgatactacagctgaaatatttcaggaagacactgttcgatcaccttttctttataataaggacgtcaatggaaaagtggttctttggaaaggagatgtggcattactgaactgtacagccattgtgaataccagcaatgaaagtctcacagataagaatcctgtgtcagaaagtatcttcatgcttgcagggcctgatttgaaggaagatctccagaaacttaaagggtgccgaacaggtgaagcaaaattgacaaaaggattcaatctagctgcccggttcatcattcacacagtgggacctaaatataaaagccgctatcgcacagcagctgagagttccctttatagctgctacagaaacgtacttcaactagcaaaagagcagtcaatgtcttctgttggcttctgtgtcatcaattctgcaaaacgtggttatcctttagaggatgcaacacacatagcacttcgcactgtaagaagattcctagagattcatggggaaaccattgaaaaagtagtatttgctgtctctgatcttgaagagggtacttaccaaaagctgctacctctctacttcccaaggtcattaaaagaggagaatcgatcattgccctacctacctgcagatattggaaatgcagaaggggagcctgtggtacctgaacgacagattagaataagtgagaaacctggtgctccagaagataaccaagaagaggaggatgaaggcttgggagttgatctctctttcattggctctcatgcttttgctcgaatggaaggagatattgacaagcaaagaaaactgatccttcagggacaattatcagaggcagctctgcagaagcagcatcaaagaaattataatcgctggttatgtcaagcaagatctgaggatctgtctgatattgcttctctaaaagccttataccaaacaggtgttgataactgtggtcgaacagtgatggtggtagttggaagaaacattcctgtaacattaatagatatggacaaggctctcttatatttcattcatgtaatggatcacattgctgtgaaggagtatgtattagtgtattttcacaccctgaccagcgaatacaatcacctggactccgacttcctgaagaaactctacgatgttgttgatgtcaagtacaagaggaatttgaaggctgtttattttgtacatcccacatttcgttcaaaggtgtcaacatggttttttaccaccttttctgtctcaggactgaaggacaaaatccaccatgtggacagcctccaccagctgttttctgccatatcaccagaacagattgactttcctccttttgtccttgaatatgatgccagggaaaacgggccttactatacatcatatcccccatcaccagatttgtgacctgccatctttcagtgcttcttggttcccaggatgccacttcctccacgaatagctacctgttgaagtgatattcattgttgctgtacagatccagagagccttttgtccccacctctctggtatttttttattgactgtatattttctggcacataagcaatctaaaaatggtaggccattctgaactgcacacattttaaatttgtatatttatatgaaatggaaatgttcatttttagattgttaatagaaattggggagcaacttttgagtatctttagtttcctg

SEQ ID NO: 1290 - DNA, 595 bp, Artificial
  cDNA Sequence
gtagaggcagaaggagaaggtcggattgtagaagctggggtggccggcagctcgctcatcggtgttcgtgggctttgtcggtccgtgcctcgtctctccctggaaagggagggaggcttcaacgtcgagagggagccgctgccgcgttagttccgagcttgaagtcactaggacttctctcaaacttgagtgctgaggagactcagatgttggcctcagctcctaggctgaactcagcagatcggcccatgaaaacttctgtattgagacaaaggaagggatctgtcagaaagcaacacttgttatcttgggcttggcagcaaggaagaggacaggtagtggagatcctgcaatctgaaaagcagactgaaaggtgacaaagaagctgaagatggaacaaaaattttccaaataatcaaagttggaattctagcttatcaggtcccagcttactttttaaatctcaagctaaacagaactatgctggtgccaaatttagtgagccgccatcaccaagtgttcttcccaaaccaccaagccactgggtccctgtttcctttaatccttcagataaggaaataatgacatttcaact

SEQ ID NO: 1291 - DNA, 382 bp, Artificial
  cDNA Sequence
gctattcctgccgcataactctctcttccccaggcttttcccatctccatcctattctctcgcaggcaggtgctgggggaaaagattacttcccagatgcagtatttacatctcctccgccctactcttccaaccctgcctgaaataagtgtggttctcctgtctgtcagactatgaagagttctcaaatatgtctttcccagcgagggagaggagaaaacttcagcctccacgatcgatgtttctcaagtgtcaaggaaaatggagcctaggagggcagccccacaagcagcgtgatgggcatttaagccgacgcatgtgccaggtcctagaacagagtaacttccccatctcaacacaataaaatggtgatatgagaata

SEQ ID NO: 1292 - DNA, 509 bp, Artificial
  cDNA Sequence
gaaccatttacccttcacgtgcctctttttccgtgtatgtgcctctttctccttgtatgtaaaatgagtgaaagaaagaggagagctagatgataccattgtaactcttgtatttcaagacactcgtttctgccttgtctcagattacaatcatttagagatacagaaataggtattacagtcagaatccacgttttagagtatatctgctgaccccatgtctgtggaagatactgagatgcaggtactgagaatgggcctcaaaatttttctgaagactgtgctccaggaagctatgctcaaccaaatgaaattggccctacttgtcatcctagcatagcaggtttcggtttatgaaagacagagaatatgcagctctctcagacacctaaatatgaagtggctttccacagatctcttttcgaaggtcgcaatgatttgtatgacagctgctagcccaagagagagttccagaagagggctacctaacaggtgctgtggcatttaga

SEQ ID NO: 1293 - DNA, 425 bp, Artificial
  cDNA Sequence
ggtcttatatcttgaaactgtaagtccctgaattcacagacaattcagagtaaggatggaggcaaagaagaggaccttgggtttactgttcacgagatgacctcataaaggtgttcagtgatgaagaggagtggctgaagagatggctgtctagagtcaacacaaacctaccccaaagtttgacctttgccttaagtcagtaactgaggagggccacggtcctgagttcagtccagaccccaggaagattcagagcctgcagttgtcctctggtttctaaagtatgttattgggctaaagatttcaagacatttatccttctttgctttctatcgcagccattaaatgttttagatattttctgccagaaggcaggaatcatgaagataacaaatattaaagacaaaaccaaataacttttaatg

SEQ ID NO: 1294 - DNA, 391 bp, Artificial
  cDNA Sequence
ggcaaagaagaggaccttgggtttactgttcacgagatgacctcataaaggtgttcagtgatgaagaggagtggctgaagagagcttcagcaagcaaccactaggataatgttaaagatcttcagtggtaagaagacaaggagcaaagatttttatcttactttgtgattttcataattaaaaaagaaagaaaggaaagagacgaggtcttgccacattgctcaggctggtcttgaactcctggactcaagcaattcttccactgtagcctcctgaggtggcaggattacagcataagccaccatgcctggcctcagtcacactttggaaaagaagactatggatctacatgttcattttgtggtcgaattataaccaacacgccactcta

SEQ ID NO: 1295 - DNA, 691 bp, Artificial
  cDNA Sequence
ttctttagcctgaactgtgggtagtgatgtggtgtgtttcctaacacctccggcagtgagccaggctttgagtggctgcgtctaaacacttctttccctgaggactggaagacattagaataaggtccagaaatgtccttggtgtgtttgacagactttcaggcccatgcgcgagagcagctgtctaagtcaactcgggattttattgaaggtggagcagatgacagcatcacgcgggatgacaacattgcagcatttaaaagaattcgcctccgtccgcggtacctgagagatgtgtctgaggtggacaccagaaccacaatccaaggggaggagatcagtgcccctatttgtatcgcacccacagggttccactgccttgtctggcctgatggggaaatgagcacagcaagagctcccgaaggcctccgatggttccaactctatgtgcatccagacctgcagctgaacaaacagttgatccagagggtagaatccctaggtttcaaagctttggtaataactttggatacacctgtatgtggcaacaggcgacatgacattcgaaaccagttgaggaggaacttaacactaacagatcttcaatcacctaaaaagggaaatgcaataccttatttccagatgactcctatcagcacttctctctgctggaatgatctctcctggtttc

SEQ ID NO: 1296 - DNA, 1069 bp, Artificial
  cDNA Sequence
aagaaatgaagctggtgaggcagtgaaaatccagggcctagaaagctgggaatgccatgacgtgggcacattgaaagacaagaggcaggcatgatcagccttgaactttaggaagatcccaggaagctgatggaagacaagatgtggagtgaatgtccagaaatgtccttggtgtgtttgacagactttcaggcccatgcgcgagagcagctgtctaagtcaactcgggattttattgaaggtggagcagatgacagcatcacgcgggatgacaacattgcagcatttaaaagaattcgcctccgtccgcggtacctgagagatgtgtctgaggtggacaccagaaccacaatccaaggggaggagatcagtgcccctatttgtatcgcacccacagggttccactgccttgtctggcctgatggggaaatgagcacagcaagagctgcccaagcggctggtatctgctacatcaccagcacatttgccagctgtagccttgaagacattgtcattgcagctcccgaaggcctccgatggttccaactctatgtgcatccagacctgcagctgaacaaacagttgatccagagggtagaatccctaggtttcaaagctttggtaataactttggatacacctgtatgtggcaacaggcgacatgacattcgaaaccagttgaggaggaacttaacactaacagatcttcaatcacctaaaaagggaaatgcaataccttatttccagatgactcctatcagcacttctctctgctggaatgatctctcctggtttcagagcataactcgattgcccatcatcctgaaagggattttgacaaaagaggatgcagagttagctgtgaagcacaatgtccagggtatcattgtttccaaccatggtgggaggcagcttgatgaggttcttgcttcaattgatgctttgacagaagtggtggctgctgtaaaggggaaaattgaagtctacctggatggcggggtccgaactggcaatgatgtgctgaaggctctggcccttggagctaagtgcatttttcttgggagaccaa

SEQ ID NO: 1297 - DNA, 1039 bp, Artificial
  cDNA Sequence
ttctttagcctgaactgtgggtagtgatgtggtgtgtttcctaacacctccggcagtgagccaggctttgagtggctgcgtctaaacacttctttccctgaggactggaagacattagaataaggtccagaaatgtccttggtgtgtttgacagactttcaggcccatgcgcgagagcagctgtctaagtcaactcgggattttattgaaggtggagcagatgacagcatcacgcgggatgacaacattgcagcatttaaaagaattcgcctccgtccgcggtacctgagagatgtgtctgaggtggacaccagaaccacaatccaaggggaggagatcagtgcccctatttgtatcgcacccacagggttccactgccttgtctggcctgatggggaaatgagcacagcaagagctgcccaagcggctggtatctgctacatcaccagcacatttgccagctgtagccttgaagacattgtcattgcagctcccgaaggcctccgatggttccaactctatgtgcatccagacctgcagctgaacaaacagttgatccagagggtagaatccctaggtttcaaagctttggtaataactttggatacacctgtatgtggcaacaggcgacatgacattcgaaaccagttgaggaggaacttaacactaacagatcttcaatcacctaaaaagggaaatgcaataccttatttccagatgactcctatcagcacttctctctgctggaatgatctctcctggtttcagagcataactcgattgcccatcatcctgaaagggattttgacaaaagaggatgcagagttagctgtgaagcacaatgtccagggtatcattgtttccaaccatggtgggaggcagcttgatgaggttcttgcttcaattgatgctttgacagaagtggtggctgctgtaaaggggaaaattgaagtctacctggatggcggggtccgaactggcaatgatgtgctgaaggctctggcccttggagctaagtgcatttttcttgggagaccaa

SEQ ID NO: 1298 - DNA, 1416 bp, Artificial
  cDNA Sequence
gaggcagtaaggacttggactcctctgtccagcttttaacaatctaagttacgccctcttctgggtcacgctagaatcagatctgctctccagcatcttctgtttcctggcaagtgtttcctgctactttggattggccacgatgggctggagctgccttgtgacaggagcaggagggcttctgggtcagaggatcgtccgcctgttggtggaagagaaggaactgaaggagatcagggccttggacaaggccttcagaccagaattgagagaggaattttctaagctccagaacaggaccaagctgactgtacttgaaggagacattctggatgagccattcctgaaaagagcctgccaggacgtctcggtcgtcatccacaccgcctgtatcattgatgtctttggtgtcactcacagagagtccatcatgaatgtcaatgtgaaaggtacccagctactgttggaggcctgtgtccaagccagtgtgccagtcttcatctacaccagtagcatagaggtagccgggcccaactcctacaaggaaatcatccagaacggccacgaagaagagcctctggaaaacacatggcccactccatacccgtacagcaaaaagcttgctgagaaggctgtgctggcggctaatgggtggaatctaaaaaatggtgataccttgtacacttgtgcgttaagacccacatatatctatggggaaggaggcccattcctttctgccagtataaatgaggccctgaacaacaatgggatcctgtcaagtgttggaaagttctctacagtcaacccagtctatgttggcaacgtggcctgggcccacattctggccttgagggctctgcgggaccccaagaaggccccaagtgtccgaggtcaattctattacatctcagatgacacgcctcaccaaagctatgataaccttaattacatcctgagcaaagagtttggcctccgccttgattccagatggagccttcctttaaccctgatgtactggattggcttcctgctggaagtagtgagcttcctactcagcccaatttactcctatcaaccccccttcaaccgccacacagtcacattatcaaatagtgtgttcaccttctcttacaagaaggctcagcgagatctggcgtataagccactctacagctgggaggaagccaagcagaaaaccgtggagtgggttggttcccttgtggaccggcacaaggagaccctgaagtccaagactcagtgatttaaggatgacagagatgtgcatgtgggtattgttaggaaatgtcatcaaactccacccacctggcttcatacagaaggcaacaggggcacaagcccaggtcctgctgcctctctttcacacaatgcccaacttactgtcttcttcatgtcatc

SEQ ID NO: 1299 - DNA, 863 bp, Artificial
  cDNA Sequence
gaggcagtaaggacttggactcctctgtccagcttttaacaatctaagttacgccctcttctgggtcacgctagaatcagatctgctctccagcatcttctgtttcctggcaagtgtttcctgctactttggattggccacgatgggctggagctgccttgtgacaggagcaggagggcttctgggtcagaggatcgtccgcctgttggtggaagagaaggaactgaaggagatcagggccttggacaaggccttcagaccagaattgagagaggaattttctaagctccagaacaggaccaagctgactgtacttgaaggagacattctggatgagccattcctgaaaagagcctgccaggacgtctcggtcgtcatccacaccgcctgtatcattgatgtctttggtgtcactcacagagagtccatcatgaatgtcaatgtgaaaggtacccagctactgttggaggcctgtgtccaagccagtgtgccagtcttcatctacaccagtagcatagaggtagccgggcccaactcctacaaggaaatcatccagaacggccacgaagaagagcctctggaaaacacatggcccactccatacccgtacagcaaaaagcttgctgagaaggctgtgctggcggctaatgggtggaatctaaaaaatggaggcccattcctttctgccagtataaatgaggccctgaacaacaatgggatcctgtcaagtgttggaaagttctctacagtcaacccagtctatgttggcaacgtggcctgggcccacattctggccttgagggctctgcgggaccccaagaaggccccaagtgtccgaggtcaattctattacatctcagatg

SEQ ID NO: 1300 - DNA, 590 bp, Artificial
  cDNA Sequence
cttggactcctctgtccagcttttaacaatctaagttacgccctcttctgggtcacgctagaatcagatctgctctccagcatcttctgtttcctggcaagtgtttcctgctactttggattggccacgatgggctggagctgccttgtgacaggagcaggagggcttctgggtcagaggatcgtccgcctgttggtggaagagaaggaactgaaggagatcagggccttggacaaggccttcagaccagaattgagagaggaattttctaatccatggaaactcaccggggaagagtcattttctatcggctttggacttctgctatgaaatggcaattcctttgagccagtctgtctaaagtcggcagcaaaggagaagcagatgaagggagtagaaaagagctccagaacaggaccaagctgactgtacttgaaggagacattctggatgagccattcctgaaaagagcctgccaggacgtctcggtcgtcatccacaccgcctgtatcattgatgtctttggtgtcactcacagagagtccatcatgaatgtcaatgtgaaaggtacagtagcctggggaggagat

SEQ ID NO: 1301 - DNA, 1640 bp, Artificial
  cDNA Sequence
cagcttttaacaatctaactaatgccctctccagggtcaccctagaatcagatctgctccccagcatcttctgtttcctggtgagtgattcctgctactttggatggccatgacgggctggagctgccttgtgacaggagcaggagggtttctgggacagaggatcatccgcctcttggtgaaggagaaggagctgaaggagatcagggtcttggacaaggccttcggaccagaattgagagaggaattttctaaactccagaacaagaccaagctgacagtgctggaaggagacattctggatgagccattcctgaagagagcctgccaggacgtctcggtcatcatccacaccgcctgtatcattgatgtcttcggtgtcactcacagagagtctatcatgaatgtcaatgtgaaaggtacccagctcctgttagaggcctgtgtccaagctagtgtgccagtcttcatctacaccagtagcatagaggtagccgggcccaactcctacaaggaaatcatccagaatggccatgaagaagagcctctggaaaacacatggcccgctccatacccacacagcaaaaagcttgctgagaaggctgtactggcggctaacgggtggaatctgaaaaacggcggcaccctgtacacttgtgccttacgacccatgtatatctatggggaaggaagccgattcctttctgctagtataaacgaggccctgaacaacaatgggatcctgtcaagtgttggaaagttctccactgttaacccagtctatgttggcaatgtggcctgggcccacattctggccttgagggccctgcaggaccccaagaaggccccaagcatccgaggacagttctactatatctcagatgacacgcctcaccaaagctatgataaccttaattacaccctgagcaaagagttcggcctccgccttgattccagatggagctttcctttatccctgatgtattggattggcttcctgctggaaatagtgagcttcctactcaggccaatttacacctatcgaccgcccttcaaccgccacatagtcacattgtcaaatagcgtattcaccttctcttataagaaggctcagcgagatctggcgtataagccactctacagctgggaggaagccaagcagaaaacggtggagtgggttggttcccttgtggaccggcacaaggagaccctgaagtccaagactcagtgatttaaggatgacagagatgtgcatgtgggtattgttaggagatgtcatcaagctccaccctcctggcctcatacagaaagtgacaagggcacaagctcaggtcctgctgcctccctttcatacaatggccaacttattgtattcctcatgtcatcaaaacctgcgcagtcattggcccaacaagaaggtttctgtcctaatcatataccagaggaaagaccatgtggtttgctgttaccaaatctcagtagctgattctgaacaatttagggactcttttaacttgagggtcgttttgactactagagctccatttctactcttaaatgagaaaggatttcctttctttttaatcttccattccttcacatagtttgataaaaagatcaataaatgtttgaatgtttaa

SEQ ID NO: 1302 - DNA, 1002 bp, Artificial
  cDNA Sequence
agcttttaacaatctaactaatgccctctccagggtcaccctagaatcagatctgctccccagcatcttctgtttcctggtgagtgattcctgctactttggatggccatgacgggctggagctgccttgtgacaggagcaggagggtttctgggacagaggatcatccgcctcttggtgaaggagaaggagctgaaggagatcagggtcttggacaaggccttcggaccagaattgagagaggaattttctagtaagtaaacttgggtcatgggtgtgtggttccatcttaaacactgcatgtatgtggggggagatggaccttgtctagcaagttattgaaatttgtagccaaatctaagccaatctcacatccaaagtcatcaagaaataaatattaaatagtataaaatggcatagtatgaaagatactgggtgggatttccagagactagattctggccctgacccagaacttgagaagcagccacctcagcctccaggcctcttttcttctcatctagaaaatcccacatcagttctttgtcttgtctgcaactcttttatgttctgaagcttttgtcttggcaattgctgtacaacattcataaaggacactattaccctggagacctcaccaatgggtcattgtctctctagaacgtgccaggctgtgttttgttttgcagcttccttagtatcctttgtgagggcaaaataaaaggaagttaaggtaaagatgagtgtataagtgggtgtgtgtgacagagagagaggaaaacaataagggggagagagagtcggggagagagagtcggggagagagactcagagagagagacaatgagaaagacagagaaataatgaaaaatatatagtgagagagagagcatcagtgagagaatgtgtgtgcacagtgcacagcacagagcagagacagagtaagaggcagtataaggccagacatgcctcatttagattttgcatatatggctttttttt

SEQ ID NO: 1303 - DNA, 1690 bp, Artificial
  cDNA Sequence
gtttgcaaaaaaaatggggtggaggaaaatgaggcatctgtgtgagtatataaccatttgacatctctttttagccctctccagggtcaccctagaatcagatctgctccccagcatcttctgtttcctggtgagtgattcctgctactttggatggccatgacgggctggagctgccttgtgacaggagcaggagggtttctgggacagaggatcatccgcctcttggtgaaggagaaggagctgaaggagatcagggtcttggacaaggccttcggaccagaattgagagaggaattttctaaactccagaacaagaccaagctgacagtgctggaaggagacattctggatgagccattcctgaagagagcctgccaggacgtctcggtcatcatccacaccgcctgtatcattgatgtcttcggtgtcactcacagagagtctatcatgaatgtcaatgtgaaaggtacccagctcctgttagaggcctgtgtccaagctagtgtgccagtcttcatctacaccagtagcatagaggtagccgggcccaactcctacaaggaaatcatccagaatggccatgaagaagagcctctggaaaacacatggcccgctccatacccacacagcaaaaagcttgctgagaaggctgtactggcggctaacgggtggaatctgaaaaacggcggcaccctgtacacttgtgccttacgacccatgtatatctatggggaaggaagccgattcctttctgctagtataaacgaggccctgaacaacaatgggatcctgtcaagtgttggaaagttctccactgttaacccagtctatgttggcaatgtggcctgggcccacattctggccttgagggccctgcaggaccccaagaaggccccaagcatccgaggacagttctactatatctcagatgacacgcctcaccaaagctatgataaccttaattacaccctgagcaaagagttcggcctccgccttgattccagatggagctttcctttatccctgatgtattggattggcttcctgctggaaatagtgagcttcctactcaggccaatttacacctatcgaccgcccttcaaccgccacatagtcacattgtcaaatagcgtattcaccttctcttataagaaggctcagcgagatctggcgtataagccactctacagctgggaggaagccaagcagaaaacggtggagtgggttggttcccttgtggaccggcacaaggagaccctgaagtccaagactcagtgatttaaggatgacagagatgtgcatgtgggtattgttaggagatgtcatcaagctccaccctcctggcctcatacagaaagtgacaagggcacaagctcaggtcctgctgcctccctttcatacaatggccaacttattgtattcctcatgtcatcaaaacctgcgcagtcattggcccaacaagaaggtttctgtcctaatcatataccagaggaaagaccatgtggtttgctgttaccaaatctcagtagctgattctgaacaatttagggactcttttaacttgagggtcgttttgactactagagctccatttctactcttaaatgagaaaggatttcctttctttttaatcttccattccttcacatagtttgataaaaagatcaataaatgtttgaatgtttaa

SEQ ID NO: 1304 - DNA, 1911 bp, Artificial
  cDNA Sequence
ggaggaggagatgactggggagcgggagctggagaatactgcccagttactctagcgcgccaggccgaaccgcagcttcttggcttaggtacttctactcacagcggccgattccgaggccaactccagcaatggcttttgcaaatctgcggaaagtgctcatcagtgacagcctggacccttgctgccggaagatcttgcaagatggagggctgcaggtggtggaaaagcagaaccttagcaaagaggagctgatagcggagctgcaggactgtgaaggccttattgttcgctctgccaccaaggtgaccgctgatgtcatcaacgcagctgagaaactccaggtggtgggcagggctggcacaggtgtggacaatgtggatctggaggccgcaacaaggaagggcatcttggttatgaacacccccaatgggaacagcctcagtgccgcagaactcacttgtggaatgatcatgtgcctggccaggcagattccccaggcgacggcttcgatgaaggacggcaaatgggagcggaagaagttcatgggaacagagctgaatggaaagaccctgggaattcttggcctgggcaggattgggagagaggtagctacccggatgcagtcctttgggatgaagactatagggtatgaccccatcatttccccagaggtctcggcctcctttggtgttcagcagctgcccctggaggagatctggcctctctgtgatttcatcactgtgcacactcctctcctgccctccacgacaggcttgctgaatgacaacacctttgcccagtgcaagaagggggtgcgtgtggtgaactgtgcccgtggagggatcgtggacgaaggcgccctgctccgggccctgcagtctggccagtgtgccggggctgcactggacgtgtttacggaagagccgccacgggaccgggccttggtggaccatgagaatgtcatcagctgtccccacctgggtgccagcaccaaggaggctcagagccgctgtggggaggaaattgctgttcagttcgtggacatggtgaaggggaaatctctcacgggggttgtgaatgcccaggcccttaccagtgccttctctccacacaccaagccttggattggtctggcagaagctctggggacactgatgcgagcctgggctgggtcccccaaagggaccatccaggtgataacacagggaacatccctgaagaatgctgggaactgcctaagccccgcagtcattgtcggcctcctgaaagaggcttccaagcaggcggatgtgaacttggtgaacgctaagctgctggtgaaagaggctggcctcaatgtcaccacctcccacagccctgctgcaccaggggagcaaggcttcggggaatgcctcctggccgtggccctggcaggcgccccttaccaggctgtgggcttggtccaaggcactacgcctgtactgcaggggctcaatggagctgtcttcaggccagaagtgcctctccgcagggacctgcccctgctcctattccggactcagacctctgaccctgcaatgctgcctaccatgattggcctcctggcagaggcaggcgtgcggctgctgtcctaccagacttcactggtgtcagatggggagacctggcacgtcatgggcatctcctccttgctgcccagcctggaagcgtggaagcagcatgtgactgaagccttccagttccacttctaaccttggagctcactggtccctgcctctggggcttttctgaagaaacccacccactgtgatcaatagggagagaaaatccacattcttgggctgaacgcgggcctctgacactgcttacactgcactctgaccctgtagtacagcaataaccgtctaataaagagcctacccccaactc

SEQ ID NO: 1305 - DNA, 1890 bp, Artificial
  cDNA Sequence
ggaggaggagatgactggggagcgggagctggagaatactgcccagttactctagcgcgccaggccgaaccgcagcttcttggcttaggtacttctactcacagcggccgattccgaggccaactccagcaatggcttttgcaaatctgcggaaagtgctcatcagtgacagcctggacccttgctgccggaagatcttgcaagatggagggctgcaggtggtggaaaagcagaaccttagcaaagaggagctgatagcggagctgcaggactgtgaaggccttattgttcgctctgccaccaaggtgaccgctgatgtcatcaacgcagctgagaaactccaggtggtgggcagggctggcacaggtgtggacaatgtggatctggaggccgcaacaaggaagggcatcttggttatgaacacccccaatgggaacagcctcagtgccgcagaactcacttgtggaatgatcatgtgcctggccaggcagattccccaggcgacggcttcgatgaaggacggcaaatgggagcggaagaagttcatgggaacagagctgaatggaaagaccctgggaattcttggcctgggcaggattgggagagaggtagctacccggatgcagtcctttgggatgaagactatagggtatgaccccatcatttccccagaggtctcggcctcctttggtgttcagcagctgcccctggaggagatctggcctctctgtgatttcatcactgtgcacactcctctcctgccctccacgacaggcttgctgaatgacaacacctttgcccagtgcaagaagggggtgcgtgtggtgaactgtgcccgtggagggatcgtggacgaaggcgccctgctccgggccctgcagtctggccagtgtgccggggctgcactggacgtgtttacggaagagccgccacgggaccgggccttggtggaccatgagaatgtcatcagctgtccccacctgggtgccagcaccaaggaggctcagagccgctgtggggaggaaattgctgttcagttcgtggacatggtgaaggggaaatctctcacgggggttgtgaatgcccaggcccttaccagtgccttctctccacacaccaagccttggattggtctggcagaagctctggggacactgatgcgagcctgggctgggtcccccaaagggaccatccaggtgataacacagggaacatccctgaagaatgctgggaactgcctaagccccgcagtcattgtcggcctcctgaaagaggcttccaagcaggcggatgtgaacttggtgaacgctaagctgctggtcaccacctcccacagccctgctgcaccaggggagcaaggcttcggggaatgcctcctggccgtggccctggcaggcgccccttaccaggctgtgggcttggtccaaggcactacgcctgtactgcaggggctcaatggagctgtcttcaggccagaagtgcctctccgcagggacctgcccctgctcctattccggactcagacctctgaccctgcaatgctgcctaccatgattggcctcctggcagaggcaggcgtgcggctgctgtcctaccagacttcactggtgtcagatggggagacctggcacgtcatgggcatctcctccttgctgcccagcctggaagcgtggaagcagcatgtgactgaagccttccagttccacttctaaccttggagctcactggtccctgcctctggggcttttctgaagaaacccacccactgtgatcaatagggagagaaaatccacattcttgggctgaacgcgggcctctgacactgcttacactgcactctgaccctgtagtacagcaataaccgtctaataaagagcctacccccaactc

SEQ ID NO: 1306 - DNA, 1432 bp, Artificial
  cDNA Sequence
ccttgcaggcagattccccaggcgacggcttcgatgaaggacggcaaatgggagcggaagaagttcatgggaacagagctgaatggaaagaccctgggaattcttggcctgggcaggattgggagagaggtagctacccggatgcagtcctttgggatgaagactatagggtatgaccccatcatttccccagaggtctcggcctcctttggtgttcagcagctgcccctggaggagatctggcctctctgtgatttcatcactgtgcacactcctctcctgccctccacgacaggcttgctgaatgacaacacctttgcccagtgcaagaagggggtgcgtgtggtgaactgtgcccgtggagggatcgtggacgaaggcgccctgctccgggccctgcagtctggccagtgtgccggggctgcactggacgtgtttacggaagagccgccacgggaccgggccttggtggaccatgagaatgtcatcagctgtccccacctgggtgccagcaccaaggaggctcagagccgctgtggggaggaaattgctgttcagttcgtggacatggtgaaggggaaatctctcacgggggttgtgaatgcccaggcccttaccagtgccttctctccacacaccaagccttggattggtctggcagaagctctggggacactgatgcgagcctgggctgggtcccccaaagggaccatccaggtgataacacagggaacatccctgaagaatgctgggaactgcctaagccccgcagtcattgtcggcctcctgaaagaggcttccaagcaggcggatgtgaacttggtgaacgctaagctgctggtgaaagaggctggcctcaatgtcaccacctcccacagccctgctgcaccaggggagcaaggcttcggggaatgcctcctggccgtggccctggcaggcgccccttaccaggctgtgggcttggtccaaggcactacgcctgtactgcaggggctcaatggagctgtcttcaggccagaagtgcctctccgcagggacctgcccctgctcctattccggactcagacctctgaccctgcaatgctgcctaccatgattggcctcctggcagaggcaggcgtgcggctgctgtcctaccagacttcactggtgtcagatggggagacctggcacgtcatgggcatctcctccttgctgcccagcctggaagcgtggaagcagcatgtgactgaagccttccagttccacttctaaccttggagctcactggtccctgcctctggggcttttctgaagaaacccacccactgtgatcaatagggagagaaaatccacattcttgggctgaacgcgggcctctgacactgcttacactgcactctgaccctgtagtacagcaataaccgtctaataaagagcctacccccaactc

SEQ ID NO: 1307 - DNA, 1411 bp, Artificial
  cDNA Sequence
ccttgcaggcagattccccaggcgacggcttcgatgaaggacggcaaatgggagcggaagaagttcatgggaacagagctgaatggaaagaccctgggaattcttggcctgggcaggattgggagagaggtagctacccggatgcagtcctttgggatgaagactatagggtatgaccccatcatttccccagaggtctcggcctcctttggtgttcagcagctgcccctggaggagatctggcctctctgtgatttcatcactgtgcacactcctctcctgccctccacgacaggcttgctgaatgacaacacctttgcccagtgcaagaagggggtgcgtgtggtgaactgtgcccgtggagggatcgtggacgaaggcgccctgctccgggccctgcagtctggccagtgtgccggggctgcactggacgtgtttacggaagagccgccacgggaccgggccttggtggaccatgagaatgtcatcagctgtccccacctgggtgccagcaccaaggaggctcagagccgctgtggggaggaaattgctgttcagttcgtggacatggtgaaggggaaatctctcacgggggttgtgaatgcccaggcccttaccagtgccttctctccacacaccaagccttggattggtctggcagaagctctggggacactgatgcgagcctgggctgggtcccccaaagggaccatccaggtgataacacagggaacatccctgaagaatgctgggaactgcctaagccccgcagtcattgtcggcctcctgaaagaggcttccaagcaggcggatgtgaacttggtgaacgctaagctgctggtcaccacctcccacagccctgctgcaccaggggagcaaggcttcggggaatgcctcctggccgtggccctggcaggcgccccttaccaggctgtgggcttggtccaaggcactacgcctgtactgcaggggctcaatggagctgtcttcaggccagaagtgcctctccgcagggacctgcccctgctcctattccggactcagacctctgaccctgcaatgctgcctaccatgattggcctcctggcagaggcaggcgtgcggctgctgtcctaccagacttcactggtgtcagatggggagacctggcacgtcatgggcatctcctccttgctgcccagcctggaagcgtggaagcagcatgtgactgaagccttccagttccacttctaaccttggagctcactggtccctgcctctggggcttttctgaagaaacccacccactgtgatcaatagggagagaaaatccacattcttgggctgaacgcgggcctctgacactgcttacactgcactctgaccctgtagtacagcaataaccgtctaataaagagcctacccccaactc

SEQ ID NO: 1308 - DNA, 312 bp, Artificial
  cDNA Sequence
cctgggcaggattgggagagaggtagctacccggatgcagtcctttgggatgaaggcttccttctccgtggcaccactacacatcaatattcctggcaatattcttcatcatggagacttcggcagcgacttcaaccagatgaaaagccccacctcattcctgaatgattgaggtgctagaacatgctctttgtaaacccctgaaacatggcttggatcattccgtctcccacctcagcccctccggagctgcctggacctcatcattccggagagtctaagtggcctcttctcgtgctcagctgcttacct

SEQ ID NO: 1309 - DNA, 992 bp, Artificial
  cDNA Sequence
gcaggagccgccacgggaccgggccttggtggaccatgagaatgtcatcagctgtccccacctgggtgccagcaccaaggaggctcagagccgctgtggggaggaaattgctgttcagttcgtggacatggtgaaggggaaatctctcacgggggttgtgaatgcccaggcccttaccagtgccttctctccacacaccaagccttggattggtctggcagaagctctggggacactgatgcgagcctgggctgggtcccccaaagggaccatccaggtgataacacagggaacatccctgaagaatgctgggaactgcctaagccccgcagtcattgtcggcctcctgaaagaggcttccaagcaggcggatgtgaacttggtgaacgctaagctgctggtgaaagaggctggcctcaatgtcaccacctcccacagccctgctgcaccaggggagcaaggcttcggggaatgcctcctggccgtggccctggcaggcgccccttaccaggctgtgggcttggtccaaggcactacgcctgtactgcaggggctcaatggagctgtcttcaggccagaagtgcctctccgcagggacctgcccctgctcctattccggactcagacctctgaccctgcaatgctgcctaccatgattggcctcctggcagaggcaggcgtgcggctgctgtcctaccagacttcactggtgtcagatggggagacctggcacgtcatgggcatctcctccttgctgcccagcctggaagcgtggaagcagcatgtgactgaagccttccagttccacttctaaccttggagctcactggtccctgcctctggggcttttctgaagaaacccacccactgtgatcaatagggagagaaaatccacattcttgggctgaacgcgggcctctgacactgcttacactgcactctgaccctgtagtacagcaataaccgtctaataaagagcctacccccaactc

SEQ ID NO: 1310 - DNA, 394 bp, Artificial
  cDNA Sequence
acttgtcaatgatggtctcagtgcctacttccagcctgcccacagagtcccatgggagctgtatgcgctccatcagccgttgcaccaccgtcaggcacagggagttgatgtcctcttggactgagcagaagcccatacgggtctggcccaagcccactgtatactttcctgcttccacattgttatacttctccaggtcagtttggtccacatattgggctgggaaggggacagcagaggctgtagaaaaccttgactcacctttggtgggctactgggagcaggcgagcaggtgtgagggaggtttcctgcaccgctcttgtcagttgcagaatgcgcttcactggagtcaacagacgctgcatctccagaggagcaagcagaaacccagcag

SEQ ID NO: 1311 - DNA, 454 bp, Artificial
  cDNA Sequence
cagatttgcagatcaaggagaacccaggagtttcaaagaagcgctagtaaggtctctgagatccttgcactagctacatcctcagggtaggaggaagatggcttccagaagcatgcggctgctcctattgctgagctgcctggccaaaacaggagtcctgggtgatatcatcatgagacccagctgtgctcctggatggttttaccacaagtccaattgctatggttacttcaggaagctgaggaactggtctgatgccgagctcgagtgtcagtcttacggaaacggagcccacctggcatctatcctgagtttaaaggaagccagcaccatagcagagtacataagtggctatcagagaagccagccgatatggattggcctgcacgacccacagaagaggcagcagtggcagtggattgatggggccatgtatctgtacagatcctggtct

SEQ ID NO: 1312 - DNA, 440 bp, Artificial
  cDNA Sequence
gatatcatcatgagacccagctgtgctcctggatggttttaccacaagtccaattgctatggttacttcaggaagctgaggaactggtctgatgccgagctcgagtgtcagtcttacggaaacggagcccacctggcatctatcctgagtttaaaggaagccagcaccatagcagagtacataagtggctatcagagaagccagccgatatggattggcctgcacgacccacagaagaggcagcagtggcagtggattgatggggccatgtatctgtacagatcctggtctggcaagtccatgggtgggaacaagcactgtgctgagatgagctccaataacaactttttaacttggagcagcaacgaatgcaacaagcgccaacacttcctgtgcaagtaccgaccatagagcaagaatcaagattctgctaactcctg

SEQ ID NO: 1313 - DNA, 825 bp, Artificial
  cDNA Sequence
cactggagacactgaagaaggcaggggcccttagagtcttggttgccaaacagatttgcagatcaaggagaacccaggagtttcaaagaagcgctagtaaggtctctgagatccttgcactagctacatcctcagggtaggaggaagatggcttccagaagcatgcggctgctcctattgctgagctgcctggccaaaacaggagtcctgggtgatatcatcatgagacccagctgtgctcctggatggttttaccacaagtccaattgctatggttacttcaggaagctgaggaactggtctgatgccgagctcgagtgtcagtcttacggaaacggagcccacctggcatctatcctgagtttaaaggaagccagcaccatagcagagtacataagtggctatcagagaagccagccgatatggattggcctgcacgacccacagaagaggcagcagtggcagtggattgatggggccatgtatctgtacagatcctggtctggcaagtccatgggtgggaacaagcactgtgctgagatgagctccaataacaactttttaacttggagcagcaacgaatgcaacaagcgccaacacttcctgtgcaagtaccgaccatagagcaagaatcaagattctgctaactcctgcacagccccgtcctcttcctttctgctagcctggctaaatctgctcattatttcagaggggaaacctagcaaactaagagtgataagggccctactacactggcttttttaggcttagagacagaaactttagcattggcccagtagtggcttctagctctaaatgtttgcc

SEQ ID NO: 1314 - DNA, 1877 bp, Artificial
  cDNA Sequence
ctgggtttctgaactgctgggtttctgcttgctcctctggagatgcagcgtctgttgactccagtgaagcgcattctgcaactgacaagagcggtgcaggaaacctccctcacacctgctcgcctgctcccagtagcccaccaaaggttttctacagcctctgctgtccccctggccaaaacagatacttggccaaaggacgtgggcatcctggccctggaggtctacttcccagcccaatatgtggaccaaactgacctggagaagtataacaatgtggaagcaggaaagtatacagtgggcttgggccagacccgtatgggcttctgctcagtccaagaggacatcaactccctgtgcctgacggtggtgcaacggctgatggagcgcatacagctcccatgggactctgtgggcaggctggaagtaggcactgagaccatcattgacaagtccaaagctgtcaaaacagtgctcatggaactcttccaggattcaggcaatactgatattgagggcatagataccaccaatgcctgctacggtggtactgcctccctcttcaatgctgccaactggatggagtccagttcctgggatggtcgttatgccatggtggtctgtggagacattgccgtctatcccagtggtaatgctcgtcccacaggtggggccggagctgtggctatgctgattgggcccaaggcccctctggccctggagcgagggctgaggggaacccatatggagaatgtgtatgacttctacaaaccaaatttggcctcggagtacccaatagtggatgggaagctttccatccagtgctacttgcgggccttggatcgatgttacacatcataccgtaaaaaaatccagaatcagtggaagcaagctggcagcgatcgacccttcacccttgacgatttacagtacatgatctttcatacacccttttgcaagatggtccagaagtctctggctcgcctgatgttcaatgacttcctgtcagccagcagtgacacacaaaccagcttatataaggggctggaggctttcggggggctaaagctggaagacacctacaccaacaaggacctggataaagcacttctaaaggcctctcaggacatgttcgacaagaaaaccaaggcttccctttacctctccactcacaatgggaacatgtacacctcatccctgtacgggtgcctggcctcgcttctgtcccaccactctgcccaagaactggctggctccaggattggtgccttctcttatggctctggtttagcagcaagtttcttttcatttcgagtatcccaggatgctgctccaggctctcccctggacaagttggtgtccagcacatcagacctgccaaaacgcctagcctcccgaaagtgtgtgtctcctgaggagttcacagaaataatgaaccaaagagagcaattctaccataaggtgaatttctccccacctggtgacacaaacagccttttcccaggtacttggtacctggagcgagtggacgagcagcatcgccgaaagtatgcccggcgtcccgtctaaaggtgttctgcagatccatggaaagcttcctgggaaacgtatgctagcagagcttctccccgtgaatcatatttttaagatcccactcttagctggtaaatgaatttgaatcgacatagtagccccataagcatcagccctgtagagtgaggagccatctctagcgggcccttcattcctctccatgctgcaatcactgtcctgggcttatggtgctatggactaggggtcctttgtgaaagagcaagatggagcaatggagagaagacctcttcctgaatcactggactccagaaatgtgcatgcag

SEQ ID NO: 1315 - DNA, 644 bp, Artificial
  cDNA Sequence
ggtttctgaactgctgggtttctgcttgctcctctggagatgcagcgtctgttgactccagtgaagcgcattctgcaactgacaagagcggtgcaggaaacctccctcacacctgctcgcctgctcccagtagcccaccaaaggttttctacagcctctgctgtccccctggccaaaacagatacttggccaaaggacgtgggcatcctggccctggaggtctacttcccagcccaatatgtggaccaaactgacctggagaagtataacaatgtggaagcaggaaagtatacagtgggcttgggccagacccgtatgggcttctgctcagtccaagaggacatcaactccctgtgcctgacggtggtgcaacggctgatggagcgcatacagctcccatgggactctgtgggcaggctggaagtaggcactgagaccatcattgacaagtccaaagctggcatagataccaccaatgcctgctacggtggtactgcctccctcttcaatgctgccaactggatggagtccagttcctgggatggtcgttatgccatggtggtctgtggagacattgccgtctatcccagtggtaatgctcgtcccacaggtggggccggagctgtggctatgctgattgggcc

SEQ ID NO: 1316 - DNA, 338 bp, Artificial
  cDNA Sequence
tgcagacgtggaaatgttggcatgtggatagaccctgtaccaaaaacccagcagaagattcagagtccctgagatgcttcctcctcatcttcttcgccaagcacctcttgtcactgatcttggaagttagaggtgggaaaaggcagccccagccctgagattgctccagcctgttcttcacctgcagtgccaggtgtcctggggaagtgtcgctacgtttactatgggaaaaactcagagggcaacaggtttatccgagatgaccagctctgaagccaacttctgtataccttcacccatttcatgaaaataaaatcaaaagggaaatcaaaaataaa

SEQ ID NO: 1317 - DNA, 246 bp, Artificial
  cDNA Sequence
aatgggtgtgaatctctgtgtgctcatatacatatgcttgattatatgatcatctcgtggaggacatgtgacacgggaagacaatagggcacatgatatgctctttgatctaaggtgtcctggggaagtgtcgctacgtttactatgggaaaaactcagagggcaacaggtttatccgagatgaccagctctgaagccaacttctgtataccttcacccatttcatgaaaataaaatcaaaaggga

SEQ ID NO: 1318 - DNA, 256 bp, Artificial
  cDNA Sequence
aggcttctagtgaggacgttgccagctccccggagcgccactacacgcccttgccttctgcttccagggaactcaccagtcaccaaggtgtcctggggaagtgtcgctacgtttactatgggaaaaactcagagggcaacaggtttatccgagatgaccagctctgaagccaacttctgtataccttcacccatttcatgaaaataaaatcaaaagggaaatcaaaaataaagaaaacgctaaagaaaaaacaata

SEQ ID NO: 1319 - DNA, 285 bp, Artificial
  cDNA Sequence
cagcagaggggaggggaagctagttggtagagtggatagatagtacactagatccaagtctgtatcttgaatctctctcataacaccagcgtgtggctgtaaacccaggcctccggtttcctctgtaaaataaaggagatgcactaagatgctttctatgcctttcagtactatccttcagtttgctctgatcaagaattgaagagatccccatattcccgtggtttaattttccctgaagaccttggactgaccactttcgtgtcctggggaagtgtcgctacg

SEQ ID NO: 1320 - DNA, 709 bp, Artificial
  cDNA Sequence
gcactactttgttgttcttcacaattagttggagctttctttggtcaacagcagatgtgactaagaaaatcacgctgtttcacttagagcagtggtcaccaagtgtggtccttaggccacacaggtcagcatcacctaggaactaggaaatgcaagttcttaagcaatcccacccagacctactgaattggaagtgctgaggatggggtccagcaatctgtggttgaacaagctctgcaggcatccaggagcagagctgtggggcagcagaatctgtgatgacagagaatgatgatgtatttttgccagcagatgcttttgctcctgttttgataccccaatattcggatgcagaaaaggactctgagcattgctgacgggtgtgctctgcacacctatctcttcaggatctgaataatttggtggaaagacaatgccttttctggaaaagggtgtcaggtcagtcatattggaggatgcaaatttccttatgtgatgggagtgagggttggggtagggcacttcacggagcattcagcagtctgcaattaagcatcactccaaggctttctgcataggtgatggctgtttctgcatcatggggcaaaccaggtgctagaacttcaaatgccaattaccaaaggcgcttcctgcggaggaaacctctctacaactcacctgacccagaaggcacacatttttttctggg

SEQ ID NO: 1321 - DNA, 703 bp, Artificial
  cDNA Sequence
ctttctttggtcaacagcagatgtgactaagaaaatcacgctgtttcacttagagcagtggtcaccaagtgtggtccttaggccacacaggtcagcatcacctaggaactaggaaatgcaagttcttaagcaatcccacccagacctactgaattggaagtgctgaggatggggtccagcaatctgtggttgaacaagctctgcaggcatccaggagcagagctgtggggcagcagaatctgtgatgacagagaatgatgatgtatttttgccagcagatgcttttgctcctgttttgataccccaatattcggatgcagaaaaggactctgagcattgctgacgggtgtgctctgcacacctatctcttcaggatctgaataatttggtggaaagacaatgccttttctggaaaagggtgtcagtctccacaaagaacaatgttcttcccaacctgccaagacagccaaataacaaaagaaatacccgtggagcccacctgaagtgcacagatctggggacattgggaggaacagaggtagcttagtgactctactgtccctaccacccaacctgctattagccctgctggtccgctcgtgtttgaggtcatgagtcagtctacttaataaaatcatcagctggagcttacaaagcaatagtgcttaatagatacaagcatgctaatatattttttaagtga

SEQ ID NO: 1322 - DNA, 790 bp, Artificial
  cDNA Sequence
ctagggttcacacctccaggaatggatagatcctctccagataacagcccagtgcacgggatgttacgtcaaccatccatcacaactggggtcaacatccccatcatcactgaactagtgaacgatactaatgttcagtttttggaccaagacgatgatgatgaccctgatacagaactgtacctcacgcagccctttgcctgtgggacagcatttgccgtcagtgtcctggactcactcatgagcgcgacgtacttcaatgacaatatcctcaccctgatacggaccctggtgaccggaggagccacgccggagctggaggctctgattgctgaggaaaacgcccttagaggtggctacagcaccccgcagacactggccaatagggaccgctgccgcgtggcccagttagctctgctcgatgggccatttgcggacttaggggatggtggttgttatggtgatctgttctgcaaagctctgaaaacatataatatgctttgttttggaatttaccggctgagagatgctcacctcagcacccccagtcagtgcacaaagaggtatgtcatcaccaacccgccctatgagtttgagctcgtgccgacggacctgatcttctgcttaatgcagtttgaccacaatgccggccagtcccgggccagcctgtcccattcctcccactcgtcgcagtcctccagcaagaagagctcctctgttcactccatcccatccacagcaaaccgacagaaccggcccaagtccagggagtcccgggacaaacagaagt

SEQ ID NO: 1323 - DNA, 631 bp, Artificial
  cDNA Sequence
atcttgtgatgtatatctgggattgtccgaaaattatgaaatgaaagttgcatcacacttcatgaaacctcttgcggttgggctacttgaaagtgactttgaccttgtatagaaaggtatgtcatcaccaacccgccctatgagtttgagctcgtgccgacggacctgatcttctgcttaatgcagtttgaccacaatgccggccagtcccgggccagcctgtcccattcctcccactcgtcgcagtcctccagcaagaagagctcctctgttcactccatcccatccacagcaaaccgacagaaccggcccaagtccagggagtcccgggacaaacagaaaaaagaaatggtttacagatgaaccggataatgcctatcccagaaacattcaaatcaagcccatgagtacccacatggctaaccagatcaaccaatataaatccacaagcagcttgattccaccaatcagagaagttgaagatgaatgttgactcccaggagaccagaactatttttttaaagcctgacaaacttcataaatggtgatgtgacttttcttcttacatgctgaatcactggtggaaacgttaggataagcaagaattgccagaaaataaagtagacagatc

SEQ ID NO: 1324 - DNA, 462 bp, Artificial
  cDNA Sequence
tcacttcccttatggctacaaaagaggggagaatggggaaacatggaaatcaaaaagcatccctgtattatctattctcatactgctaacaaagacatacttgagactggttccctatatcccaggatgatgaagacccctctttctccctctgtataccaagaagtttaagtatcagcaacacaccaagggaaaatagcaaacagacttctgtttggacatgaaattgaacaaagagctcacaccagtcagagccagtttgaaccagtctgcacggctctgaaatctgccggacctccctctgaagctggcacaaagacacgaagaacatcattgacttcaatctttggccttctaaccaggaaaggacttgtgaaggtgaatggtttgcagacgaaggggatataaaagagacaaaaccaggataaaaattaaataaaaagtagctgtcttaaactgtaa

SEQ ID NO: 1325 - DNA, 372 bp, Artificial
  cDNA Sequence
ttccaggaagaagaaacaactggcatcagcaaagatctggagtcatgaaactacccccgaggatggctgggaaaagaagatccaggaactgctggtgtctgtactagttaccgccctgataggaaaggcagaagccatagctctcaccaaacctccagcatttaaactttgctgtggagtctacgtgaccccaccacgaggtgaccctcacctttccctccatacctggggagacagacatggcagtggtcactgaaccctgggatgacacgctacctcatcctttatgacaccctttgatatgttgcttttgatgcatttctttgtatcccatttggtttcatttttagcaataaactcattcttggtaca

SEQ ID NO: 1326 - DNA, 608 bp, Artificial
  cDNA Sequence
cacgcccccacgccggctcttcccggggtccttccgtgcgcgttgatatgattggccggcgaatcgtggttctcttttcctccttggctgtctgaagatagatcgccatcatgaacgacaccgtaactatccgcactagaaagttcatgaccaaccgactacttcagaggaaacaaatggtcattgatgtccttcaccccgggaaggcgacagtgcctaagacagaaattcgggaaaaactagccaaaatgtacaagaccacaccggatgtcatctttgtatttggattcagaactcattttggtggtggcaagacaactggctttggcatgatttatgattccctggattatgcaaagaaaaatgaacccaaacatagacttgcaagacatggcctgtatgagaagaaaaagacctcaagaaagcaacgaaaggaacgcaagaacagaatgaagaaagtcagggggactgcaaaggccaatgttggtgctggcaaaaaggcctccttggagcggggaaggagagctcttcagttcctttggcaccttcacgcagcatgcaagacgggctgctttttcttctgtttatggatgaggcacagagggtag

SEQ ID NO: 1327 - DNA, 587 bp, Artificial
  cDNA Sequence
cacgcccccacgccggctcttcccggggtccttccgtgcgcgttgatatgattggccggcgaatcgtggttctcttttcctccttggctgtctgaagatagatcgccatcatgaacgacaccgtaactatccgcactagaaagttcatgaccaaccgactacttcagaggaaacaaatggtcattgatgtccttcaccccgggaaggcgacagtgcctaagacagaaattcgggaaaaactagccaaaatgtacaagaccacaccggatgtcatctttgtatttggattcagaactcattttggtggtggcaagacaactggctttggcatgatttatgattccctggattatgcaaagaaaaatgaacccaaacatagacttgcaagacatggcctgtatgagaagaaaaagacctcaagaaagcaacgaaaggaacgcaagaacagaatgaagaaagtcagggggactgcaaaggccaatgttggtgctggcaaaaagccgaaggagtaaaggtgctgcaatgatgttagctgtggccactgtggatttttcgcaagaacattaataaactaaaaacttcatgtg

SEQ ID NO: 1328 - DNA, 522 bp, Artificial
  cDNA Sequence
cacgcccccacgccggctcttcccggggtccttccgtgcgcgttgatatgattggccggcgaatcgtggttctcttttcctccttggctgtctgaagatagatcgccatcatgaacgacaccgtaactatccgcactagaaagttcatgaccaaccgactacttcagaggaaacaaatggtcattgatgtccttcaccccgggaaggcgacagtgcctaagacagaaattcgggaaaaactagccaaaatgtacaagaccacaccggatgtcatctttgtatttggattcagaactcattttggtggtggcaagacaactggctttggcatgatttatgattccctggattatgcaaagaaaaatgaacccaaacatagacttgcaagacatggcctgtatgagaagaaaaagacctcaagaaagcaacgaaaggaacgcaagaacagaatgaagaaagtcagggggactgcaaaggccaatgttggtgctggcaaaaagtgagctggagattggatcacag

SEQ ID NO: 1329 - DNA, 534 bp, Artificial
  cDNA Sequence
cacgcccccacgccggctcttcccggggtccttccgtgcgcgttgatatgattggccggcgaatcgtggttctcttttcctccttggctgtctgaagatagatcgccatcatgaacgacaccgtaactatccgcactagaaagttcatgaccaaccgactacttcagaggaaacaaatggtcattgatgtccttcaccccgggaaggcgacagtgcctaagacagaaattcgggaaaaactagccaaaatgtacaagaccacaccggatgtcatctttgtatttggattcagaactcattttggtggtggcaagacaactggctttggcatgatttatgattccctggattatgcaaagaaaaatgaacccaaacatagacttgcaagacatggcctgtatgagaagaaaaagacctcaagaaagcaacgaaaggaacgcaagaacagaatgaagaaagtcagggggactgcaaaggccaatgttggtgctggcaaaaagaaggtaacatgttttaagaaactatgtagcatag

SEQ ID NO: 1330 - DNA, 659 bp, Artificial
  cDNA Sequence
cacgcccccacgccggctcttcccggggtccttccgtgcgcgttgatatgattggccggcgaatcgtggttctcttttcctccttggctgtctgaagatagatcgccatcatgaacgacaccgtaactatccgcactagaaagttcatgaccaaccgactacttcagaggaaacaaatggtcattgatgtccttcaccccgggaaggcgacagtgcctaagacagaaattcgggaaaaactagccaaaatgtacaagaccacaccggatgtcatctttgtatttggattcagaactcattttggtggtggcaagacaactggctttggcatgatttatgattccctggattatgcaaagaaaaatgaacccaaacatagacttgcaagacatggcctgtatgagaagaaaaagacctcaagaaagcaacgaaaggaacgcaagaacagaatgaagaaagtcagggggactgcaaaggccaatgttggtgctggcaaaaaggtatagttcattaaggaaaatatagaaacgtcattaattgtaggtctttagtttctaggaaagaagggatcttattaatttttaaaataacttttcttaatgtttcttcttttccctcttcttctggattacagaaggtaacatgttttaagaaactat

SEQ ID NO: 1331 - DNA, 779 bp, Artificial
  cDNA Sequence
gaacgacaccgtaactatccgcactagaaagttcatgaccaaccgactacttcagaggaaacaaatggtcattgatgtccttcaccccgggaaggcgacagtgcctaagacagaaattcgggaaaaactagccaaaatgtacaagaccacaccggatgtcatctttgtatttggattcagaactcattttggtggtggcaagacaactggctttggcatgatttatgattccctggattatgcaaagaaaaatgaacccaaacatagacttgcaagacatggcctgtatgagaagaaaaagacctcaagaaagcaacgaaaggaacgcaagaacagaatgaagaaagtcagggggactgcaaaggccaatgttggtgctggcaaaaaggcctccttggagcggggaaggagagctcttcagttcctttggcaccttcacgcagcatgcaagacgggctgctttttcttctgtttatggatgaggcacagagggtagatgacttgccccaagtccttcagctcattcatgctggggaaaggagtaagcttcaggcgtcttcccctggagttcacgccacctctgacagcaagtgagccgtttgctactcaagtgctgtttcttgcttttttaagatgagggaattggggcttggagtgcaagcattgggaagaatttcccaggaagagagatgcacagatgtgaagaactcgaaggcaagagaaagccggggggttgtgtggcaggtagaagtgccaggaccgtggagcgtgtggacatg

SEQ ID NO: 1332 - DNA, 475 bp, Artificial
  cDNA Sequence
gaacgacaccgtaactatccgcactagaaagttcatgaccaaccgactacttcagaggaaacaaatggtcattgatgtccttcaccccgggaaggcgacagtgcctaagacagaaattcgggaaaaactagccaaaatgtacaagaccacaccggatgtcatctttgtatttggattcagaactcattttggtggtggcaagacaactggctttggcatgatttatgattccctggattatgcaaagaaaaatgaacccaaacatagacttgcaagacatggcctgtatgagaagaaaaagacctcaagaaagcaacgaaaggaacgcaagaacagaatgaagaaagtcagggggactgcaaaggccaatgttggtgctggcaaaaagccgaaggagtaaaggtgctgcaatgatgttagctgtggccactgtggatttttcgcaagaacattaataaactaaaaacttcatgtg

SEQ ID NO: 1333 - DNA, 681 bp, Artificial
  cDNA Sequence
cagcttgctaacggccttgccccattcagatgcatcgaactcacagaacatcgctccccagctgctggctcgcggttctgagagtgcctgaatagaaaaccactcatttcccttcgcaaaagaggcgcccaaagcagatatttcaatatattccaatttagccgagggaagccagaacatggatgttgttgccaaggaaaccacctccttcctcctgtgtgctgtgcatacgtgtatcacttcatctctctgctctccaagcttgaatctagatctgacgtggatatcctgccacagttccgaagtctacctagtgccccagccgaacctgccctggctcctaggtggggtatggacatctgtgacatccctccccaacaccccaccaagctgggctgcaagacgggttatggtggccccatgacttccttccttgatgaagaaaccaaggcccagggacttcaagcaaccataagcaacagccaataagcagaagagcctcttctgcactgacttgtatggacttccagccttgctcattttccttttgcagcctcaaccttatctagattttaagagacagccctttttgtacttcctcccaccccgcaccctcacctcttactcttattaagtttaaagtgcaaaaatgatgcaattaaaacctatattgcctctcga

SEQ ID NO: 1334 - DNA, 386 bp, Artificial
  cDNA Sequence
ctcaactgcttgagctaagagcaagctcagtgtttccttcaagcagcatcgtggacagattcctgccagacccttcagagcaagcaccccacacccctagcccagggtctcttcatcgatagggggtgatctgtctgcccctcactgttttctccaaatagcatctccaaatggactagactcgacaagcaaacagtctgcagtggaccccttgggtcatccattctgatggaaacagaaatagaattccagcccggtggagtggagaaggctccaggagggcgtcgggcccaaccaccttgcgttatggagcacagagagggattctgctgtggtcacatagcacctaagtggttgcagcagcctcagaacaggctgtcctgcct

SEQ ID NO: 1335 - DNA, 444 bp, Artificial
  cDNA Sequence
cgatagggggtgatctgtctgcccctcactgttttctccaaatagatcaaaacctaaaaaggtgggaatgaaagaagctcctaaccctcctggcttttttcccaaagccaggaggcagctcctgaatggtggattttggactactggtgaggctgtcagcaaagggcctggcccagagagatgctcaagagtaggatgaaaagaccgtgggcttcttcctctgcaaaaggaaaggtttgggactgatggatgctgaaaagtctagatcttcataatcctcaacagcttcactgccactgcacacacaaaatgagtgtgccctatatttccagccctctgatgaatacgaaaagagcctgaagaactcatcttcctggtcgcaaagtactttaaaatatataatccctcaatcttaaacatacacattttattgctttttattat

SEQ ID NO: 1336 - DNA, 522 bp, Artificial
  cDNA Sequence
aagccaggctgcagaatttggccatcctcaaacaccacctttaatggcaaaggagggatgggaaaactcctgaagaccaggtagccatggagtgctacatttctggatggaaaggggaccacacaggattcacaactgggctcctcttgctgtgttggagggagatgtttcacctgagcaccatgtttcacatggcagtggggcaaggcactgaggctgtgtggcatggcaccacagggtggccactggtccctgagtcggcagacctggctctcttttccctgccatgctgacttcatgtttatggctaagaagcctctcccagggagcagctgagcttcaggggcattcctggagcgtccaggagagcaatatggccctttgctggtggagaacctgagaccctcaaggagaaagtgaagaaaattctctctgcatacagaccccttcccattttcccattctgggttgactatcctccctcatagatgtgctcatgagtcttggaaattctcttgactc

SEQ ID NO: 1337 - DNA, 579 bp, Artificial
  cDNA Sequence
cacaaggctgtttcctgcactggtcagggatgaggtcctggagtccagtgcaggggaagtgtgctatggggaagggctgtaggtggtagggacagtcttgctgctccctcctggggcaccctcactggtccctgccgatgccacctcctacctgtcccccatgtacctctcctctgtgttttcctctggtccaggcacaaactcttctcagtgtgccacagcaggcttgaatgggtccaaggaacatgttcttgaaacaaaggaaaaaacaggccagaaacactaactcagggttgcggtcaggtttaaatgagcttatgcactgggatcattgagtacagttcctggcaccgagttggttctgcaatcactgttttctatgggtcccttctgtgggctaagcctgtgagagatgtggctgtgcctgcctggcaaaccattggcctctgtttgccacacagagccaggcacacagcaggtgctcaggaggacacgttgttagtctacgagtctctccttaccagtaacttactcagcacaaagggagaaatagtgatttcacagtggagaggccaagca

SEQ ID NO: 1338 - DNA, 1927 bp, Artificial
  cDNA Sequence
tttccttcagtcttttgaaacagccattgaacataataaagaagtggagcctctgctgggaagggcacaggaaaacttgaatcccttagtagttctgaatttatttaaacgaatcccagctgaagatgttcctctacttctgatgaacccagaagccggaaagccgtctgatttgattctcacacgacttttggtgcctcctttgtgtatcagaccctccgttgtgagtgatttgaagtctggcaccaatgaagatgatctgacaatgaaactgacagaaatcattttcctaaacgatgttattaaaaagcatcggatctcaggagccaagacccagatgatcatggaggactgggatttcctgcagctgcagtgtgccctctacattaacagtgagctctcgggcattcccctcaacatggcacccaagaagtggaccagaggcttcgtccaacgcctgaagggaaaacagggtcgatttagaggaaatctctcaggaaagagagtggatttttctggcagaacagtcatctcgcccgaccccaacctccggattgatgaggtagctgtgccagttcatgtggccaaaattctaacttttcctgagaaggtaaacaaagcaaacatcaatttcttgaggaaactggttcaaaacggccctgaggttcacccaggagcaaacttcattcagcagagacatacgcagatgaaaaggtttttgaaatacggaaatcgagaaaagatggctcaagagctcaagtatggtgacatcgtagagagacacctcatcgatggagatgtggtgctgttcaatcggcagccctcgctgcacaaattgagcattatggctcatctggccagggtcaagccccaccggaccttcagatttaatgagtgtgtctgtacaccctataatgctgactttgatggtgatgaaatgaaccttcatcttcctcaaacagaagaagctaaagcagaggcccttgttctgatggggactaaagcaaatcttgtaaccccgaggaatggggaaccgctgattgctgctattcaggattttctaacaggtgcctatctcctcactctcaaggacactttctttgatcgagccaaggcttgccaaatcattgcttcaatactggttggcaaggatgagaaaattaaagttcgcctcccaccgcctacaatcctaaagcctgtcaccctgtggacgggaaagcagatcttcagtgtcatcctcaggcctagcgatgacaatccagtgagggccaacctgcgaaccaagggcaagcagtactgtggcaaaggggaagatctctgtgccaatgattcctatgttacaatccagaacagtgagttgatgagtggcagcatggacaaaggaaccctagggtcaggatccaagaacaatattttttacattttgctgcgagactggggacagaatgaagctgcagatgccatgtcacggctcgccaggctggctcctgtctacctgtctaaccgtggtttctcaattgggatcggtgatgtcacacctggccaaggactgctgaaggccaagtatgagttgctgaatgccggctacaagaaatgtgatgagtacatcgaagccctgaacacgggcaagctgcagcagcagcctggctgcactgctgaggagaccctggaggcactgatcctgaaggagctgtctgtgatccgtgaccacgctggcagtgcctgcctccgggagctggacaagagcaacagccccctcaccatggctctgtgcggctccaaaggttccttcattaacatatcacagatgattgcctgtgtgggacagcaggccatcagtggctctcgagtgccagacggctttgaaaacaggtccttgcctcattttgaaaaacactcaaagctcccagctgccaaaggctttgtg

SEQ ID NO: 1339 - DNA, 1674 bp, Artificial
  cDNA Sequence
agccccgtgtgctgtaccagctggaccgcatcacccccacccaagtagaaaagtttctggagacctgtagggacaagtacatgagggcacagatggagccaggttctgcagtgggtgctctgtgtgcccagagcattggtgagccaggcacccagatgaccctgaagactttccactttgcaggtgtggcctccatgaacatcaccctgggcgtgccccggattaaagagatcatcaacgcttccaaggccatcagcactccaattatcacagcacagctagacaaggatgacgacgcggattatgctcgcctcgtgaaagggagaattgagaaaaccctcttgggagagatttccgagtatattgaagaagtgtttcttcctgatgactgctttattctcgtcaagctctccctggaacggattaggcttctgagactggaagtgaacgctgagacagtgagatattccatctgcacatccaagctccgtgtgaagcccggtgatgtggctgttcatggtgaggctgtggtgtgtgtcacccccagagagaacagcaagagctccatgtactacgtgctgcagttcctgaaagaggatctccccaaggtggtggtgcagggcattccagaggtgtccagagctgtcatccacattgacgagcagagtggaaaggagaagtacaagcttctggtggaaggtgataacctgcgggcagtcatggccacacacggtgtgaagggcacccgaaccacctccaataacacctatgaggtggagaaaactctgggcatcgaggccgcccggacaacgatcatcaatgaaatccagtacaccatggtgaaccacggcatgagcatcgacaggaggcacgtgatgctgctctccgacctcatgacctacaagggtgaagtcctgggcatcactaggtttggcctggccaagatgaaggagagtgtgctgatgctggcctcctttgagaagacggctgaccatctctttgacgctgcctacttcgggcagaaggactctgtgtgtggggtgtctgagtgcatcatcatgggaatcccaatgaacattggaaccgggctcttcaagctgcttcacaaggctgacagggacccgaaccctcccaagaggcccctgatcttcgacacaaatgaattccacatcccccttgtcacatagtccaaagaaagaggggaccatgcctgaccttgactccttgtcctgtctccagctgatgtataaagagttttgtgctccctgggacgggggtcctgaggtccccacctatgccagcaatcagagaagccctcttggcatccccaggagcagcttctcctctgatagggtgcagctcacaccagtgaccctgactgtgccacgctgctcgggagagctgagggttttattgtttgcttgcttgaaacctaatctatagacggccccacagctcgtgcacacactgcttccctggacttaaagcccagccaggtgtcatggtccatcccagctcactgcatacatccatcggctccccatggtgtcttcacacctgacgatgagccaggcctgagccccacacaggccagggcacattcttggattttccattccttggtcatgctggaatctctcaatgtgacatacttatgtaaatattgttactatt

SEQ ID NO: 1340 - DNA, 637 bp, Artificial
  cDNA Sequence
agggcacagatggagccaggttctgcagtgggtgctctgtgtgcccagagcattggtgagccaggcacccagatgaccctgaagactttccactttgcaggtgtggcctccatgaacatcaccctgggcgtgccccggattaaagagatcatcaacgcttccaaggccatcagcactccaattatcacagcacagctagacaaggatgacgacgcggattatgctcgcctcgtgaaagggagaattgagaaaaccctcttgggagagatttccgagtatattgaagaagtgtttcttcctgatgactgctttattctcgtcaagctctccctggaacggattaggcttctgagactggaagtgaacgctgagacagtgagatattccatctgcacatccaagctccgtgtgaagcccggtgatgtggctgttcatggtgaggctgtggtgtgtgtcacccccagagagaacagcaagagctccatgtactacgtgctgcagttcctgaaagaggatctccccaaggtggtggtgcagggcattccagaggtgtccagagctgtcatccacattgacgagcagagtggaaaggagaagtacaagcttctggtggaaggtgataacctgcgggcagtca

SEQ ID NO: 1341 - DNA, 205 bp, Artificial
  cDNA Sequence
ccttctgtgattgaatttggtaaatatgaaatccaaacctggtactcctcgccttacccacaggaatatgcaagattaccaaagctttacctgtgtgaattctgtcttaaatatatgaaaagtaaaaatattttgctaagacactccaagaagtgtggatggtttcatcctccagcaaatgaaatttaccgaaggaaagaccttt

SEQ ID NO: 1342 - DNA, 655 bp, Artificial
  cDNA Sequence
actccggcgaggcggggagggccccggactccgacggcggctcggacgccgactcggaggtgggtccggggagcccgactcggaccgcggaggcagcggaggaggaaatggcaggtcctaatcaactctgcattcgccgctggactaccaagcatgtagctgtgtggctgaaggatgaaggcttttttgaatatgtggacattttatgcaataagcaccgacttgatggaatcacattgctaacattgactgaatatgatctccggtctcctcctctggaaatcaaagtcttaggggacattaaaaggttaatgctctcagtccgaaaattgcagaaaatacatattgatgttttagaagagatgggctacaacagtgacagtcccatgggttccatgacccctttcatcagtgctcttcagagtacagactggctctgtaatggggagctttcccatgactgtgacggacccataactgacttgaattctgatcagtaccagtacatgaatggtaaaaacaaacattctgttcgaagattggacccagaatactggaagactatactgagttgtatatatgtttttatagtatttggatttacatctttcattatggttatagtccatgagcgagtgcctgacatgcagaccta

SEQ ID NO: 1343 - DNA, 882 bp, Artificial
  cDNA Sequence
ggagaaattacatcgagcctttgccatttggagtggctttggtatgaccctgactggcgttcacacatgtggagattacatgtttagtggccacacagtcgtcctaactatgctgaatttctttgtcaccgaatatacaccaagaagctggaatttcttgcacactttatcctgggttctcaacctctttggaatcttcttcatcttggctgcccatgaacattattctattgatgtgtttattgctttttatataacaacaagactctttttgtactaccatactctggccaataccagagcatatcagcagagtaggagagcaaggatttggtttcccatgttctctttttttgaatgcaatgttaatggcacagtacctaatgaatattgttggccattttcaaaaccagcaataatgaaaagactaattggatgaatactatctttctaatgaatttgtgattaaatatataatagttgttgaaaatgagtaactttgcgttctccccctaggttgttcttagatgcctggcttatgtgttgacaaagtaaagttttctgttctgagcaaagttatgattataaaaagcaagaaagaacaatcaagagtccttatgtagctatttgaacagaaagcttaagtagatgttttctgccccttctctttaggaagacttaatgttgtgattgaagtcaggctgtacccttacctgttgagtatttgcttattgaactttaaacaagtcaacttgagcagtttgctggttgaggaattttcattgatttccagtagggctctagtcaagaaataatatgttttgaagctccttattacctttagaagaagaaaccctaacaagtgacagtacttgttctttg

SEQ ID NO: 1344 - DNA, 1816 bp, Artificial
  cDNA Sequence
caaaaagcctctcaggcacacaacccagcacagcaaggcagtcacaccaaggcggtccccagcgcgctgcctccgccgttccccgccccctcgcctctgaggctgcccggatagctgcctgatccaaggcccagcagcttctgccttccggatccccaccgacggacggaggcagcccacctgcaggaccggggcgctgtcggtccacgtggccgctctggagcaggttggagttggcagcgggctgcgctgcagggacaggcgcggcggacagccccgggggcagcggcggggtcctgtctgggagaggacagggttgcggcgggcggaacggtgtctccttcacttcgccctccagctgctggagctgcagcccgaccgcgagcgtgccaagcggcttcagcagctagcggagcggtggcggcggcccccctcaggacaccaccagattcccctcttcccgcggcctcgccatggcgacccacggacagacttgcgcgcgtccaatgtgtattcctccatcatatgctgaccttggcaaagctgccagagatattttcaacaaaggatttggttttgggttggtgaaactggatgtgaaaacaaagtcttgcagtggcgtggaattttcaacgtccggttcatctaatacagacactggtaaagttactgggaccttggagaccaaatacaagtggtgtgagtatggtctgactttcacagaaaagtggaacactgataacactctgggaacagaaatcgcaattgaagaccagatttgtcaaggtttgaaactgacatttgatactaccttctcaccaaacacaggaaagaaaagtggtaaaatcaagtcttcttacaagagggagtgtataaaccttggttgtgatgttgactttgattttgctggacctgcaatccatggttcagctgtctttggttatgagggctggcttgctggctaccagatgacctttgacagtgccaaatcaaagctgacaaggaataactttgcagtgggctacaggactggggacttccagctacacactaatgtcaatgatgggacagaatttggaggatcaatttatcagaaagtttgtgaagatcttgacacttcagtaaaccttgcttggacatcaggtaccaactgcactcgttttggcattgcagctaaatatcagttggatcccactgcttccatttctgcaaaagtcaacaactctagcttaattggagtaggctatactcagactctgaggcctggtgtgaagcttacactctctgctctggtagatgggaagagcattaatgctggaggccacaaggttgggctcgccctggagttggaggcttaatccagctgaaagaaacctttgggaatggatatcagaagatttggccttaatatatttccattgtgaccagcagcaggcttttttcccccaagaagatgatcaaaacaaaggatgatctcaacaagagctgtattttaagtatttagacagttctttgttagctggtttctagttggttatctagttaccaatgctgcagtcctgcagtcacctatacattatttaaatgtatttaactgttaaatgcgctacccaccaataatgaaatagacctttatgaaaactgtgcaattgtgtgcatgtttgtttttatgttcctttagaaaacattgactgttaccattgaatgagatggatcagtggatattaagatgaggttacaaattttgttaagttcagccattattacttttggtatcccagaacatgacaaattatgaataaaacaagtatacata

SEQ ID NO: 1345 - DNA, 974 bp, Artificial
  cDNA Sequence
caaaaagcctctcaggcacacaacccagcacagcaaggcagtcacaccaaggcggtccccagcgcgctgcctccgccgttccccgccccctcgcctctgaggctgcccggatagctgcctgatccaaggcccagcagcttctgccttccggatccccaccgacggacggaggcagcccacctgcaggaccggggcgctgtcggtccacgtggccgctctggagcaggttggagttggcagcgggctgcgctgcagggacaggcgcggcggacagccccgggggcagcggcggggtcctgtctgggagaggacagggttgcggcgggcggaacggtgtctccttcacttcgccctccagctgctggagctgcagcccgaccgcgagcgtgccaagcggcttcagcagctagcggagcggtggcggcggcccccctcaggacaccaccagattcccctcttcccgcggcctcgccatggcgacccacggacagacttgcgcgcgtccaatgtgtattcctccatcatatgctgaccttggcaaagctgccagagatattttcaacaaaggatttggttttgggttggtgaaactggatgtgaaaacaaagtcttgcagtggcgtgatatcacaatttctggctgtagtctctttattattttcacatcagctgtcttccttaggcttggcgtggtgatgcttgtgatcccagctactcaggaggctgaggtacgtggatcacttgagcctgggaggttgaggctgcagtcagctgtgatcacatcattgtgttccagcttgggtgacagaggcaagatgctgtctcaaaaaaaaaaaaaaaattcagataagccctccgtattttttctttttcagttcgtgtgcaaccagggattggcacattattatttttagacagggtctcactgtgtcacccatgctgagtgcagtggtgggattatggctcactgcagcc

SEQ ID NO: 1346 - DNA, 1468 bp, Artificial
  cDNA Sequence
aagatggccgcgctgccccgcggcccctcgcccctctctgcccgggatctccctttggccctttgaccccagcttaccgcacttcttgtccctcccgcagattcccctcttcccgcggcctcgccatggcgacccacggacagacttgcgcgcgtccaatgtgtattcctccatcatatgctgaccttggcaaagctgccagagatattttcaacaaaggatttggttttgggttggtgaaactggatgtgaaaacaaagtcttgcagtggcgtggaattttcaacgtccggttcatctaatacagacactggtaaagttactgggaccttggagaccaaatacaagtggtgtgagtatggtctgactttcacagaaaagtggaacactgataacactctgggaacagaaatcgcaattgaagaccagatttgtcaaggtttgaaactgacatttgatactaccttctcaccaaacacaggaaagaaaagtggtaaaatcaagtcttcttacaagagggagtgtataaaccttggttgtgatgttgactttgattttgctggacctgcaatccatggttcagctgtctttggttatgagggctggcttgctggctaccagatgacctttgacagtgccaaatcaaagctgacaaggaataactttgcagtgggctacaggactggggacttccagctacacactaatgtcaatgatgggacagaatttggaggatcaatttatcagaaagtttgtgaagatcttgacacttcagtaaaccttgcttggacatcaggtaccaactgcactcgttttggcattgcagctaaatatcagttggatcccactgcttccatttctgcaaaagtcaacaactctagcttaattggagtaggctatactcagactctgaggcctggtgtgaagcttacactctctgctctggtagatgggaagagcattaatgctggaggccacaaggttgggctcgccctggagttggaggcttaatccagctgaaagaaacctttgggaatggatatcagaagatttggccttaatatatttccattgtgaccagcagcaggcttttttcccccaagaagatgatcaaaacaaaggatgatctcaacaagagctgtattttaagtatttagacagttctttgttagctggtttctagttggttatctagttaccaatgctgcagtcctgcagtcacctatacattatttaaatgtatttaactgttaaatgcgctacccaccaataatgaaatagacctttatgaaaactgtgcaattgtgtgcatgtttgtttttatgttcctttagaaaacattgactgttaccattgaatgagatggatcagtggatattaagatgaggttacaaattttgttaagttcagccattattacttttggtatcccagaacatgacaaattatgaataaaacaagtatacata

SEQ ID NO: 1347 - DNA, 772 bp, Artificial
  cDNA Sequence
cacattttggtctggtttgttgtgctagactagaattaacaaagatgatttttatgagagtgcttaggcttttgtgctgtatggacagtttggggtctttggatacattccagtggctatcaagagtattgtgtcctactgagaatttgatttttgagttgaatggatacgaattaaatagtacctggtttgtttggcttaatacataatattgaattttattgtctcacgtgaataaaactgaacacttcatgattacatgatggggaaacatgtaggggctttgtctctattgaaatatttttcttacagttgtttttgtattttattttaggcaaaagtcaacaactctagcttaattggagtaggctatactcagactctgaggcctggtgtgaagcttacactctctgctctggtagatgggaagagcattaatgctggaggccacaaggttgggctcgccctggagttggaggcttaatccagctgaaagaaacctttgggaatggatatcagaagatttggccttaatatatttccattgtgaccagcagcaggcttttttcccccaagaagatgatcaaaacaaaggatgatctcaacaagagctgtattttaagtatttagacagttctttgttagctggtttctagttggttatctagttaccaatgctgcagtcctgcagtcacctatacattatttaaatgtatttaactgttaaatgcgctacccaccaataatgaaatagacctttatgaaaactgtg

SEQ ID NO: 1348 - DNA, 1324 bp, Artificial
  cDNA Sequence
acctcgatggggctgaccggcgtggaaggcaggggctgcaggtactcggggtgcaaaatgtggccagttcgtgccgtcagcatcttcagcaccttgattggcaggcggttggcctggcgcagggggtcagaggggggcacggcgtgcacaaaaggcttggtgctgccggccggggacgagcctgggccggggccggagctatttccagagagcgcgctggtccaggcagggtctgcaccgccgcctccgcctccgccgccgccgccgccgctgtgcttactgcttcttagggcagaaagcgagggcgctgtgctcatgacccacccgcgcgcatgggagcagcgggggggagggctccgggaggcgcggggcgggctcggggctgcgcgctcgccccgggagcaggagcagcgggaggaggaggagctggcgcggcggccacgggcgcccagcgcgccttctcggcgcctggagccagacgcgagtaatcctgggtggcccgcagcggagccgtggccgggctagaggagccggctggactgcgggagtgccgggcggctcgcggtgtccgcctcgggctgctcccctgcgctgcgttctcgcggccccgcgccggcgctgcgctctgcgatgcgagccgctgcgtgtccagccggggctctggcgaggaaactcacttcaaaagcagctgcaccaagggggagattaaagcctttgccgccttccaatcaaatgggagcccgaggtgattggagggtcaaggggatgtgacgcgtcccgcgccgccgccgccgccgctgccaggactctcagtgccggttttaatgggcagctccctcttcgccgcccccctgtgtgtcccctccctcgatttcgctgggaggacgagatggacatttattctacgtttgccatccgccgcctccctcttttttcctcctcgtcgttcttcctttccccagctcgaaaataaactgaaaccttcttttgaaggggggtgcgcgtgaggaacagactgcggggggtgtccagaaggagcaccggtgggagtgtggacaccggccggactgtcaactccaggggcgaagggaacctgcacacccagtgttttttccttcgcagtaatcgagatcccgcgcggcgcagcgcagccaccaggaatcgacgggatttctctggctgtcgtttgcgctgcatttatccgaatacatccagctcgcaggcatcctgcaagaaacggctcccggctcgcgtgtacgccgacacctcggcccaacgcaggactcgaggtggtttctagtgcccgggtggctgcaagtctgcc

SEQ ID NO: 1349 - DNA, 246 bp, Artificial
  cDNA Sequence
ttctttctctgtctcccactccgcacgggtaccgagaactttccgggaatcgacgggatttctctggctgtcgtttgcgctgcatttatccgaatacatccagctcgcaggcatcctgcaagaaacggctcccggctcgcgtgtacgccgacacctcggcccaacgcaggactcgaggtggtttctagtgcccgggtggctgcaagtctgccctccgagggaggctggacaagcggcgcccccagg

SEQ ID NO: 1350 - DNA, 211 bp, Artificial
  cDNA Sequence
aaactctccttgctcgggtctcatgccacgctatttcatcaaggaataggaagctgaattgggaacttgtgggaagccaggaggagaaagtcactggaaggactgagcgcattcaggagcctggaggaactcatcttggacaacaatcagctgggggacgaccttgtgttgccagggttacccagactgcataccttaaccctcaacaaga

SEQ ID NO: 1351 - DNA, 929 bp, Artificial
  cDNA Sequence
tgagcacagcgccctcgctttctgccctaagaagcagtaagcacagcggcggcggcggcggcggaggcggaggcggcggtgcagaccctgcctggaccagcgcgctctctggaaatagctccggccccggcccaggctcgtccccggccggcagcaccaagccttttgtgcacgccgtgcccccctctgaccccctgcgccaggccaaccgcctgccaatcaaggtgctgaagatgctgacggcacgaactggccacattttgcaccccgagtacctgcagcccctgccttccacgccggtcagccccatcgagctcgatgccaagaagagcccgctggcgctgttggcgcaaacatgttcgcagatcgggaagcccgacccctcgccctcctccaaactctcctcggttgcctccaacgggggcggcgcgggcggtgccggcggcggtgctgcgggcgacaaggacaccaaatcgggccccctgaagctgagcgacatcggcgtggaggacaagtcgagtttcaagccgtactccaaacccggctcggataagaaggagccgggaggcggcggtggaggcggtggcggtggcgggggcggcggcgggggtgtttcgtcggagaagtcgggattccgggtaccgagcgccacctgccagccattcacgcccaggacaggcagcccgagctccagcgcctcggcctgctcgccgggaggtatgctgtcctcggccgggggtgccccggagggcaaggacgacaagaaagacaccgacgtgggcggcggtggcaagggcaccgggggcgcctcggccgaagggggacccacggggctggcacacggccggattagctgcggcggcgggattaatgtggatgtgaaccagcatccggatgggggcccgggaggcaaggctctgggctcggac

SEQ ID NO: 1352 - DNA, 143 bp, Artificial
  cDNA Sequence
actgcctcccgccgcctcctgcccgcgccatgacccagccggtgccccggctctccgtgcccgccgcgctggccctgggctcagccgcactgggcgccgccttcgccactggcctcttcctggggaggcggtgccccccatgg

SEQ ID NO: 1353 - DNA, 844 bp, Artificial
  cDNA Sequence
cttgggctgggccctggccctccctgggcttccggcttccctgggccgggtgcggtgggcgttccgaagggccagtcccccaggccacgcccagaaccgcgcccctggggcttgggacccccagggcgaaggtgggtgacctgcatggctggtgccaccctctcctttcacgcagctgaccctggagcagccgcagggggattctatgatgacctgcgagcaggcccagctcttggccaacctggcgcggctcatccaggccaagaaggcgctggacctgggcaccttcacgggctactccgccctggccctggccctggcgctgcccgcggacgggcgcgtggtgacctgcgaggtggacgcgcagcccccggagctgggacggcccctgtggaggcaggccgaggcggagcacaagatcgacctccggctgaagcccgccttggagaccctggacgagctgctggcggcgggcgaggccggcaccttcgacgtggccgtggtggatgcggacaaggagaactgctccgcctactacgagcgctgcctgcagctgctgcgacccggaggcatcctcgccgtcctcagagtcctgtggcgcgggaaggtgctgcaacctccgaaaggggacgtggcggccgagtgtgtgcgaaacctaaacgaacgcatccggcgggacgtcagggtctacatcagcctcctgcccctgggcgatggactcaccttggccttcaagatctagggctggcccctagtgagtgggctcgagggagggttgcctgggaaccccaggaattgaccctgagttttaaattcgaaaataaagtggggctgggacacacga

SEQ ID NO: 1354 - DNA, 633 bp, Artificial
  cDNA Sequence
ggcaccttcacgggctactccgccctggccctggccctggcgctgcccgcggacgggcgcgtggtgacctgcgaggtggacgcgcagcccccggagctgggacggcccctgtggaggcaggtgagcgcccgcgcctagctctgcagccccaggcgggggcgcaacggctgacccgctccctccgcaggccgaggcggagcacaagatcgacctccggctgaagcccgccttggagaccctggacgagctgctggcggcgggcgaggccggcaccttcgacgtggccgtggtggatgcggacaaggagaactgctccgcctactacgagcgctgcctgcagctgctgcgacccggaggcatcctcgccgtcctcagagtcctgtggcgcgggaaggtgctgcaacctccgaaaggggacgtggcggccgagtgtgtgcgaaacctaaacgaacgcatccggcgggacgtcagggtctacatcagcctcctgcccctgggcgatggactcaccttggccttcaagatctagggctggcccctagtgagtgggctcgagggagggttgcctgggaaccccaggaattgaccctgagttttaaattcgaaaataaagtggggctgggacacacgacc

SEQ ID NO: 1355 - DNA, 564 bp, Artificial
  cDNA Sequence
ggcaccttcacgggctactccgccctggccctggccctggcgctgcccgcggacgggcgcgtggtgacctgcgaggtggacgcgcagcccccggagctgggacggcccctgtggaggcaggccgaggcggagcacaagatcgacctccggctgaagcccgccttggagaccctggacgagctgctggcggcgggcgaggccggcaccttcgacgtggccgtggtggatgcggacaaggagaactgctccgcctactacgagcgctgcctgcagctgctgcgacccggaggcatcctcgccgtcctcagagtcctgtggcgcgggaaggtgctgcaacctccgaaaggggacgtggcggccgagtgtgtgcgaaacctaaacgaacgcatccggcgggacgtcagggtctacatcagcctcctgcccctgggcgatggactcaccttggccttcaagatctagggctggcccctagtgagtgggctcgagggagggttgcctgggaaccccaggaattgaccctgagttttaaattcgaaaataaagtggggctgggacacacga

SEQ ID NO: 1356 - DNA, 673 bp, Artificial
  cDNA Sequence
agtataatctccactttatctttttccagaagatagtttttcttcagtccttaaggagtcggctccttatacggactttggtggaggtcatggggcagcactcaaaagtctaagtcaggtagacatgtttggtccttgcaggctttacaagttcgattcttgactacctttctgcgaatggcacaactcatgtagttatgtagcttcacatacagctttggaagcacataggtgcccaaggtacttgtttcagaaatgcttgtccctgggcatacatcatgcacagttcatgcagcaaataggctgcataaggcagtagcccttttagacacaacagttgttccttcttggaaacgaggacctgagagagccatggaaacctctgtcaagttaaaaacattctacacacaatgggattctctgcagatagctgaaaaagaggatgacataatcagagtgtgttttagaaagaataattggctaggtgtggtggctcatacctataatcctagcactctggtagctggaggcgggaggatcacttgaggccaggaacagaatgaaggaaacagcttctaaaaagtagaggaacagaagagagagctactcttcagtatgtgtaccgttttgctctctagatttttctgacaggtaccttttttttttttttttt

SEQ ID NO: 1357 - DNA, 637 bp, Artificial
  cDNA Sequence
ggcgggctggcccatggctgagacctctctcccagagctggggggagaggacaaagccacgccttgccccagcatcctggagctggaggagctcctgcgggcagggaagtcttcttgcagccgtgtggacgaagtttggcccaaccttttcataggagatgcagctggtccttactccctgccatggggctctgccactttgccaccctggcactgatcctgctggtgctgctggaggctctggcccaggcggacacacagaagatggtggaagcccagcgtggggtcggccctagagcctgctactccatctggctcctcctggcgcctacaccccctctcagccactgtcttcagtctccacagaaacagcatcaagtgtgcggagacaggcggctgaaagccagcagcacgaactgcccgtcagagaagtgcacagcctgggccagatactcccacaggatggactcactgcagaagcaggacctccggaggcccaagatccatggggcagtccaggcatctccctaccagccgcccacattggcttcgctgcagcgcttgctgtgggtccgtcaggctgccacactgaaccatatcgatgaggtctggcccagcctcttcctgggagatgcgt

SEQ ID NO: 1358 - DNA, 708 bp, Artificial
  cDNA Sequence
gaggagtgaccacagaggcagaggggtgggcgggctggcccatggctgagacctctctcccagagctggggggagaggacaaagccacgccttgccccagcatcctggagctggaggagctcctgcgggcagggaagtcttcttgcagccgtgtggacgaagtttggcccaaccttttcataggagatgcggccacggcaaacaaccgctttgagctgtggaagctgggcatcacccacgtgctgaacgccgcccacaagggcctctactgtcagggcggccctgacttctacggcagcagtgtgagctacctgggggtgccagcccacgacctccctgattttgacatcagtgcctacttctcctctgcggctgacttcatccaccgtgccctcaacacgcctgggggtcctggtgcactgtgtggtgggcgtgagccgctctgccacgctggtcctggcctacctcatgctgcaccagcggctgtccctgcgccaggcggtgatcaccgtgaggcagcaccgatgggtcttccccaaccgaggcttcctgcaccagctctgcaggctggaccagcaactgcggggtgccggccagagctgaggggccagagctggtccttactccctgccatggggctctgccactttgccaccctggcactgatcctgctggtgctgctggaggctctggcccaggcggacacac

SEQ ID NO: 1359 - DNA, 340 bp, Artificial
  cDNA Sequence
tccagctgggaatcacccacgttgtgaatgccgctgcaggcaagccgcgtgctggtacactgtgccatgggggtaagccgctctgccacacttgtcctggccttcctcatgatctgtgagaacatgacgctggtagaggccatccagacggtgcaggcccaccgcaatatctgccctaactcaggcttcctccggcagctccaggttctggacaaccgactggggcgggagacggggcggttctgatctggcaggcagccaggatccctgacccttggcccaaccccaccagcctggccctgggaacagcaggctctgctgtttctagtgaccctgagat

SEQ ID NO: 1360 - DNA, 502 bp, Artificial
  cDNA Sequence
gtctactttctgcctgttgctcgatacatccgagctgccctcagtgttccccaaggccgcgtgctggtacactgtgccatgggggtaagccgctctgccacacttgtcctggccttcctcatgatctgtgagaacatgacgctggtagaggccatccagacggtgcaggcccaccgcaatatctgccctaactcaggcttcctccggcagctccaggttctggacaaccgactggggcgggagacggggcggttctgatctggcaggcagccaggatccctgacccttggcccaaccccaccagcctggccctgggaacagcaggctctgctgtttctagtgaccctgagatgtaaacagcaagtgggggctgaggcagaggcagggatagctgggtggtgacctcttagcgggtggatttccctgacccaattcagagattctttatgcaaaagtgagttcagtccatctctataataaaatattcatcgtcataaagaca

SEQ ID NO: 1361 - DNA, 305 bp, Artificial
  cDNA Sequence
ctcttcttcctcctcttcatcctcttcctcttcttcctcctcttcttcctcctcctcgtcctcctcctcctcttcttcttcactgctctctttagacagctccagcagctgccctcgctcccctgtgactggccggctctccggggaatgcaaatatttatttttcgattgtacttttgcaggtgattgcctactgttagctctagttgacaggatttcttgttcctccttctcccagcagctagcttcatcttaagcttttgaacgcattttacagcattactgtgaaggttccttggcaaagg

SEQ ID NO: 1362 - DNA, 477 bp, Artificial
  cDNA Sequence
cagacattgcaatgcagacacataagattagaagcaaaacgcaggaggctggagttacctttcatggaagggtaagcaggaagcaactacaagatcatcatttcaaaacaatatgaaagcagaatgggaaatgccatggcatgctccctcttttcaggcaatatggacactttggggaagttatgaagcgtctcccattcccgcttgaggtactcaatagagcccacaaacacaatgtgcttgagctcatggtaatgaaagttgctggcacggagcggcatcaccaggttccggaggccgatcagggctgagctgacgtcgccaaagatgcagaccacgacatggccactcaggacggtcatggcagcttcacttcgagtctacaacagggagaagtgggtaagagtcagagagaagactgcatagggctgttgtaaggagtgaaataaatcatttgtgcaaagaatcaagcaaata

SEQ ID NO: 1363 - DNA, 621 bp, Artificial
  cDNA Sequence
tcacaatgtattgacctctataatgttttaataaaaagagacactggacttggccagttagaaagtttcctggtttagtttcatagtatgatgacagcagcatggaaggaaccccaaagctaccaggaaccattttgcacagctctggaaagaagtccagcagagtgaatgacatgaacaatagctggaacattttgctaagtgtgtggaagggaagagtgacagcaggaaaggaggggagcttcattctatcagtattatcaggaaattgatttaatatgcttccaagtctctttaaatagagcttcaagtttgaaagggactgaagatatggcttagaggaatccaaaacagatgccaagaaagaagtgcccatgtcccacgcccaccaagacccctctcatcaggaagggatacctagcacatcacatcagaagacatggcatctaatgacaagcgctttgggtatctacccctcagcaccacgtttcagaagtagtcaagaggtcatttttccaaagtattagggcaagctcattttttgttttccctgttcccaagaagtttaatgctaatcaaagcagaatgcctaatcagtccaagatgttctgtcaacttgaa

SEQ ID NO: 1364 - DNA, 290 bp, Artificial
  cDNA Sequence
agcggctttgaataaagactgaagaacacgaacccatgcaagaggcacaaaaccatctgcttagtggtcatgtggcagcagacagtatctcagaagtcctcgcagcatatgacttcactgatgaagatggatcacacttgagcagggattcttgatctctgcaaaacagctcatacacaacaggaacaatctcacagataagaaaaactccagaagttggtctcgggctatgaaaatttctgccacaatatgatttatatgaaaataaataaagtgggtctactacttta

SEQ ID NO: 1365 - DNA, 265 bp, Artificial
  cDNA Sequence
caacgccttgaagaggtgtgaggaggtggccaaggagactgacttctaccacacactccacagccggctcctgagtgaccagactcggctgaaggatgacgtggacatgctgaggcgggagaatgggcagctgctgcgggagcgaaacctgctgcagcagtcatgggaggacatgaagcggctccacgaggaggaccagaaggagatcggtgacctccgtgcccagcagcagcaggtgttgaagcacaacgggtcatccgagatt

SEQ ID NO: 1366 - DNA, 1537 bp, Artificial
  cDNA Sequence
gagatggaggcgctgcggcagatcaaagacacggtgacaatggatgctgggagagccaacaaggaggttgaaatccttcgaaagcagtgcaaggctctgtgccaggagctgaaggaagccctccaggaggcggatgtggccaagtgccggcgggactgggccttccaggagcgagacaagattgtagcagagcgtgacagcatccggacactgtgtgacaacctgaggcgggagcgggaccgtgcggtgagcgagctggctgaggccctgcgcagcctggatgacacccgcaagcagaagaatgatgtcagccgcgagctgaaggagctcaaggaacagatggaatcccagttggaaaaggaggcccggttccgacagctgatggcccacagctcccacgactcggccattgacacggattccatggagtgggaaacggaagttgtagagttcgagagggagacggaggatattgacttgaaggcactggggtttgatatggcagaaggtgtgaatgagccttgtttcccgggggactgtggcatatttgtcactaaagtggacaaaggaagcattgctgatggccgcttaagggtcaatgactggctgctgagaatcaacgatgtggacctcatcaacaaggacaagaagcaggccatcaaggcgctcctcaatggggagggggccatcaacatggtcgtgcggcggaggaagtccctgggtgggaaggtggtcacgccgctgcacatcaacctcagtggacagaaagacagtggcatcagtctggagaatggagtgtatgctgccgctgtgctgcctggaagccctgccgctaaagaagggtcccttgctgtgggagacaggatcgttgcggtaaatcaatggcattgcactggacaacaagtctctgaatgaatgtgaatctctgctgcgcagctgccaggactccctgaccctgtccctcctgaaggtattccctcagagctcctcgtggagtggccagaacatttttgaaaatatcaaagactctgataagatgctgagttttcgagcccatggcccggaggtccaggctcataacaaacggaacttgatacagcacaataactccacgcagacagacatcttctacacggacaggctggaagacaggaaggagccaggccccccaggaggcagcagctcctttctgcataagccattccctgggggacccttgcaggtctgcccccaggcctgtcccagtgcctctgagcgtagcctgagctccttccgctcagatgcctctggggaccgtggctttgggctggtggacgtgcgtggccggcggccactgctgccctttgagaccgaggtgggcccctgtggggttggggaggcctccctggacaaggcagactctgaaggctccaacagcggcgggacctggcccaaggccatgctcagctccacggcagtgcctgagaagctctctgtttataaaaagccaaagcaaagaaagtccatctttgaccctaacactttcaaacgcccccag

SEQ ID NO: 1367 - DNA, 1537 bp, Artificial; identical to SEQ ID NO: 1366
  cDNA Sequence

SEQ ID NO: 1368 - DNA, 1210 bp, Artificial
  cDNA Sequence
cacagggaacagatggaatcccagttggaaaaggaggcccggttccgacagctgatggcccacagctcccacgactcggccattgacacggattccatggagtgggaaacggaagttgtagagttcgagagggagacggaggatattgacttgaaggcactggggtttgatatggcagaaggtgtgaatgagccttgtttcccgggggactgtggcatatttgtcactaaagtggacaaaggaagcattgctgatggccgcttaagggtcaatgactggctgctgagaatcaacgatgtggacctcatcaacaaggacaagaagcaggccatcaaggcgctcctcaatggggagggggccatcaacatggtcgtgcggcggaggaagtccctgggtgggaaggtggtcacgccgctgcacatcaacctcagtggacagaaagacagtggcatcagtctggagaatggagtgtatgctgccgctgtgctgcctggaagccctgccgctaaagaagggtcccttgctgtgggagacaggatcgttgcggtaaatcaatggcattgcactggacaacaagtctctgaatgaatgtgaatctctgctgcgcagctgccaggactccctgaccctgtccctcctgaaggtattccctcagagctcctcgtggagtggccagaacatttttgaaaatatcaaagactctgataagatgctgagttttcgagcccatggcccggaggtccaggctcataacaaacggaacttgatacagcacaataactccacgcagacagacatcttctacacggacaggctggaagacaggaaggagccaggccccccaggaggcagcagctcctttctgcataagccattccctgggggacccttgcaggtctgcccccaggcctgtcccagtgcctctgagcgtagcctgagctccttccgctcagatgcctctggggaccgtggctttgggctggtggacgtgcgtggccggcggccactgctgccctttgagaccgaggtgggcccctgtggggttggggaggcctccctggacaaggcagactctgaaggctccaacagcggcgggacctggcccaaggccatgctcagctccacggcagtgcctgagaagctctctgtttataaaaagccaaagcaaagaaagtccatctttgaccctaacactttcaaacgcccccag

SEQ ID NO: 1369 - DNA, 1210 bp, Artificial; identical to SEQ ID NO: 1368
  cDNA Sequence

SEQ ID NO: 1370 - DNA, 716 bp, Artificial
  cDNA Sequence
aggcttgtgtaagtcctgggctggctgggtcctttggggcgtcttttctcaccaagcccatttctaggcactgttccccggagtttgacccccagcaccactgtgagctccatcctgcggaaccccatctacactgtgcgcagtcacagggtcggcccctgcagctctccacctgcggcccgagatgctggcccccagggtttgcatcccagtgtccagcaccagggacgcctgagcctggacctgagccacaggacctgcagcgactactccgagatgagagccacccatgggtccaactcactgccctccagcgcccgcctgggttcttcgagtaacttgcagttcaaggcggaacgcattaaaatcccatcaacaccaagatatccgcggagtgtcgtgggctccgagagaggttcagtgtcacattctgaatgcagcactcctccacagtcacccctgaacatcgacaccctgtcctcttgtagccagtcccagacctcagcctccacattgcccagaatcgctgtcaaccccgcgtccctcggggagcggagaaaggacagttgaggaaactggatccagacgttggagtgacagacctgtggccacgtggttagtggctggcaccgggactcattcttaccctttgctttttccctctcattcgaagctttctgttgtgaaataaaatatacacaggaagaaagcataaa

SEQ ID NO: 1371 - DNA, 319 bp, Artificial
  cDNA Sequence
ctcagagccgctgggcatctccatcgtgagtggagagaagggcggcatctacgtctccaaggtgaccgtggggagcatcgctcaccaggctggcctcgagtatggggatcagttactggagttcaacggcataaacctgcggagcgccacggagcagcaggcgcggctcatcatcgggcagcagtgtgataccatcaccatcctggcccagtacaacccccacgtgcaccagctcagcagccactcccggtccagctcacacctggaccctgccggtacccactccactctccagggcagtggcaccaccaccccggag

SEQ ID NO: 1372 - DNA, 380 bp, Artificial
  cDNA Sequence
gaggatgacagtcctgccaagggtcctgacggcctcgtgccaggggacctcatcctggagtatggcagcctggacgtgcggaacaagacagtggaggaagtctatgtggagatgctgaagcccagggatggcgtccgcctgaaggtgcagtaccgccctgaggagttcacgaaggccaagggcctgcctggtgacagcttctacatcagggccctgtacgaccggctggcagatgtggagcaagagttgagctttaagaaggacgacatcctctacgtggatgacaccttaccccagggcacgttcgggtcctggatggcttggcagctggacgagaatgcccagaagatccagcgcgggcagattcccagcaaatatgt

SEQ ID NO: 1373 - DNA, 287 bp, Artificial
  cDNA Sequence
cctggcagtatggcagcctggacgtgcggaacaagacagtggaggaagtctatgtggagatgctgaagcccagggatggcgtccgcctgaaggtgcagtaccgccctgaggagttcacgaaggccaagggcctgcctggtgacagcttctacatcagggccctgtacgaccggctggcagatgtggagcaagagttgagctttaagaaggacgacatcctctacgtggatgacaccttaccccagggcacgttcgggtcctggatggcttggcagctggacgagaat

SEQ ID NO: 1374 - DNA, 1007 bp, Artificial
  cDNA Sequence
gtcagcggctgcacgccggtccttttttcggaggaaacacaagcacaaacgcagcgggtccaaggacgggaaagacctgctcgccttggatgccttttccagtgactccattccactctttgaaggcaaattcggtgagcctggcctatcagcgggtccagaaggtggactgcaccgctctgaggcctgtcctgattctggggcctttgctggacgtggtgaaggagatgctggtgaatgaggctcctggcaagttctgcagatgtccccttgaggtgatgaaggcctcccagcaggccattgagcggggtgtcaaagattgcctgtttgtcgactataagcggagaagcggccatttcgatgtgaccactgtggcgtcaataaaggagatcacagaaaagaaccgacactgcctcctggacattgctccgcacgctattgagcggctccaccacatgcacatctaccccattgtcatcttcatccactacaagagcgccaagcacatcaaggagcagagagaccccatctacctgagggacaaggtgactcagaggcattccaaagagcagtttgaggcggcgcagaagcttgagcaggagtacagcaggtacttcacaggggtcatccagggaggagccctgtcaagcatttgcactcagatcttggcaatggtcaatcaagaacaaaataaagtcctgtggattccagcctgcccgctctaggagaatgctgtgctgtggatgactgcagctggccgcctgaggggacaccagactcagctcttttctagcgactgaaagtagaagtctgtccgtctatgaacatgcgggggaaggatccggaaccaggacccagaagcacctcctttgtagacagagggccacggctgcgtgcgatccaggcccaggcccacacactctgcccgtgtcacacgtgtgctttaacacaaaacagataacactaaagacgggttcagcacccacctttctttagccagctgatca

SEQ ID NO: 1375 - DNA, 854 bp, Artificial
  cDNA Sequence
gtcagcggctgcacgccggtccttttttcggaggaaacacaagcacaaacgcagcgggtccaaggacgggaaagacctgctcgccttggatgccttttccagtgactccattccactctttgaaggcaaattcggtgagcctggcctatcagcgggtccagaaggtggactgcaccgctctgaggcctgtcctgattctggggcctttgctggacgtggtgaaggagatgctggtgaatgaggctcctggcaagttctgcagatgtccccttgaggtgatgaaggcctcccagcaggccattgagcggggtgtcaaagattgcctgtttgtcgactataagcggagaagcggccatttcgatgtgaccactgtggcgtcaataaaggagatcacagaaaagaaccgacactgcctcctggacattgctccgcacgctattgagcggctccaccacatgcacatctaccccattgtcatcttcatccactacaagagcgccaagcacatcaaggagcagagagaccccatctacctgagggacaaggtgactcagaggcattccaaagagcagtttgaggcggcgcagaagcttgagcaggagtacagcaggtacttcacaggggtcatccagggaggagccctgtcaagcatttgcactcagatcttggcaatggtcaatcaagaacaaaataaagtcctgtggattccagcctgcccgctctaggagaatgctgtgctgtggatgactgcagctggccgcctgaggggacaccagactcagctcttttctagcgactgaaagtagaagtctgtccgtctatgaacatgcgggggaaggatccggaaccaggac

SEQ ID NO: 1376 - DNA, 980 bp, Artificial
  cDNA Sequence
gtcagcggctgcacgccggtccttttttcggaggaaacacaagcacaaacgcagcgggtccaaggacgggaaagacctgctcgccttggatgccttttccagtgactccattccactctttgaaggcaaattcggtgagcctggcctatcagcgggtccagaaggtggactgcaccgctctgaggcctgtcctgattctggggcctttgctggacgtggtgaaggagatgctggtgaatgaggctcctggcaagttctgcagatgtccccttgaggtgatgaaggcctcccagcaggccattgagcggggtgtcaaagattgcctgtttgtcgactataagcggagaagcggccatttcgatgtgaccactgtggcgtcaataaaggagatcacagaaaagaaccgacactgcctcctggacattgctccgcacgctattgagcggctccaccacatgcacatctaccccattgtcatcttcatccactacaagagcgccaagcacatcaaggagcagagagaccccatctacctgagggacaaggtgactcagaggcattccaaagagcagtttgaggcggcgcagaagcttgagcaggagtacagcaggtacttcacaggtaggtgtgcgtgggcctggagtggggagcaggcagcagggaaggaagcagaggcttcctaaggctgttttcttagccgtggagaagcccgcactttctacatgctcccaagtgctgtcatgagcacgttcctgacaagtcaggtgttcagattgcagtccctggccaacgtcaggattcttacaggttgaatgttaagctcaccgatcttggcctcaggtcctgcctggcttgcctgctcattttcacacgtgcagtggtgggtctgtctcatagcacaggtgcagtttagtgcagccacagtgtccccaggcagggcggggactggagcagcccccagtgtgccagcagtgtgggca

SEQ ID NO: 1377 - DNA, 527 bp, Artificial
  cDNA Sequence
gtcagcggctgcacgccggtccttttttcggaggaaacacaagcacaaacgcagcgggtccaaggacgggaaagacctgctcgccttggatgccttttccagtgactccattccactctttgaaggcaaattcggtgagcctggcctatcagcgggtccagaaggtggactgcaccgctctgaggcctgtcctgattctggggcctttgctggacgtggtgaaggagatgctggtgaatgaggctcctggcaagttctgcagatgtccccttgaggtgatgaaggcctcccagcaggccattgagcggggtgtcaaagattgcctgtttgtcgactataagcggagaagcggccatttcgatgtgaccactgtggcgtcaataaaggagatcacagaaaagaaccgacactgcctcctggacattgctccgcacgctattgagcggctccaccacatgcacatctaccccattgtcatcttcatccactacaagagcgccaagcacatcaagtaggtaactggcccc

SEQ ID NO: 1378 - DNA, 346 bp, Artificial
  cDNA Sequence
cagggagcagagagaccccatctacctgagggacaaggtgactcagaggcattccaaagagcagtttgaggcggcgcagaagcttgagcaggagtacagcaggtacttcacaggggtcatccagggaggagccctgtcaagcatttgcactcagatcttggcaatggtcaatcaagaacaaaataaagtcctgtggattccagcctgcccgctctaggagaatgctgtgctgtggatgactgcagctggccgcctgaggggacaccagactcagctcttttctagcgactgaaagtagaagtctgtccgtctatgaacatgcgggggaaggatccggaaccaggac

SEQ ID NO: 1379 - DNA, 783 bp, Artificial
  cDNA Sequence
aggagctcccccgagcccctgcgccggctgcccgttgctagctatggcaaatggtggcggcggcggcggcggcagcagcggcggcggcggcggcggcggaggcagcagtcttagaatgagtagcaatatccacgcgaaccatctcagcctagacgcgtcctcctcctcctcctcctcctcttcctcttcttcttcttcctcctcctcttcctcctcgtcctcggtccacgagcccaagatggatgcgctcatcatcccggtgaccatggaggtgccgtgcgacagccggggccaacgcatgtggtgggctttcctggcctcctccatggtgactttcttcgggggcctcttcatcatcttgctctggcggacgctcaagtacctgtggaccgtgtgctgccactgcgggggcaagacgaaggaggcccagaagattaacaatggctcaagccaggcggatggcactctcaaaccagtggatgaaaaagaggaggcagtggccgccgaggtcggctggatgacctccgtgaaggactgggcgggggtgatgatatccgcccagacactgactggcagagtcctggttgtcttagtctttgctctcagcatcggtgcacttgtaatatacttcatagattcatcaaacccaatagaatcctgccagaatttctacaaagatttcacattacagatcgacatggctttcaacgtgttcttccttctctacttcggcttgcggtttattgcagccaacgataaattgtggttctggctggaagtgaa

SEQ ID NO: 1380 - DNA, 544 bp, Artificial
  cDNA Sequence
ctcctcctcttcctcctcgtcctcggtccacgagcccaagatggatgcgctcatcatcccggtgaccatggaggtgccgtgcgacagccggggccaacgcatgtggtgggctttcctggcctcctccatggtgactttcttcgggggcctcttcatcatcttgctctggcggacgctcaagtacctgtggaccgtgtgctgccactgcgggggcaagacgaaggccacccactttgggtccccggaaatgccaccagcagcgcggagctggagcgggagtccgcctgaggccgcggttttacgcggagcgtcttccctggcgctcgaggtggctagatgtcgtcggctttagctattcctggtgcagacgcccaccggcactgaggctggcgacaccttcgatgtatggttgctaggctcactgcctggtctgtagtcgtgtccctagagatgtcttcccttccccacagccactggctggagtgggggacccgacactgatagaaaactgcagaataaaaaagaaagaactggaaaaaagaga

SEQ ID NO: 1381 - DNA, 569 bp, Artificial
  cDNA Sequence
tcctcggtccacgagcccaagatggatgcgctcatcatcccggtgaccatggaggtgccgtgcgacagccggggccaacgcatgtggtgggctttcctggcctcctccatggtgactttcttcgggggcctcttcatcatcttgctctggcggacgctcaagtacctgtggaccgtgtgctgccactgcgggggcaagacgaaggtgctctagtggaacataccccaagttcttcggcctctgttcctttgcccccaggccacccactttgggtccccggaaatgccaccagcagcgcggagctggagcgggagtccgcctgaggccgcggttttacgcggagcgtcttccctggcgctcgaggtggctagatgtcgtcggctttagctattcctggtgcagacgcccaccggcactgaggctggcgacaccttcgatgtatggttgctaggctcactgcctggtctgtagtcgtgtccctagagatgtcttcccttccccacagccactggctggagtgggggacccgacactgatagaaaactgcagaataaaaaagaaagaactgg

SEQ ID NO: 1382 - DNA, 428 bp, Artificial
  cDNA Sequence
cccaggcagatatggcctctgatatgcttggcctttgagaccatgctctttcctgttctcctgaagaaccagtagctatgagcacagaaattactacctacttgaaactggacttgttttctgcgctcctatgaaactgaacagtggagggttgctcgtgaaggatctgggacatgtttcatatggagcacaagaaaaggacgtcgaacatgcaacggtctgcatccagaggaagaaacaaagatatgaagaggttaaataacttgccaaggccaatcagctagcgagcatcagagctaggattcaagcccaggcagaccagctccagagcctgagctagactcaatgtcagtgatgatgtcgttgaccttcggggacagattctgcttttgccctggtgggtctgggttgagatgcattgcatttga

SEQ ID NO: 1383 - DNA, 617 bp, Artificial
  cDNA Sequence
tcacggtgccccccgtgtttgtgtctgtgtacttaaacagaagttggcttggtttgagatttttaagagctctgagactgatacagttttcagaaattttgcagtttctgaatattcttaaaacaagtaattccatcaagctggtgaatctgctctccatatttatcagcacgtggctgactgcagccgggttcatccatttggtggagaattcaggggacccatgggaaaatttccaaaacaaccaggctctcacctactgggaatgtgtctatttactcatggtcacaatgtccaccgttggttatggggatgtttatgcaaaaaccacacttgggcgcctcttcatggtcttcttcatcctcgggggactggcacattgtggtctgcggacacatcactctggagagtgtttccaacttcctgaaggactttctgcacaaggaccgggatgacgtcaatgtggagatcgtttttcttcacaacatctcccccaacctggagcttgaagctctgttcaaacgacattttactcaggtggaattttatcagggttccgtcctcaatccacatgatcttgcaagagtcaagatagagtcagcagatgcatgcctgat

SEQ ID NO: 1384 - DNA, 513 bp, Artificial
  cDNA Sequence
gccagctacgtccctgaaatcatagagttaataggaaaccgcaagaaatacgggggctcctatagtgcggttagtggaagaaagcacattgtggtctgcggacacatcactctggagagtgtttccaacttcctgaaggactttctgcacaaggaccgggatgacgtcaatgtggagatcgtttttcttcacaacatctcccccaacctggagcttgaagctctgttcaaacgacattttactcaggtggaattttatcagggttccgtcctcaatccacatgatcttgcaagagtcaagatagagtcagcagatgcatgcctgatccttgccaacaagtactgcgctgacccggatgcggaggatgcctcgaatatcatgagagtaatctccataaagaactaccatccgaagataagaatcatcactcaaatgctgcagtatcacaacaaggcccatctgctaaacatcccgagctggaattggaaagaaggtgatgacgcaatctgcctc

SEQ ID NO: 1385 - DNA, 777 bp, Artificial
  cDNA Sequence
tgaggaagacacatggcagaaatactacttggaaggagtctcaaatgaaatgtacacagaatatctctccagtgccttcgtgggtctgtccttccctactgtttgtgagctgtgttttgtgaagctcaagctcctaatgatagccattgagtacaagtctgccaaccgagagagccgtatattaattaatcctggaaaccatcttaagatccaagaaggtactttaggatttttcatcgcaagtgatgccaaagaagttaaaagggcatttttttactgcaaggcctgtcatgatgacatcacagatcccaaaagaataaaaaaatgtggctgcaaacggcgacagtggccggttctcaggatactcatcctgacagcttctaccaccaggcagtgaatgcttcctcttacctccatggtggagggcagatgtggccagttagctcctcatcttccatcctcctccactatctcaggcgacagatgccagggccagcccgccttccacttgagctttcttgtcaaggctctgccttgagcccaaatcctgacctttactgtatgaaataaagtactgatgaacaagcagaggtttgaattagagcaggcttggagcaaatgtcaagtccgtctctgcctctttcctccacctgcaccaggagcctcgattagacccagtgtggagtttgcagcgccttaggctttatgggtctggggagacataacttattaacaaagagttattaaatttttatcaattttacaacacaatgtaaa

SEQ ID NO: 1386 - DNA, 605 bp, Artificial
  cDNA Sequence
aaatactacttggaaggagtctcaaatgaaatgtacacagaatatctctccagtgccttcgtgggtctgtccttccctactgtttgtgagctgtgttttgtgaagctcaagctcctaatgatagccattgagtacaagtctgccaaccgagagagccgtatattaattaatcctggaaaccatcttaagatccaagaaggtactttaggatttttcatcgcaagtgatgccaaagaagttaaaagacctcctcaactctgtctccctttggctgcccagaaaaggtgctttcagagtgacaagcttgatatttttatttgactgagaaacgacatacttctgccccctcaaatatatatttgaccagactgtgggaattttggtgttgtatttaacttccccaccaagggcccagggctcattgcccacatgtccccacgagtagcatcaaaggctgttctcaaaaatgaaagacgaatgagcagacacagtgtgtcacatcagcaacttttttcccagtttctttgtaaatggaagtttatgaaaaggagcactaactcaaatcacagaatcctgtgtttgaaataaatggtcttgcaacaaac

SEQ ID NO: 1387 - DNA, 709 bp, Artificial
  cDNA Sequence
agaaggtactttaggatttttcatcgcaagtgatgccaaagaagttaaaagggcatttttttactgcaaggcctgtcatgatgacatcacagatcccaaaagaataaaaaaatgtggctgcaaacggctcaaggttgcagctagatcacgctattccaaagatccatttgagttcaagaaggagactcccaattctcggcttgtgaccgagccaggtgaaggaagactgggacccattcccatttttaataactaccctgcagccctcaacattctactttaccatgctgagctcagttgaagaagagcgatgcactactgtggatttcagcttgcacttagcttgttgggcagcaaaataccaaaagggaaaaccgtaaaaaacgattaataataattaaaacgacctcacccccaaactggcagcttgtgcaagacttcagtcggaagccctgttagctagatgcctttgtgttcaaaccactttgcatgactcttattctgagtgactccagtgtgaatatgacattactaatgacctgctaagtgtgtacagatgtgggtttctccagatgtggtgattaataacataatggagatagcggttgactcatgtttatgagttgtttgccttttattacgtttctgagtttatttgctttgaactgttttttaactccagccaataaactcacctttaaatcttaaa

SEQ ID NO: 1388 - DNA, 508 bp, Artificial
  cDNA Sequence
aaggcctgtcatgatgacatcacagatcccaaaagaataaaaaaatgtggctgcaaacggcccaagatgtccatctacaagagaatgagacgggcatgttgttttgattgcggacgttctgagcgtgactgctcatgcatgtcaggccgtgtgcgtggtaacgtggacacccttgagagagccttcccactttcttctgtctctgttaatgattgctccaccagtttccgtgcctttgaagatgagcagccgtcaacactatcaccaaaaaaaaagcaacggaatggaggcatgcggaactcacccaacacctcgcctaagctgatgaggcatgaccccttgttaattcctggcaatgatcagattgacaacatggactccaatgtgaagaagtacgactctactgggatgtttcactggtgtgcacccaaggagatagagaaagtcatcctgactcgaagtgaagctgccatgaccgtcctgagtggccatgtcgtggtctgcatct

SEQ ID NO: 1389 - DNA, 468 bp, Artificial
  cDNA Sequence
gatgccgctccgtgccagcaactttcattaccatgagctcaagcacattgtgtttgtgggctctattgagtacctcaagcgggaatgggagacgcttcataacttccccaaagtgtccatattgcctggtacgccattaagtcgggctgatttaagggctgtcaacatcaacctctgtgacatgtgcgttatcctgtcagccaatcagaataatattgatgatacttcgctgcaggacaaggaatgcatcttggcgtcactcaacatcaaatctatgcagtttgatgacagcatcggagtcttgcaggctaattcccaagggttcacacctccaggaatggatagatcctctccagataacagcccagtgcacgggatgttacgtcaaccatccatcacaactggggtcaacatccccatcatcactgaactagtgaacgatactaatgttcagtttttggaccaaga

SEQ ID NO: 1390 - DNA, 322 bp, Artificial
  cDNA Sequence
gacatgtgcgttatcctgtcagccaatcagaataatattgatgatacttcgctgcaggacaaggaatgcatcttggcgtcactcaacatcaaatctatgcagtttgatgacagcatcggagtcttgcaggctaattcccaagggttcacacctccaggaatggatagatcctctccagataacagcccagtgcacgggatgttacgtcaaccatccatcacaactggggtcaacatccccatcatcactgaactagctaaaccgggcaagttgcctttggtatcagtcaatcaggaaaaaaacagtgggacgcacattctaa

SEQ ID NO: 1391 - DNA, 764 bp, Artificial
  cDNA Sequence
acagtgcggagaccgcagccccggagcccgggccagggtccacctgtccccgcagcgccggctcgcgccctcctgccgcagccaccgagccgccgtctagcgccccgacctcgccaccatgagagccctgctggcgcgcctgcttctctgcgtcctggtcgtgagcgactccaaaggcagcaatgaacttcatcaagttccatcgaactgtgactgtctaaatggaggaacatgtgtgtccaacaagtacttctccaacattcactggtgcaactgcccaaagaaattcggagggcagcactgtgaaatagataagtcaaaaacctgctatgaggggaatggtcacttttaccgaggaaaggccagcactgacaccatgggccggccctgcctgccctggaactctgccactgtccttcagcaaacgtaccatgcccacagatctgatgctcttcagctgggcctggggaaacataattactgcaggaacccagacaaccggaggcgaccctggtgctatgtgcaggtgggcctaaagctgcttgtccaagagtgcatggtgcatgactgcgcagatgggatggatgaagagtgttgtttagggagcgatgggctgcaaaggtaaatagatggtaggggctataggtggagtaaaggctcagatttgcatggaagagaataagggccttccctggtagagatactttatggttcccctctctggcagactcccagtggacagataaatcttgatgcaaacgcct

SEQ ID NO: 1392 - DNA, 2178 bp, Artificial
  cDNA Sequence
cttccagggcagcaatgaacttcatcaagttccatcgaactgtgactgtctaaatggaggaacatgtgtgtccaacaagtacttctccaacattcactggtgcaactgcccaaagaaattcggagggcagcactgtgaaatagataagtcaaaaacctgctatgaggggaatggtcacttttaccgaggaaaggccagcactgacaccatgggccggccctgcctgccctggaactctgccactgtccttcagcaaacgtaccatgcccacagatctgatgctcttcagctgggcctggggaaacataattactgcaggaacccagacaaccggaggcgaccctggtgctatgtgcaggtgggcctaaagctgcttgtccaagagtgcatggtgcatgactgcgcagatggaaaaaagccctcctctcctccagaagaattaaaatttcagtgtggccaaaagactctgaggccccgctttaagattattgggggagaattcaccaccatcgagaaccagccctggtttgcggccatctacaggaggcaccgggggggctctgtcacctacgtgtgtggaggcagcctcatcagcccttgctgggtgatcagcgccacacactgcttcattgattacccaaagaaggaggactacatcgtctacctgggtcgctcaaggcttaactccaacacgcaaggggagatgaagtttgaggtggaaaacctcatcctacacaaggactacagcgctgacacgcttgctcaccacaacgacattgccttgctgaagatccgttccaaggagggcaggtgtgcgcagccatcccggactatacagaccatctgcctgccctcgatgtataacgatccccagtttggcacaagctgtgagatcactggctttggaaaagagaattctaccgactatctctatccggagcagctgaaaatgactgttgtgaagctgatttcccaccgggagtgtcagcagccccactactacggctctgaagtcaccaccaaaatgctgtgtgctgctgacccacagtggaaaacagattcctgccagggagactcagggggacccctcgtctgttccctccaaggccgcatgactttgactggaattgtgagctggggccgtggatgtgccctgaaggacaagccaggcgtctacacgagagtctcacacttcttaccctggatccgcagtcacaccaaggaagagaatggcctggccctctgagggtccccagggaggaaacgggcaccacccgctttcttgctggttgtcatttttgcagtagagtcatctccatcagctgtaagaagagactgggaagataggctctgcacagatggatttgcctgtgccacccaccagggcgaacgacaatagctttaccctcaggcataggcctgggtgctggctgcccagacccctctggccaggatggaggggtggtcctgactcaacatgttactgaccagcaacttgtctttttctggactgaagcctgcaggagttaaaaagggcagggcatctcctgtgcatgggtgaagggagagccagctcccccgacggtgggcatttgtgaggcccatggttgagaaatgaataatttcccaattaggaagtgtaacagctgaggtctcttgagggagcttagccaatgtgggagcagcggtttggggagcagagacactaacgacttcagggcagggctctgatattccatgaatgtatcaggaaatatatatgtgtgtgtatgtttgcacacttgtgtgtgggctgtgagtgtaagtgtgagtaagagctggtgtctgattgttaagtctaaatatttccttaaactgtgtggactgtgatgccacacagagtggtctttctggagaggttataggtcactcctggggcctcttgggtcccccacgtgacagtgcctgggaatgtattattctgcagcatgacctgtgaccagcactgtctcagtttcactttcacatagatgtccctttcttggccagttatcccttccttttagcctagttcatccaatcctcactgggtggggtgaggaccactcctgtacactgaatatttatatttcactatttttatttatatttttgtaattttaaataaaagtgatcaataaaatgtgatttttctgatga

SEQ ID NO: 1393 - DNA, 1074 bp, Artificial
  cDNA Sequence
cttccagggcagcaatgaacttcatcaagttccatcgaactgtgactgtctaaatggaggaacatgtgtgtccaacaagtacttctccaacattcactggtgcaactgcccaaagaaattcggagggcagcactgtgaaatagataagtcaaaaacctgctatgaggggaatggtcacttttaccgaggaaaggccagcactgacaccatgggccggccctgcctgccctggaactctgccactgtccttcagcaaacgtaccatgcccacagatctgatgctcttcagctgggcctggggaaacataattactgcaggaacccagacaaccggaggcgaccctggtgctatgtgcaggtgggcctaaagctgcttgtccaagagtgcatggtgcatgactgcgcagatggaaaaaagccctcctctcctccagaagaattaaaatttcagtgtggccaaaagactctgaggccccgctttaagattattgggggagaattcaccaccatcgagaaccagccctggtttgcggccatctacaggaggcaccgggggggctctgtcacctacgtgtgtggaggcagcctcatcagcccttgctgggtgatcagcgccacacactgcttcattgattacccaaagaaggaggactacatcgtctacctgggtcgctcaaggcttaactccaacacgcaaggggagatgaagtttgaggtggaaaacctcatcctacacaaggactacagcgctgacacgcttgctcaccacaacgacattgccttgctgaagatccgttccaaggagggcaggtgtgcgcagccatcccggactatacagaccatctgcctgccctcgatgtataacgatccccagtttggcacaagctgtgagatcactggctttggaaaagagaattctaccgactatctctatccggagcagctgaaaatgactgttgtgaagctgatttcccaccgggagtgtcagcagccccactactacggctctgaagtcaccaccaaaatgctgtgtgctgctgacccacagtggaaaacagattcctgccaggtgag

SEQ ID NO: 1394 - DNA, 1863 bp, Artificial
  cDNA Sequence
caggaacccagacaaccggaggcgaccctggtgctatgtgcaggtgggcctaaagctgcttgtccaagagtgcatggtgcatgactgcgcagatggaaaaaagccctcctctcctccagaagaattaaaatttcagtgtggccaaaagactctgaggccccgctttaagattattgggggagaattcaccaccatcgagaaccagccctggtttgcggccatctacaggaggcaccgggggggctctgtcacctacgtgtgtggaggcagcctcatcagcccttgctgggtgatcagcgccacacactgcttcattgattacccaaagaaggaggactacatcgtctacctgggtcgctcaaggcttaactccaacacgcaaggggagatgaagtttgaggtggaaaacctcatcctacacaaggactacagcgctgacacgcttgctcaccacaacgacattgccttgctgaagatccgttccaaggagggcaggtgtgcgcagccatcccggactatacagaccatctgcctgccctcgatgtataacgatccccagtttggcacaagctgtgagatcactggctttggaaaagagaattctaccgactatctctatccggagcagctgaaaatgactgttgtgaagctgatttcccaccgggagtgtcagcagccccactactacggctctgaagtcaccaccaaaatgctgtgtgctgctgacccacagtggaaaacagattcctgccagggagactcagggggacccctcgtctgttccctccaaggccgcatgactttgactggaattgtgagctggggccgtggatgtgccctgaaggacaagccaggcgtctacacgagagtctcacacttcttaccctggatccgcagtcacaccaaggaagagaatggcctggccctctgagggtccccagggaggaaacgggcaccacccgctttcttgctggttgtcatttttgcagtagagtcatctccatcagctgtaagaagagactgggaagataggctctgcacagatggatttgcctgtgccacccaccagggcgaacgacaatagctttaccctcaggcataggcctgggtgctggctgcccagacccctctggccaggatggaggggtggtcctgactcaacatgttactgaccagcaacttgtctttttctggactgaagcctgcaggagttaaaaagggcagggcatctcctgtgcatgggtgaagggagagccagctcccccgacggtgggcatttgtgaggcccatggttgagaaatgaataatttcccaattaggaagtgtaacagctgaggtctcttgagggagcttagccaatgtgggagcagcggtttggggagcagagacactaacgacttcagggcagggctctgatattccatgaatgtatcaggaaatatatatgtgtgtgtatgtttgcacacttgtgtgtgggctgtgagtgtaagtgtgagtaagagctggtgtctgattgttaagtctaaatatttccttaaactgtgtggactgtgatgccacacagagtggtctttctggagaggttataggtcactcctggggcctcttgggtcccccacgtgacagtgcctgggaatgtattattctgcagcatgacctgtgaccagcactgtctcagtttcactttcacatagatgtccctttcttggccagttatcccttccttttagcctagttcatccaatcctcactgggtggggtgaggaccactcctgtacactgaatatttatatttcactatttttatttatatttttgtaattttaaataaaagtgatcaataaaatgtgatttttctgatga

SEQ ID NO: 1395 - DNA, 759 bp, Artificial
  cDNA Sequence
caggaacccagacaaccggaggcgaccctggtgctatgtgcaggtgggcctaaagctgcttgtccaagagtgcatggtgcatgactgcgcagatggaaaaaagccctcctctcctccagaagaattaaaatttcagtgtggccaaaagactctgaggccccgctttaagattattgggggagaattcaccaccatcgagaaccagccctggtttgcggccatctacaggaggcaccgggggggctctgtcacctacgtgtgtggaggcagcctcatcagcccttgctgggtgatcagcgccacacactgcttcattgattacccaaagaaggaggactacatcgtctacctgggtcgctcaaggcttaactccaacacgcaaggggagatgaagtttgaggtggaaaacctcatcctacacaaggactacagcgctgacacgcttgctcaccacaacgacattgccttgctgaagatccgttccaaggagggcaggtgtgcgcagccatcccggactatacagaccatctgcctgccctcgatgtataacgatccccagtttggcacaagctgtgagatcactggctttggaaaagagaattctaccgactatctctatccggagcagctgaaaatgactgttgtgaagctgatttcccaccgggagtgtcagcagccccactactacggctctgaagtcaccaccaaaatgctgtgtgctgctgacccacagtggaaaacagattcctgccaggtgag

SEQ ID NO: 1396 - DNA, 2377 bp, Artificial
  cDNA Sequence
agcaatcagcatgacagcctccagccaagtaatctggagtcatgagagctgctaggggagcaacatgaatcatgacggtccctgggaatttcctgataactaacctgggagtttcgggagccgccgtctagcgccccgacctcgccaccatgagagccctgctggcgcgcctgcttctctgcgtcctggtcgtgagcgactccaaaggcagcaatgaacttcatcaagttccatcgaactgtgactgtctaaatggaggaacatgtgtgtccaacaagtacttctccaacattcactggtgcaactgcccaaagaaattcggagggcagcactgtgaaatagataagtcaaaaacctgctatgaggggaatggtcacttttaccgaggaaaggccagcactgacaccatgggccggccctgcctgccctggaactctgccactgtccttcagcaaacgtaccatgcccacagatctgatgctcttcagctgggcctggggaaacataattactgcaggaacccagacaaccggaggcgaccctggtgctatgtgcaggtgggcctaaagctgcttgtccaagagtgcatggtgcatgactgcgcagatggaaaaaagccctcctctcctccagaagaattaaaatttcagtgtggccaaaagactctgaggccccgctttaagattattgggggagaattcaccaccatcgagaaccagccctggtttgcggccatctacaggaggcaccgggggggctctgtcacctacgtgtgtggaggcagcctcatcagcccttgctgggtgatcagcgccacacactgcttcattgattacccaaagaaggaggactacatcgtctacctgggtcgctcaaggcttaactccaacacgcaaggggagatgaagtttgaggtggaaaacctcatcctacacaaggactacagcgctgacacgcttgctcaccacaacgacattgccttgctgaagatccgttccaaggagggcaggtgtgcgcagccatcccggactatacagaccatctgcctgccctcgatgtataacgatccccagtttggcacaagctgtgagatcactggctttggaaaagagaattctaccgactatctctatccggagcagctgaaaatgactgttgtgaagctgatttcccaccgggagtgtcagcagccccactactacggctctgaagtcaccaccaaaatgctgtgtgctgctgacccacagtggaaaacagattcctgccagggagactcagggggacccctcgtctgttccctccaaggccgcatgactttgactggaattgtgagctggggccgtggatgtgccctgaaggacaagccaggcgtctacacgagagtctcacacttcttaccctggatccgcagtcacaccaaggaagagaatggcctggccctctgagggtccccagggaggaaacgggcaccacccgctttcttgctggttgtcatttttgcagtagagtcatctccatcagctgtaagaagagactgggaagataggctctgcacagatggatttgcctgtgccacccaccagggcgaacgacaatagctttaccctcaggcataggcctgggtgctggctgcccagacccctctggccaggatggaggggtggtcctgactcaacatgttactgaccagcaacttgtctttttctggactgaagcctgcaggagttaaaaagggcagggcatctcctgtgcatgggtgaagggagagccagctcccccgacggtgggcatttgtgaggcccatggttgagaaatgaataatttcccaattaggaagtgtaacagctgaggtctcttgagggagcttagccaatgtgggagcagcggtttggggagcagagacactaacgacttcagggcagggctctgatattccatgaatgtatcaggaaatatatatgtgtgtgtatgtttgcacacttgtgtgtgggctgtgagtgtaagtgtgagtaagagctggtgtctgattgttaagtctaaatatttccttaaactgtgtggactgtgatgccacacagagtggtctttctggagaggttataggtcactcctggggcctcttgggtcccccacgtgacagtgcctgggaatgtattattctgcagcatgacctgtgaccagcactgtctcagtttcactttcacatagatgtccctttcttggccagttatcccttccttttagcctagttcatccaatcctcactgggtggggtgaggaccactcctgtacactgaatatttatatttcactatttttatttatatttttgtaattttaaataaaagtgatcaataaaatgtgatttttctgatga

SEQ ID NO: 1397 - DNA, 1273 bp, Artificial
  cDNA Sequence
agcaatcagcatgacagcctccagccaagtaatctggagtcatgagagctgctaggggagcaacatgaatcatgacggtccctgggaatttcctgataactaacctgggagtttcgggagccgccgtctagcgccccgacctcgccaccatgagagccctgctggcgcgcctgcttctctgcgtcctggtcgtgagcgactccaaaggcagcaatgaacttcatcaagttccatcgaactgtgactgtctaaatggaggaacatgtgtgtccaacaagtacttctccaacattcactggtgcaactgcccaaagaaattcggagggcagcactgtgaaatagataagtcaaaaacctgctatgaggggaatggtcacttttaccgaggaaaggccagcactgacaccatgggccggccctgcctgccctggaactctgccactgtccttcagcaaacgtaccatgcccacagatctgatgctcttcagctgggcctggggaaacataattactgcaggaacccagacaaccggaggcgaccctggtgctatgtgcaggtgggcctaaagctgcttgtccaagagtgcatggtgcatgactgcgcagatggaaaaaagccctcctctcctccagaagaattaaaatttcagtgtggccaaaagactctgaggccccgctttaagattattgggggagaattcaccaccatcgagaaccagccctggtttgcggccatctacaggaggcaccgggggggctctgtcacctacgtgtgtggaggcagcctcatcagcccttgctgggtgatcagcgccacacactgcttcattgattacccaaagaaggaggactacatcgtctacctgggtcgctcaaggcttaactccaacacgcaaggggagatgaagtttgaggtggaaaacctcatcctacacaaggactacagcgctgacacgcttgctcaccacaacgacattgccttgctgaagatccgttccaaggagggcaggtgtgcgcagccatcccggactatacagaccatctgcctgccctcgatgtataacgatccccagtttggcacaagctgtgagatcactggctttggaaaagagaattctaccgactatctctatccggagcagctgaaaatgactgttgtgaagctgatttcccaccgggagtgtcagcagccccactactacggctctgaagtcaccaccaaaatgctgtgtgctgctgacccacagtggaaaacagattcctgccaggtgag

SEQ ID NO: 1398 - DNA, 795 bp, Artificial
  cDNA Sequence
agcaatcagcatgacagcctccagccaagtaatctggagtcatgagagctgctaggggagcaacatgaatcatgacggtccctgggaatttcctgataactaacctgggagtttcgggagccgccgtctagcgccccgacctcgccaccatgagagccctgctggcgcgcctgcttctctgcgtcctggtcgtgagcgactccaaaggcagcaatgaacttcatcaagttccatcgaactgtgactgtctaaatggaggaacatgtgtgtccaacaagtacttctccaacattcactggtgcaactgcccaaagaaattcggagggcagcactgtgaaatagataagtcaaaaacctgctatgaggggaatggtcacttttaccgaggaaaggccagcactgacaccatgggccggccctgcctgccctggaactctgccactgtccttcagcaaacgtaccatgcccacagatctgatgctcttcagctgggcctggggaaacataattactgcaggaacccagacaaccggaggcgaccctggtgctatgtgcaggtgggcctaaagctgcttgtccaagagtgcatggtgcatgactgcgcagatgggatggatgaagagtgttgtttagggagcgatgggctgcaaaggtaaatagatggtaggggctataggtggagtaaaggctcagatttgcatggaagagaataagggccttccctggtagagatactttatggttcccctctctggcagactcccagtggacagataaatcttgatgcaaacgcct

SEQ ID NO: 1399 - DNA, 2346 bp, Artificial
  cDNA Sequence
acagtgcggagaccgcagccccggagcccgggccagggtccacctgtccccgcagcgccggctcgcgccctcctgccgcagccaccgagccgccgtctagcgccccgacctcgccaccatgagagccctgctggcgcgcctgcttctctgcgtcctggtcgtgagcgactccaaaggcagcaatgaacttcatcaagttccatcgaactgtgactgtctaaatggaggaacatgtgtgtccaacaagtacttctccaacattcactggtgcaactgcccaaagaaattcggagggcagcactgtgaaatagataagtcaaaaacctgctatgaggggaatggtcacttttaccgaggaaaggccagcactgacaccatgggccggccctgcctgccctggaactctgccactgtccttcagcaaacgtaccatgcccacagatctgatgctcttcagctgggcctggggaaacataattactgcaggaacccagacaaccggaggcgaccctggtgctatgtgcaggtgggcctaaagctgcttgtccaagagtgcatggtgcatgactgcgcagatggaaaaaagccctcctctcctccagaagaattaaaatttcagtgtggccaaaagactctgaggccccgctttaagattattgggggagaattcaccaccatcgagaaccagccctggtttgcggccatctacaggaggcaccgggggggctctgtcacctacgtgtgtggaggcagcctcatcagcccttgctgggtgatcagcgccacacactgcttcattgattacccaaagaaggaggactacatcgtctacctgggtcgctcaaggcttaactccaacacgcaaggggagatgaagtttgaggtggaaaacctcatcctacacaaggactacagcgctgacacgcttgctcaccacaacgacattgccttgctgaagatccgttccaaggagggcaggtgtgcgcagccatcccggactatacagaccatctgcctgccctcgatgtataacgatccccagtttggcacaagctgtgagatcactggctttggaaaagagaattctaccgactatctctatccggagcagctgaaaatgactgttgtgaagctgatttcccaccgggagtgtcagcagccccactactacggctctgaagtcaccaccaaaatgctgtgtgctgctgacccacagtggaaaacagattcctgccagggagactcagggggacccctcgtctgttccctccaaggccgcatgactttgactggaattgtgagctggggccgtggatgtgccctgaaggacaagccaggcgtctacacgagagtctcacacttcttaccctggatccgcagtcacaccaaggaagagaatggcctggccctctgagggtccccagggaggaaacgggcaccacccgctttcttgctggttgtcatttttgcagtagagtcatctccatcagctgtaagaagagactgggaagataggctctgcacagatggatttgcctgtgccacccaccagggcgaacgacaatagctttaccctcaggcataggcctgggtgctggctgcccagacccctctggccaggatggaggggtggtcctgactcaacatgttactgaccagcaacttgtctttttctggactgaagcctgcaggagttaaaaagggcagggcatctcctgtgcatgggtgaagggagagccagctcccccgacggtgggcatttgtgaggcccatggttgagaaatgaataatttcccaattaggaagtgtaacagctgaggtctcttgagggagcttagccaatgtgggagcagcggtttggggagcagagacactaacgacttcagggcagggctctgatattccatgaatgtatcaggaaatatatatgtgtgtgtatgtttgcacacttgtgtgtgggctgtgagtgtaagtgtgagtaagagctggtgtctgattgttaagtctaaatatttccttaaactgtgtggactgtgatgccacacagagtggtctttctggagaggttataggtcactcctggggcctcttgggtcccccacgtgacagtgcctgggaatgtattattctgcagcatgacctgtgaccagcactgtctcagtttcactttcacatagatgtccctttcttggccagttatcccttccttttagcctagttcatccaatcctcactgggtggggtgaggaccactcctgtacactgaatatttatatttcactatttttatttatatttttgtaattttaaataaaagtgatcaataaaatgtgatttttctgatga

SEQ ID NO: 1400 - DNA, 1242 bp, Artificial
  cDNA Sequence
acagtgcggagaccgcagccccggagcccgggccagggtccacctgtccccgcagcgccggctcgcgccctcctgccgcagccaccgagccgccgtctagcgccccgacctcgccaccatgagagccctgctggcgcgcctgcttctctgcgtcctggtcgtgagcgactccaaaggcagcaatgaacttcatcaagttccatcgaactgtgactgtctaaatggaggaacatgtgtgtccaacaagtacttctccaacattcactggtgcaactgcccaaagaaattcggagggcagcactgtgaaatagataagtcaaaaacctgctatgaggggaatggtcacttttaccgaggaaaggccagcactgacaccatgggccggccctgcctgccctggaactctgccactgtccttcagcaaacgtaccatgcccacagatctgatgctcttcagctgggcctggggaaacataattactgcaggaacccagacaaccggaggcgaccctggtgctatgtgcaggtgggcctaaagctgcttgtccaagagtgcatggtgcatgactgcgcagatggaaaaaagccctcctctcctccagaagaattaaaatttcagtgtggccaaaagactctgaggccccgctttaagattattgggggagaattcaccaccatcgagaaccagccctggtttgcggccatctacaggaggcaccgggggggctctgtcacctacgtgtgtggaggcagcctcatcagcccttgctgggtgatcagcgccacacactgcttcattgattacccaaagaaggaggactacatcgtctacctgggtcgctcaaggcttaactccaacacgcaaggggagatgaagtttgaggtggaaaacctcatcctacacaaggactacagcgctgacacgcttgctcaccacaacgacattgccttgctgaagatccgttccaaggagggcaggtgtgcgcagccatcccggactatacagaccatctgcctgccctcgatgtataacgatccccagtttggcacaagctgtgagatcactggctttggaaaagagaattctaccgactatctctatccggagcagctgaaaatgactgttgtgaagctgatttcccaccgggagtgtcagcagccccactactacggctctgaagtcaccaccaaaatgctgtgtgctgctgacccacagtggaaaacagattcctgccaggtgag

SEQ ID NO: 1401 - DNA, 663 bp, Artificial
  cDNA Sequence
gtagtcgctgcacagtctgtctcttcgccggttcccggccccgtggatcctacttctctgtcgcccgcggttcgccgccccgctcgccgccgcgatgccagtgtttcatacgcgcacgatcgagagcatcctggagccggtggcacagcagatctcccacctggtgataatgcacgaggagggcgaggtggacggcaaagccattcctgacctcaccgcgcccgtggccgccgtgcaggcggccgtcagcaacctcgtccgggttggaaaagagactgttcaaaccactgaggatcagattttgaagagagatatgccaccagcatttattaaggttgagaatgcttgcaccaagcttgtccaggcagctcagatgcttcagtcagacccttactcagtgcctgctcgagattatctaattgatgggtcaaggggcatcctctctggaacatcagacctgctccttaccttcgatgaggctgaggtccgtaaaattattagagtttgcaaaggaattttggaatatcttacagtggcagaggtggtggagactatggaagatttggtcacttacacaaagaatcttgggccaggaatgactaagatggccaagatgattgacgagagacagcaggagctcactcaccaggagcaccgagtgat

SEQ ID NO: 1402 - DNA, 492 bp, Artificial
  cDNA Sequence
gtagtcgctgcacagtctgtctcttcgccggttcccggccccgtggatcctacttctctgtcgcccgcggttcgccgccccgctcgccgccgcgatgccagtgtttcatacgcgcacgatcgagagcatcctggagccggtggcacagcagatctcccacctggtgataatgcacgaggagggcgaggtggacggcaaagccattcctgacctcaccgcgcccgtggccgccgtgcaggcggccgtcagcaacctcgtccgggttggaaaagagactgttcaaaccactgaggatcagattttgaagagagatatgccaccagcatttattaaggttgagaatgcttgcaccaagcttgtccaggcagctcagatgcttcagtcagacccttactcagtgcctgctcgagattatctaattgatgggtcaaggggcatcctctctggaacatcagacctgctccttaccttcgatgaggctgaggtaggcaa

SEQ ID NO: 1403 - DNA, 482 bp, Artificial
  cDNA Sequence
agtcgctgcacagtctgtctcttcgccggttcccggccccgtggatcctacttctctgtcgcccgcggttcgccgccccgctcgccgccgcgatgccagtgtttcatacgcgcacgatcgagagcatcctggagccggtggcacagcagatctcccacctggtgataatgcacgaggagggcgaggtggacggcaaagccattcctgacctcaccgcgcccgtggccgccgtgcaggcggccgtcagcaacctcgtccgggttggaaaagagactgttcaaaccactgaggatcagattttgaagagagatatgccaccagcatttattaaacttttactagaggaaatcctaaagaatgtacttcagacaagtccgctgatcccagatgtaagcctgaaatacaagagggaatgatgagccaagatactggacagtttgttggtaaatgtagataagtgttgatgtatataataatgggat

SEQ ID NO: 1404 - DNA, 358 bp, Artificial
  cDNA Sequence
ggttggaaaagagactgttcaaaccactgaggatcagattttgaagagagatatgccaccagcatttattaaggttgagaatgcttgcaccaagcttgtccaggcagctcagatgcttcagtcagacccttactcagtgcctgctcgagattatctaattgatgggtcaaggggcatcctctctggaacatcagacctgctccttaccttcgatgaggctgaggtccgtaaaattattagagtttgcaaaggaattttggaatatcttacagtggcagaggtggtggagactatggaagatttggtcacttacacaaagaatcttgggccaggaatgactaagatggccaagatgatt

SEQ ID NO: 1405 - DNA, 3268 bp, Artificial
  cDNA Sequence
tacaactcacctcttgggatgaagatgcctgggccagcaaggacactgaagccatgaagagagcattggcctccatagactccaaactgaaccaggccaaaggttggctccgtgaccctagtgcctccccaggggatgctggtgagcaggccatcagacagatcttagatgaagctggaaaagttggtgaactctgtgcaggcaaagaacgcagggagattctgggaacttgcaaaatgctagggcagatgactgatcaagtggctgacctccgtgccagaggacaaggatcctcaccggtggccatgcagaaagctcagcaggtatctcagggtctggatgtgctcacagcaaaagtggaaaatgcagctcgcaagctggaagccatgaccaactcaaagcagagcattgcaaagaagatcgatgctgctcagaactggcttgcagatccaaatggtggaccggaaggagaagagcagattcgaggtgctttggctgaagctcggaaaatagcagaattatgtgatgatcctaaagaaagagatgacattctacgttcccttggggaaatatctgctctgacttctaaattagcagatctacgaagacaggggaaaggagattctccagaggctcgagccttggccaaacaggtggccacggccctgcagaacctgcagaccaaaaccaaccgggctgtggccaacagcagaccggccaaagcagctgtacaccttgagggcaagattgagcaagcacagcggtggattgataatcccacagtggatgaccgtggagtcggtcaggctgccatccgggggcttgtggccgaagggcatcgtctggctaatgttatgatggggccttatcggcaagatcttctcgccaagtgtgaccgagtggaccagctgacagcccagctggctgacctggctgccagaggggaaggggagagtcctcaggcacgagcacttgcatctcagctccaagactccttaaaggatctaaaagctcggatgcaggaggccatgactcaggaagtgtcagatgttttcagcgataccacaactcccatcaagctgttggcagtggcagccacggcgcctcctgatgcgcctaacagggaagaggtatttgatgagagggcagctaactttgaaaaccattcaggaaagcttggtgctacggccgagaaggcggctgcggttggtactgctaataaatcaacagtggaaggcattcaggcctcagtgaagacggcccgagaactcacaccccaggtggtctcggctgctcgtatcttacttaggaaccctggaaatcaagctgcttatgaacattttgagaccatgaagaaccagtggatcgataatgttgaaaaaatgacagggctggtggacgaagccattgataccaaatctctgttggatgcttcagaagaagcaattaaaaaagacctggacaagtgcaaggtagctatggccaacattcagcctcagatgctggttgctggggcaaccagtattgctcgtcgggccaaccggatcctgctggtggctaagagggaggtggagaattccgaggatcccaagttccgtgaggctgtgaaagctgcctctgatgaattgagcaaaaccatctccccgatggtgatggatgcaaaagctgtggctggaaacatttccgaccctggactgcaaaagagcttcctggactcaggatatcggatcctgggagctgtggccaaggtcagagaagccttccaacctcaggagcctgacttcccgccgcctccaccagaccttgaacaactccgactaacagatgagcttgctcctcccaaaccacctctgcctgaaggtgaggtccctccacctaggcctccaccaccagaggaaaaggatgaagagttccctgagcagaaggccggggaggtgattaaccagccaatgatgatggctgccagacagctccatgatgaagctcgcaaatggtccagcaagggcaatgacatcattgcagcagccaagcgcatggctctgctgatggctgagatgtctcggctggtaagagggggcagtggtaccaagcgggcactcattcagtgtgccaaggacatcgccaaggcctcagatgaggtgactcggttggccaaggaggttgccaagcagtgcacagataaacggattagaaccaacctcttacaggtatgtgagcgaatcccaaccataagcacccagctcaaaatcctgtccacagtgaaggccaccatgctgggccggaccaacatcagtgatgaggagtctgagcaggccacagagatgctggttcacaatgcccagaacctcatgcagtctgtgaaggagactgtgcgggaagctgaagctgcttcaatcaaaattcgaacagatgctggatttacactgcgctgggttagaaagactccctggtaccagtaggcacctggctgagcctggctggcacagaaacctctactaaaaagaaggaaaatgatctgagtcccaggagctgcccagagttgctgggagctgaaaaatcacatcctggcctggcacatcagaaaggaatgggggcctcttcaaattagaagacatttatactcttttttcatggacactttgaaatgtgtttctgtataaagcctgtattctcaaacacagttacacttgtgcaccctctatcccaataggcagactgggtttctagcccatggacttcacataagctcagaatccaagtgaacactagccagacactctgctctgcccttgttccctaggggacacttccctctgtttctctttccttggctcccattcactcttccagaatcccaagacccagggcccaggcaaatcagttactaagaagaaaattgctgtgcctcccaaaattgttttgagctttccatgttgctgccaaccataccttccttccctgggctgtgctacctgggtccttttcagaagtgagctttgctgctacaggggaaggtggcctctgtggagccccagcatatgggggcctggattcatttcctgcccttcctcagtttaatccttctagtttcccacaatataaaactgtacttcactgtcaggaagaaatcacagaatcatatgattctgcttttaccatgcccctgagcaatgtctgtgctagggaaacttcccgtcccatatcctgcctcagcccgccaaggtagccatcccatgaacacactgtgtcctggtgctctctgccactg

SEQ ID NO: 1406 - DNA, 2482 bp, Artificial
  cDNA Sequence
tacaactcacctcttgggatgaagatgcctgggccagcaaggacactgaagccatgaagagagcattggcctccatagactccaaactgaaccaggccaaaggttggctccgtgaccctagtgcctccccaggggatgctggtgagcaggccatcagacagatcttagatgaagctggaaaagttggtgaactctgtgcaggcaaagaacgcagggagattctgggaacttgcaaaatgctagggcagatgactgatcaagtggctgacctccgtgccagaggacaaggatcctcaccggtggccatgcagaaagctcagcaggtatctcagggtctggatgtgctcacagcaaaagtggaaaatgcagctcgcaagctggaagccatgaccaactcaaagcagagcattgcaaagaagatcgatgctgctcagaactggcttgcagatccaaatggtggaccggaaggagaagagcagattcgaggtgctttggctgaagctcggaaaatagcagaattatgtgatgatcctaaagaaagagatgacattctacgttcccttggggaaatatctgctctgacttctaaattagcagatctacgaagacaggggaaaggagattctccagaggctcgagccttggccaaacaggtggccacggccctgcagaacctgcagaccaaaaccaaccgggctgtggccaacagcagaccggccaaagcagctgtacaccttgagggcaagattgagcaagcacagcggtggattgataatcccacagtggatgaccgtggagtcggtcaggctgccatccgggggcttgtggccgaagggcatcgtctggctaatgttatgatggggccttatcggcaagatcttctcgccaagtgtgaccgagtggaccagctgacagcccagctggctgacctggctgccagaggggaaggggagagtcctcaggcacgagcacttgcatctcagctccaagactccttaaaggatctaaaagctcggatgcaggaggccatgactcaggaagtgtcagatgttttcagcgataccacaactcccatcaagctgttggcagtggcagccacggcgcctcctgatgcgcctaacagggaagaggtatttgatgagagggcagctaactttgaaaaccattcaggaaagcttggtgctacggccgagaaggcggctgcggttggtactgctaataaatcaacagtggaaggcattcaggcctcagtgaagacggcccgagaactcacaccccaggtggtctcggctgctcgtatcttacttaggaaccctggaaatcaagctgcttatgaacattttgagaccatgaagaaccagtggatcgataatgttgaaaaaatgacagggctggtggacgaagccattgataccaaatctctgttggatgcttcagaagaagcaattaaaaaagacctggacaagtgcaaggtagctatggccaacattcagcctcagatgctggttgctggggcaaccagtattgctcgtcgggccaaccggatcctgctggtggctaagagggaggtggagaattccgaggatcccaagttccgtgaggctgtgaaagctgcctctgatgaattgagcaaaaccatctccccgatggtgatggatgcaaaagctgtggctggaaacatttccgaccctggactgcaaaagagcttcctggactcaggatatcggatcctgggagctgtggccaaggtcagagaagccttccaacctcaggagcctgacttcccgccgcctccaccagaccttgaacaactccgactaacagatgagcttgctcctcccaaaccacctctgcctgaaggtgaggtccctccacctaggcctccaccaccagaggaaaaggatgaagagttccctgagcagaaggccggggaggtgattaaccagccaatgatgatggctgccagacagctccatgatgaagctcgcaaatggtccagcaagggcaatgacatcattgcagcagccaagcgcatggctctgctgatggctgagatgtctcggctggtaagagggggcagtggtaccaagcgggcactcattcagtgtgccaaggacatcgccaaggcctcagatgaggtgactcggttggccaaggaggttgccaagcagtgcacagataaacggattagaaccaacctcttacaggtactcggggaaagaggctgcgtgtgtgtgtgtgtgtgtgtgtgtgtgtgcgtgtgtgtgtgtgttggaggggagggtatgagagggagaaaagcaggagagaaaaactaggtaagggagaaagaggcacttcaccggggacagaaatagcagaaagggaaaaaaacaaatgtactgggaaagacagattcaggaaaggttacttcctaatcaaatgaatgcttccatttctggagaaatggattgtactgaccctaggggaaaaaacaagtgga

SEQ ID NO: 1407 - DNA, 2273 bp, Artificial
  cDNA Sequence
tttaaggatctaaaagctcggatgcaggaggccatgactcaggaagtgtcagatgttttcagcgataccacaactcccatcaagctgttggcagtggcagccacggcgcctcctgatgcgcctaacagggaagaggtatttgatgagagggcagctaactttgaaaaccattcaggaaagcttggtgctacggccgagaaggcggctgcggttggtactgctaataaatcaacagtggaaggcattcaggcctcagtgaagacggcccgagaactcacaccccaggtggtctcggctgctcgtatcttacttaggaaccctggaaatcaagctgcttatgaacattttgagaccatgaagaaccagtggatcgataatgttgaaaaaatgacagggctggtggacgaagccattgataccaaatctctgttggatgcttcagaagaagcaattaaaaaagacctggacaagtgcaaggtagctatggccaacattcagcctcagatgctggttgctggggcaaccagtattgctcgtcgggccaaccggatcctgctggtggctaagagggaggtggagaattccgaggatcccaagttccgtgaggctgtgaaagctgcctctgatgaattgagcaaaaccatctccccgatggtgatggatgcaaaagctgtggctggaaacatttccgaccctggactgcaaaagagcttcctggactcaggatatcggatcctgggagctgtggccaaggtcagagaagccttccaacctcaggagcctgacttcccgccgcctccaccagaccttgaacaactccgactaacagatgagcttgctcctcccaaaccacctctgcctgaaggtgaggtccctccacctaggcctccaccaccagaggaaaaggatgaagagttccctgagcagaaggccggggaggtgattaaccagccaatgatgatggctgccagacagctccatgatgaagctcgcaaatggtccagcaagggcaatgacatcattgcagcagccaagcgcatggctctgctgatggctgagatgtctcggctggtaagagggggcagtggtaccaagcgggcactcattcagtgtgccaaggacatcgccaaggcctcagatgaggtgactcggttggccaaggaggttgccaagcagtgcacagataaacggattagaaccaacctcttacaggtatgtgagcgaatcccaaccataagcacccagctcaaaatcctgtccacagtgaaggccaccatgctgggccggaccaacatcagtgatgaggagtctgagcaggccacagagatgctggttcacaatgcccagaacctcatgcagtctgtgaaggagactgtgcgggaagctgaagctgcttcaatcaaaattcgaacagatgctggatttacactgcgctgggttagaaagactccctggtaccagtaggcacctggctgagcctggctggcacagaaacctctactaaaaagaaggaaaatgatctgagtcccaggagctgcccagagttgctgggagctgaaaaatcacatcctggcctggcacatcagaaaggaatgggggcctcttcaaattagaagacatttatactcttttttcatggacactttgaaatgtgtttctgtataaagcctgtattctcaaacacagttacacttgtgcaccctctatcccaataggcagactgggtttctagcccatggacttcacataagctcagaatccaagtgaacactagccagacactctgctctgcccttgttccctaggggacacttccctctgtttctctttccttggctcccattcactcttccagaatcccaagacccagggcccaggcaaatcagttactaagaagaaaattgctgtgcctcccaaaattgttttgagctttccatgttgctgccaaccataccttccttccctgggctgtgctacctgggtccttttcagaagtgagctttgctgctacaggggaaggtggcctctgtggagccccagcatatgggggcctggattcatttcctgcccttcctcagtttaatccttctagtttcccacaatataaaactgtacttcactgtcaggaagaaatcacagaatcatatgattctgcttttaccatgcccctgagcaatgtctgtgctagggaaacttcccgtcccatatcctgcctcagcccgccaaggtagccatcccatgaacacactgtgtcctggtgctctctgccactg

SEQ ID NO: 1408 - DNA, 1487 bp, Artificial
  cDNA Sequence
tttaaggatctaaaagctcggatgcaggaggccatgactcaggaagtgtcagatgttttcagcgataccacaactcccatcaagctgttggcagtggcagccacggcgcctcctgatgcgcctaacagggaagaggtatttgatgagagggcagctaactttgaaaaccattcaggaaagcttggtgctacggccgagaaggcggctgcggttggtactgctaataaatcaacagtggaaggcattcaggcctcagtgaagacggcccgagaactcacaccccaggtggtctcggctgctcgtatcttacttaggaaccctggaaatcaagctgcttatgaacattttgagaccatgaagaaccagtggatcgataatgttgaaaaaatgacagggctggtggacgaagccattgataccaaatctctgttggatgcttcagaagaagcaattaaaaaagacctggacaagtgcaaggtagctatggccaacattcagcctcagatgctggttgctggggcaaccagtattgctcgtcgggccaaccggatcctgctggtggctaagagggaggtggagaattccgaggatcccaagttccgtgaggctgtgaaagctgcctctgatgaattgagcaaaaccatctccccgatggtgatggatgcaaaagctgtggctggaaacatttccgaccctggactgcaaaagagcttcctggactcaggatatcggatcctgggagctgtggccaaggtcagagaagccttccaacctcaggagcctgacttcccgccgcctccaccagaccttgaacaactccgactaacagatgagcttgctcctcccaaaccacctctgcctgaaggtgaggtccctccacctaggcctccaccaccagaggaaaaggatgaagagttccctgagcagaaggccggggaggtgattaaccagccaatgatgatggctgccagacagctccatgatgaagctcgcaaatggtccagcaagggcaatgacatcattgcagcagccaagcgcatggctctgctgatggctgagatgtctcggctggtaagagggggcagtggtaccaagcgggcactcattcagtgtgccaaggacatcgccaaggcctcagatgaggtgactcggttggccaaggaggttgccaagcagtgcacagataaacggattagaaccaacctcttacaggtactcggggaaagaggctgcgtgtgtgtgtgtgtgtgtgtgtgtgtgtgcgtgtgtgtgtgtgttggaggggagggtatgagagggagaaaagcaggagagaaaaactaggtaagggagaaagaggcacttcaccggggacagaaatagcagaaagggaaaaaaacaaatgtactgggaaagacagattcaggaaaggttacttcctaatcaaatgaatgcttccatttctggagaaatggattgtactgaccctaggggaaaaaacaagtgga

SEQ ID NO: 1409 - DNA, 1760 bp, Artificial
  cDNA Sequence
ggtgatttcagcatctggaaaggctcctctgtatttttcccctcaggccagctctactgctttctccctatagaaatgaaagtgcctgtttaaccagctccttggccctgtccccagtttattgatatgattaacctggagatgccaaagtgcttgttcagtgctgtgcctggggtgcacatcttgccctttcagactaatatctgggtcttccttttttttagtcaggaaatgtctctctccctctcctttccccctcctctctcctctctctttgtttctcacactgagtgcttgggcgagtgccctgtctcattctttttttttcttccagtgctatccgtatcactcaagaacggcccttttctcctcttctcacccttccggagggatgctaaggtggcaagctccctcctcttctctgtgcttctccttccttccttaacatggccagagcgtgggcagagctcacactgtatctttgcttccctctagggcaatgacatcattgcagcagccaagcgcatggctctgctgatggctgagatgtctcggctggtaagagggggcagtggtaccaagcgggcactcattcagtgtgccaaggacatcgccaaggcctcagatgaggtgactcggttggccaaggaggttgccaagcagtgcacagataaacggattagaaccaacctcttacaggtatgtgagcgaatcccaaccataagcacccagctcaaaatcctgtccacagtgaaggccaccatgctgggccggaccaacatcagtgatgaggagtctgagcaggccacagagatgctggttcacaatgcccagaacctcatgcagtctgtgaaggagactgtgcgggaagctgaagctgcttcaatcaaaattcgaacagatgctggatttacactgcgctgggttagaaagactccctggtaccagtaggcacctggctgagcctggctggcacagaaacctctactaaaaagaaggaaaatgatctgagtcccaggagctgcccagagttgctgggagctgaaaaatcacatcctggcctggcacatcagaaaggaatgggggcctcttcaaattagaagacatttatactcttttttcatggacactttgaaatgtgtttctgtataaagcctgtattctcaaacacagttacacttgtgcaccctctatcccaataggcagactgggtttctagcccatggacttcacataagctcagaatccaagtgaacactagccagacactctgctctgcccttgttccctaggggacacttccctctgtttctctttccttggctcccattcactcttccagaatcccaagacccagggcccaggcaaatcagttactaagaagaaaattgctgtgcctcccaaaattgttttgagctttccatgttgctgccaaccataccttccttccctgggctgtgctacctgggtccttttcagaagtgagctttgctgctacaggggaaggtggcctctgtggagccccagcatatgggggcctggattcatttcctgcccttcctcagtttaatccttctagtttcccacaatataaaactgtacttcactgtcaggaagaaatcacagaatcatatgattctgcttttaccatgcccctgagcaatgtctgtgctagggaaacttcccgtcccatatcctgcctcagcccgccaaggtagccatcccatgaacacactgtgtcctggtgctctctgccactg

SEQ ID NO: 1410 - DNA, 645 bp, Artificial
  cDNA Sequence
ggcaaacagagaaacataccaaattaaactttctctttaggtatgtgagcgaatcccaaccataagcacccagctcaaaatcctgtccacagtgaaggccaccatgctgggccggaccaacatcagtgatgaggagtctgagcaggccacagagatgctggttcacaatgcccagaacctcatgcagtctgtgaaggagactgtgcgggaagctgaagctgcttcaatcaaaattcgaacagatgctggatttacactgcgctgggttagaaagactccctggtaccagtaggcacctggctgagcctggctggcacagaaacctctactaaaaagaaggaaaatgatctgagtcccaggagctgcccagagttgctgggagctgaaaaatcacatcctggcctggcacatcagaaaggaatgggggcctcttcaaattagaagacatttatactcttttttcatggacactttgaaatgtgtttctgtataaagcctgtattctcaaacacagttacacttgtgcaccctctatcccaataggcagactgggtttctagcccatggacttcacataagctcagaatccaagtgaacactagccagacactctgctctgcccttgttccctaggggacacttccc

SEQ ID NO: 1411 - DNA, 2011 bp, Artificial
  cDNA Sequence
gaagagggggcgggaccagagagtggatggcagaggtgggctgtagagccaaagtggggtgggagcgcgaagatggcagctgctgaggaggagccgaagcccaaaaagctgaaggtggaggcgccgcaagcgctgagagaaaatattctctttggaatgggaaatcctctgcttgacatctctgctgtagtggacaaagatttccttgataagtattctctgaaaccaaatgaccaaatcttggctgaagacaaacacaaggaactgtttgatgaacttgtgaaaaaattcaaagtcgaatatcatgctggtggctctacccagaattcaattaaagtggctcagtggatgattcaacagccacacaaagcagcaacattttttggatgcattgggatagataaatttggggagatcctgaagagaaaagctgctgaagcccatgtggatgctcattactacgagcagaatgagcagccaacaggaacttgtgctgcatgcatcactggtgacaacaggtccctcatagctaatcttgctgctgccaattgttataaaaaggaaaaacatcttgatctggagaaaaactggatgttggtagaaaaagcaagagtttgttatatagcaggcttttttcttacagtttccccagagtcagtattaaaggtggctcaccatgcttctgaaaacaacaggattttcactttgaatctatctgcaccgtttattagccagttctacaaggaatcattgatgaaagttatgccttatgttgatatactttttggaaatgagacagaagctgccacttttgctagagagcaaggctttgagactaaagacattaaagagatagccaaaaagacacaagccctgccaaagatgaactcaaagaggcagcgaatcgtgatcttcacccaagggagagatgacactataatggctacagaaagtgaagtcactgcttttgctgtcttggatcaagaccagaaagaaattattgataccaatggagctggagatgcatttgttggaggttttctgtctcaactggtctctgacaagcctctgactgaatgtatccgtgctggccactatgcagcaagcatcataattagacggactggctgcacctttcctgagaagccagacttccactgatggaagagctgaaaacacaagcccaggagtgcagacactgccctaattgcttcctgagaattcccatattaataaagaagaaaattatctgccattttttcctactataataatgctgaatcttaatttagagggtacaagggtatggtaatgcttgtagaatctttattatctcaacaatctaaaaaatgatgtttatttccatagtttgatagtgccacttaaatgccaattaaacaagaatataacatttcaatagaaatttttatttcattttcaattactttgtaaattcgtgtgtatttagtacactgatttgtttttttacatttctgctttgaatgcagatgcaatttaatataatagattttttaatgaattaatcttaacatagtaatctttagctttttatacaaatatatttaatttaggagtatatgtgtgtctatacacacacatacataaatataccacatatacacctgatagtcaaataaggtacagaaattttatcttgtcaattatgccaaataatctctttaatgtgcactcaaacatgtaataaactttggataattaaataatgtgccaaatttaagttgtaccacaatattcaaatcatagtcttatggaactctgtaattggacacaaacaaaaacttgtcatataggaatttttttctgtcttttccctgtgtacagcaaactgaggaagaaagatcattatttaatactgggccctgaaatgacacccaatttgttaatggaattatgaagaacagcaatataatacactgaagaataacttagtatcagagaccaataaatcacttttttaaggatgacaaaa

SEQ ID NO: 1412 - DNA, 1546 bp, Artificial
  cDNA Sequence
gaagagggggcgggaccagagagtggatggcagaggtgggctgtagagccaaagtggggtgggagcgcgaagatggcagctgctgaggaggagccgaagcccaaaaagctgaaggtggaggcgccgcaagcgctgagagaaaatattctctttggaatgggaaatcctctgcttgacatctctgctgtagtggacaaagatttccttgataagtattctctgaaaccaaatgaccaaatcttggctgaagacaaacacaaggaactgtttgatgaacttgtgaaaaaattcaaagtcgaatatcatgctggtggctctacccagaattcaattaaagtggctcagtggatgattcaacagccacacaaagcagcaacattttttggatgcattgggatagataaatttggggagatcctgaagagaaaagctgctgaagcccatgtggatgctcattactacgagcagaatgagcagccaacaggaacttgtgctgcatgcatcactggtgacaacaggtccctcatagctaatcttgctgctgccaattgttataaaaaggaaaaacatcttgatctggagaaaaactggatgttggtagaaaaagcaagagtttgttatatagcaggcttttttcttacagtttccccagagtcagtattaaaggtggctcaccatgcttctgaaaacaacaggattttcactttgaatctatctgcaccgtttattagccagttctacaaggaatcattgatgaaagttatgccttatgttgatatactttttggaaatgagacaacttaccacatctgagagaaacctgacatgtgggcatacttcagcgatccttaatagagtggccctcttgcttccaagtgtcttgaagctgccagccagatctctaacatacgtcagtacaggaaaaggcaagagaaggattgtgaaagctgtcatctataggtttcttcgacttcattgtggcctttggatgagaagggctggttataagaaaaaattatggaaaaaggcacctgcaagaaaaaagcgattgagggaatttgtattcggcaataaaacccagagtaaactcttaagataaaatgacgacgtccttctggaagaggtgaaactggtatgtccatgatccttatcagaagtgtcatgatcgaacaaacctgaaagtatagatcagaagtttcacttgtttctcagttattgaatatgtatctttgtgtacatatctgcaaaaatggataagtaaaaatctcgatgtaaattgtatcaatgaatatgtaaacatacagtgacaacactgaacttataaaagttttaaaacttaaaaaaaaagctcaaatttgtaaaagacatgtaaaaagaaggtggaaaatgtatttagaatcagggaatgatgctaaaagtttggtagagacaaaagagaaaagaaagtcccaaaagtggtttaagtttgcagcagatgctgatgatatcaaaacaatcttcacttaaaaaaaaaaaaaagactccaaagtacaagcaacaaatggaa

SEQ ID NO: 1413 - DNA, 445 bp, Artificial
  cDNA Sequence
ggcagaggtgggctgtagagccaaagtggggtgggagcgcgaagatggcagctgctgaggaggagccgaagcccaaaaagctgaaggtggaggcgccgcaagcgctgaggcttgctactcagcctggcccacagaccagaagcaattagtgagacctgggaacataaagaaatgcaaaattttggtcactgatacctgcagtgccaaacctgcattttaacaagatccacgagatttgtatgcatgttaaagtttgaaaagcactgatggtgtgaaatgtggattatctatcaacattttccacaagagaagagaaaatattctctttggaatgggaaatcctctgcttgacatctctgctgtagtggacaaagatttccttgataagtattctctgaaaccaaatgaccaaatcttggctgaagacaaacacaaggaactgtaa

SEQ ID NO: 1414 - DNA, 2218 bp, Artificial
  cDNA Sequence
gggacgctgttactaggactcaagatggccaccgcgcccgctagtcatctcgctagcccgcgcgccagtgagctggcacgagacacgcggtggcccacggcgtctggggacgatctccagcccttcgcacggggcggagcgcccgccttccctccaatcagcacgccgggccggctagccaggggccgcccgcgcgcggggtgtgtgaggacgcgctcccagtcgctgagtgcctgagccgggaagcagttgctgtggtacctgctgctgcccgagcggacgtagagcatcggacgcgggcgccgtggcgctgggcaggagggcgaagccatgacgtcagtcagagaaaatattctctttggaatgggaaatcctctgcttgacatctctgctgtagtggacaaagatttccttgataagtattctctgaaaccaaatgaccaaatcttggctgaagacaaacacaaggaactgtttgatgaacttgtgaaaaaattcaaagtcgaatatcatgctggtggctctacccagaattcaattaaagtggctcagtggatgattcaacagccacacaaagcagcaacattttttggatgcattgggatagataaatttggggagatcctgaagagaaaagctgctgaagcccatgtggatgctcattactacgagcagaatgagcagccaacaggaacttgtgctgcatgcatcactggtgacaacaggtccctcatagctaatcttgctgctgccaattgttataaaaaggaaaaacatcttgatctggagaaaaactggatgttggtagaaaaagcaagagtttgttatatagcaggcttttttcttacagtttccccagagtcagtattaaaggtggctcaccatgcttctgaaaacaacaggattttcactttgaatctatctgcaccgtttattagccagttctacaaggaatcattgatgaaagttatgccttatgttgatatactttttggaaatgagacagaagctgccacttttgctagagagcaaggctttgagactaaagacattaaagagatagccaaaaagacacaagccctgccaaagatgaactcaaagaggcagcgaatcgtgatcttcacccaagggagagatgacactataatggctacagaaagtgaagtcactgcttttgctgtcttggatcaagaccagaaagaaattattgataccaatggagctggagatgcatttgttggaggttttctgtctcaactggtctctgacaagcctctgactgaatgtatccgtgctggccactatgcagcaagcatcataattagacggactggctgcacctttcctgagaagccagacttccactgatggaagagctgaaaacacaagcccaggagtgcagacactgccctaattgcttcctgagaattcccatattaataaagaagaaaattatctgccattttttcctactataataatgctgaatcttaatttagagggtacaagggtatggtaatgcttgtagaatctttattatctcaacaatctaaaaaatgatgtttatttccatagtttgatagtgccacttaaatgccaattaaacaagaatataacatttcaatagaaatttttatttcattttcaattactttgtaaattcgtgtgtatttagtacactgatttgtttttttacatttctgctttgaatgcagatgcaatttaatataatagattttttaatgaattaatcttaacatagtaatctttagctttttatacaaatatatttaatttaggagtatatgtgtgtctatacacacacatacataaatataccacatatacacctgatagtcaaataaggtacagaaattttatcttgtcaattatgccaaataatctctttaatgtgcactcaaacatgtaataaactttggataattaaataatgtgccaaatttaagttgtaccacaatattcaaatcatagtcttatggaactctgtaattggacacaaacaaaaacttgtcatataggaatttttttctgtcttttccctgtgtacagcaaactgaggaagaaagatcattatttaatactgggccctgaaatgacacccaatttgttaatggaattatgaagaacagcaatataatacactgaagaataacttagtatcagagaccaataaatcacttttttaaggatgacaaaa

SEQ ID NO: 1415 - DNA, 1169 bp, Artificial
  cDNA Sequence
gggacgctgttactaggactcaagatggccaccgcgcccgctagtcatctcgctagcccgcgcgccagtgagctggcacgagacacgcggtggcccacggcgtctggggacgatctccagcccttcgcacggggcggagcgcccgccttccctccaatcagcacgccgggccggctagccaggggccgcccgcgcgcggggtgtgtgaggacgcgctcccagtcgctgagtgcctgagccgggaagcagttgctgtggtacctgctgctgcccgagcggacgtagagcatcggacgcgggcgccgtggcgctgggcaggagggcgaagccatgacgtcagtcagagaaaatattctctttggaatgggaaatcctctgcttgacatctctgctgtagtggacaaagatttccttgataagtattctctgaaaccaaatgaccaaatcttggctgaagacaaacacaaggaactgtttgatgaacttgtgaaaaaattcaaagtcgaatatcatgctggtggctctacccagaattcaattaaagtggctcagtggatgattcaacagccacacaaagcagcaacattttttggatgcattgggatagataaatttggggagatcctgaagagaaaagctgctgaagcccatgtggatgctcattactacgagcagaatgagcagccaacaggaacttgtgctgcatgcatcactggtgacaacaggtccctcatagctaatcttgctgctgccaattgttataaaaaggaaaaacatcttgatctggagaaaaactggatgttggtagaaaaagcaagagtttgttatatagcaggcttttttcttacagtttccccagagtcagtattaaaggtggctcaccatgcttctgaaaacaacaggattttcactttgaatctatctgcaccgtttattagccagttctacaaggaatcattgatgaaagttatgccttatgttgatatactttttggaaatgagacagaagctgccacttttgctagagagcaaggctttgagactaaagacattaaagagatagccaaaaagacacaagccctgccaaagatgaactcaaagaggcagcgaatcgtgatcttcacccaagggagagatgacactataatggctacaggtacatgtgggaa

SEQ ID NO: 1416 - DNA, 1753 bp, Artificial
  cDNA Sequence
gggacgctgttactaggactcaagatggccaccgcgcccgctagtcatctcgctagcccgcgcgccagtgagctggcacgagacacgcggtggcccacggcgtctggggacgatctccagcccttcgcacggggcggagcgcccgccttccctccaatcagcacgccgggccggctagccaggggccgcccgcgcgcggggtgtgtgaggacgcgctcccagtcgctgagtgcctgagccgggaagcagttgctgtggtacctgctgctgcccgagcggacgtagagcatcggacgcgggcgccgtggcgctgggcaggagggcgaagccatgacgtcagtcagagaaaatattctctttggaatgggaaatcctctgcttgacatctctgctgtagtggacaaagatttccttgataagtattctctgaaaccaaatgaccaaatcttggctgaagacaaacacaaggaactgtttgatgaacttgtgaaaaaattcaaagtcgaatatcatgctggtggctctacccagaattcaattaaagtggctcagtggatgattcaacagccacacaaagcagcaacattttttggatgcattgggatagataaatttggggagatcctgaagagaaaagctgctgaagcccatgtggatgctcattactacgagcagaatgagcagccaacaggaacttgtgctgcatgcatcactggtgacaacaggtccctcatagctaatcttgctgctgccaattgttataaaaaggaaaaacatcttgatctggagaaaaactggatgttggtagaaaaagcaagagtttgttatatagcaggcttttttcttacagtttccccagagtcagtattaaaggtggctcaccatgcttctgaaaacaacaggattttcactttgaatctatctgcaccgtttattagccagttctacaaggaatcattgatgaaagttatgccttatgttgatatactttttggaaatgagacaacttaccacatctgagagaaacctgacatgtgggcatacttcagcgatccttaatagagtggccctcttgcttccaagtgtcttgaagctgccagccagatctctaacatacgtcagtacaggaaaaggcaagagaaggattgtgaaagctgtcatctataggtttcttcgacttcattgtggcctttggatgagaagggctggttataagaaaaaattatggaaaaaggcacctgcaagaaaaaagcgattgagggaatttgtattcggcaataaaacccagagtaaactcttaagataaaatgacgacgtccttctggaagaggtgaaactggtatgtccatgatccttatcagaagtgtcatgatcgaacaaacctgaaagtatagatcagaagtttcacttgtttctcagttattgaatatgtatctttgtgtacatatctgcaaaaatggataagtaaaaatctcgatgtaaattgtatcaatgaatatgtaaacatacagtgacaacactgaacttataaaagttttaaaacttaaaaaaaaagctcaaatttgtaaaagacatgtaaaaagaaggtggaaaatgtatttagaatcagggaatgatgctaaaagtttggtagagacaaaagagaaaagaaagtcccaaaagtggtttaagtttgcagcagatgctgatgatatcaaaacaatcttcacttaaaaaaaaaaaaaagactccaaagtacaagcaacaaatggaa

SEQ ID NO: 1417 - DNA, 1404 bp, Artificial
  cDNA Sequence
ctgcggacccgggcggctggcaaaggacgaggcggaggctgaggaaggcagcggggagacccaggctgcagcaacaaagggcagcgagcgattggccgggctgcaggcgagatttgcctgaagacctggataatctccatttttgtcatggactgttaaaacgtttgaagttccaattctggtcttgatttcccagttaaagatgttcttcacccgaatgcagtctttcctgttggtaaaataagacaaccatcaacattgcctgtttgtctgcttttgaatctcttaaggatggatgtttgtaagatgttgcttaatacagtctggaatactctgtccatttgttgaattgtaaatgactttcaaatgtgcaagttctgttaaatacaaagagaacctctatgggtaacttttgtgttgaagaagtcatttgtcaaccatggtaaaacttgcaaacccactttatacagagtggattcttgaagctatacagaaaataaaaaagcaaaagcaaaggccctctgaagagagaatctgccatgcggtcagtacttcccatgggttggataagaagacagtctctgaacagctggaactcagtgttcaggatggctcagttctcaaagtcaccaacaaaggccttgcctcctataaggacccagacaaccctgggcgcttttcatcagttaaaccaggcacttttcctaagtcagccaaggggtctagaggatcatgtaatgatctccgcaatgtggattggaataaacttttaaggagagcaattgaaggacttgaggagccgaatggctcctccctgaagaacatagagaagtatctcagaagtcaaagtgatctcacaagcaccaccaacaacccagcctttcagcagcggctgcgactgggggccaaacgcgctgtgaataatgggaggttactgaaagacggaccgcagtacagggtcaattatgggagcttagatggcaaaggggcacctcagtatcccagtgcattcccatcctcgctcccacctgtcagccttctaccccatgagaaagaccagccccgtgctgatcccattccaatatgtagcttctgtttggggactaaagaatcaaatcgtgaaaagaaaccagaagaactcctctcttgtgcagattgtggcagtagtggacacccatcctgtttgaaattttgtcctgaattaacaacaaatgtaaaggccttaaggtggcagtgcatcgaatgcaagacatgcagtgcctgtagagtccaaggcagaaatgctgataatatgcttttttgtgattcctgtgatagaggatttcatatggaatgctgtgacccaccactttccagaatgccaaaagggatgtggatttgccaagtctgcagaccaaagaaaaa

SEQ ID NO: 1418 - DNA, 1171 bp, Artificial
  cDNA Sequence
ctgcggacccgggcggctggcaaaggacgaggcggaggctgaggaaggcagcggggagacccaggctgcagcaacaaagggcagcgagcgattggccgggctgcaggcgagatttgcctgaagacctggataatctccatttttgtcatggactgttaaaacgtttgaagttccaattctggtcttgatttcccagttaaagatgttcttcacccgaatgcagtctttcctgttggtaaaataagacaaccatcaacattgcctgtttgtctgcttttgaatctcttaaggatggatgtttgtaagatgttgcttaatacagtctggaatactctgtccatttgttgaattgtaaatgactttcaaatgtgcaagttctgttaaatacaaagagaacctctatgggtaacttttgtgttgaagaagtcatttgtcaaccatggtaaaacttgcaaacccactttatacagagtggattcttgaagctatacagaaaataaaaaagcaaaagcaaaggccctctgaagagagaatctgccatgcggtcagtacttcccatgggttggataagaagacagtctctgaacagctggaactcagtgttcaggatggctcagttctcaaagtcaccaacaaaggccttgcctcctataaggacccagacaaccctgggcgcttttcatcagttaaaccaggcacttttcctaagtcagccaaggggtctagaggatcatgtaatgatctccgcaatgtggattggaataaacttttaaggagagcaattgaaggacttgaggagccgaatggctcctccctgaagaacatagagaagtatctcagaagtcaaagtgatctcacaagcaccaccaacaacccagcctttcagcagcggctgcgactgggggccaaacgcgctgtgaataatgggaggttactgaaagacggaccgcagtacagggtcaattatgggagcttagatggcaaaggggcacctcagtatcccagtgcattcccatcctcgctcccacctgtcagccttctaccccatgagaaagaccaggtaagcgaaggagtaatgttcgtgcattctcactactgtccttttgtcttttacggtttcacttaagttttatgtggacaaaagttctgaataaagtttgataaaattgaa

SEQ ID NO: 1419 - DNA, 1458 bp, Artificial
  cDNA Sequence
caacgacaacaacagggggacacaaaatggcggcggcttagctcctacccctggcggcggcggcagcggtggcggaggcgacggcacctcctccaggcggcagccgcagtttctcaggcagcggcagcgcccccggcaggcgcggtggcggtggcgcgcagccagatttgcctgaagacctggataatctccatttttgtcatggactgttaaaacgtttgaagttccaattctggtcttgatttcccagttaaagatgttcttcacccgaatgcagtctttcctgttggtaaaataagacaaccatcaacattgcctgtttgtctgcttttgaatctcttaaggatggatgtttgtaagatgttgcttaatacagtctggaatactctgtccatttgttgaattgtaaatgactttcaaatgtgcaagttctgttaaatacaaagagaacctctatgggtaacttttgtgttgaagaagtcatttgtcaaccatggtaaaacttgcaaacccactttatacagagtggattcttgaagctatacagaaaataaaaaagcaaaagcaaaggccctctgaagagagaatctgccatgcggtcagtacttcccatgggttggataagaagacagtctctgaacagctggaactcagtgttcaggatggctcagttctcaaagtcaccaacaaaggccttgcctcctataaggacccagacaaccctgggcgcttttcatcagttaaaccaggcacttttcctaagtcagccaaggggtctagaggatcatgtaatgatctccgcaatgtggattggaataaacttttaaggagagcaattgaaggacttgaggagccgaatggctcctccctgaagaacatagagaagtatctcagaagtcaaagtgatctcacaagcaccaccaacaacccagcctttcagcagcggctgcgactgggggccaaacgcgctgtgaataatgggaggttactgaaagacggaccgcagtacagggtcaattatgggagcttagatggcaaaggggcacctcagtatcccagtgcattcccatcctcgctcccacctgtcagccttctaccccatgagaaagaccagccccgtgctgatcccattccaatatgtagcttctgtttggggactaaagaatcaaatcgtgaaaagaaaccagaagaactcctctcttgtgcagattgtggcagtagtggacacccatcctgtttgaaattttgtcctgaattaacaacaaatgtaaaggccttaaggtggcagtgcatcgaatgcaagacatgcagtgcctgtagagtccaaggcagaaatgctgataatatgcttttttgtgattcctgtgatagaggatttcatatggaatgctgtgacccaccactttccagaatgccaaaagggatgtggatttgccaagtctgcagaccaaagaaaaa

SEQ ID NO: 1420 - DNA, 1225 bp, Artificial
  cDNA Sequence
caacgacaacaacagggggacacaaaatggcggcggcttagctcctacccctggcggcggcggcagcggtggcggaggcgacggcacctcctccaggcggcagccgcagtttctcaggcagcggcagcgcccccggcaggcgcggtggcggtggcgcgcagccagatttgcctgaagacctggataatctccatttttgtcatggactgttaaaacgtttgaagttccaattctggtcttgatttcccagttaaagatgttcttcacccgaatgcagtctttcctgttggtaaaataagacaaccatcaacattgcctgtttgtctgcttttgaatctcttaaggatggatgtttgtaagatgttgcttaatacagtctggaatactctgtccatttgttgaattgtaaatgactttcaaatgtgcaagttctgttaaatacaaagagaacctctatgggtaacttttgtgttgaagaagtcatttgtcaaccatggtaaaacttgcaaacccactttatacagagtggattcttgaagctatacagaaaataaaaaagcaaaagcaaaggccctctgaagagagaatctgccatgcggtcagtacttcccatgggttggataagaagacagtctctgaacagctggaactcagtgttcaggatggctcagttctcaaagtcaccaacaaaggccttgcctcctataaggacccagacaaccctgggcgcttttcatcagttaaaccaggcacttttcctaagtcagccaaggggtctagaggatcatgtaatgatctccgcaatgtggattggaataaacttttaaggagagcaattgaaggacttgaggagccgaatggctcctccctgaagaacatagagaagtatctcagaagtcaaagtgatctcacaagcaccaccaacaacccagcctttcagcagcggctgcgactgggggccaaacgcgctgtgaataatgggaggttactgaaagacggaccgcagtacagggtcaattatgggagcttagatggcaaaggggcacctcagtatcccagtgcattcccatcctcgctcccacctgtcagccttctaccccatgagaaagaccaggtaagcgaaggagtaatgttcgtgcattctcactactgtccttttgtcttttacggtttcacttaagttttatgtggacaaaagttctgaataaagtttgataaaattgaa

SEQ ID NO: 1421 - DNA, 456 bp, Artificial
  cDNA Sequence
acacaaaatggcggcggcttagctcctacccctggcggcggcggcagcggtggcggaggcgacggcacctcctccaggcggcagccgcagtttctcaggcagcggcagcgcccccggcaggcgcggtggcggtggcgcgcagccaggtcttgatttcccagttaaagatgttcttcacccgaatgcagtctttcctgttggtaaaataagacaaccatcaacattgcctgtttgtctgcttttgaatctcttaaggatggatgtttgtaagatgttgcttaatacagtctggaatactctgtccatttgttgaattgtaaatgactttcaaatgtgcaagttctgttaaatacaaagagaacctctatgggtaacttttgtgttgaagaagtcatttgtcaaccatggtaaaacttgcaaacccactttatacagagtggattcttgaagctatac

SEQ ID NO: 1422 - DNA, 631 bp, Artificial
  cDNA Sequence
actgttggagacttctctggtaaagtgcttctgccccaagcagaggcatatgtacagttagcatttcacatatccactgccacaactccttctcttacatgtacaactttccatcaccacctgaagacagagagataagcacacccactcacaaaaacatacttccctcttggccctgctaactcaaaatgtcacatgcaaattacatggctgacgcatttgctaactttaatttggtgagctaattgatgtttatgtactcagaaacattaatagattggagagatcaaagtacctgagaagattcaggttcatattttaaatgctagtgtgatcagagaacagtttcacctaatctactgtagtttaaggcacagggccaagaaaaggaagtttataaacaaaacaaaaagtcaagaattttacaattaaaacacattgctactgtcatgataaaacaatgggctgggcgtggtggggcatgcctctaatcccagcactttgggaggccgaggtgggcagatcacaaggtcaggaatagagtctcactctgttgcccaagctgaagtgcagtgtcacgatctcggctcactgcaacctccgccccccgggttcaagcgattctcctgcc

SEQ ID NO: 1423 - DNA, 1955 bp, Artificial
  cDNA Sequence
gagggaccccagactgcgttaggcagcagatgaccgcctgaatctagatggagagaaacccaccatttttctaggccctggattatgtagaagatttagatactaagcctcaagagacgtctttcctctcatttacggtcttcctgcatatttaaaatttctaatacggtagacagagtcggtgtctttgaagctgttaatcaggcaatttcctgggcactccagctgcgggtcctcgcggccttctcggcttctccagcttcggtaggagaggatccggcgccgaatcactgactggcacaggtgttgggaaaatgatccacagtctatttctcataaactgttccggtgacatatttctagagaagcactggaagagcgttgtgagccagtctgtctgtgattatttctttgaagctcaagagaaagctgctgatgttgaaaatgtaccacctgtcatttcaacacctcaccactacctcatcagtatctaccgggataagctcttctttgtatctgtcatacagaccgaagtgccacctctctttgtaattgagttcctacatcgagttgctgacacttttcaggactactttggtgagtgttcagaggctgcaattaaggataatgtggtcatagtatatgaactcttagaagaaatgttagacaatggatttccactggctaccgaatctaacattttgaaagaattgattaaaccaccaacaattctacgctctgttgtcaactctattacaggcagtagtaatgttggggacacactccccaccgggcagctgtccaacataccatggcgtcgggcaggggtaaagtacacaaacaatgaagcctattttgatgttgttgaagaaatagacgcaattatagataaatcaggatctacagtctttgcagaaattcagggggtcattgatgcttgcattaaactatctggaatgcctgatctctccctttctttcatgaaccctaggcttctggatgatgtcagctttcacccctgcatccggttcaagcgttgggaatctgaaagagttttgtcatttattcctccagatggaaatttccgactcatatcataccgtgtcagctcacaaaatctagtggcaataccagtgtatgtgaaacatagtatcagctttaaggagaacagttcttgcggcagatttgatataacaattggaccaaagcagaatatggggaaaactattgaaggaattacagtgacagttcacatgccaaaagttgtgctgaacatgaacctgacacccacacaaggcagctatacatttgatccagtcaccaaggtactaacatgggatgtgggaaaaattactccacaaaagctcccaagtcttaaaggactggtaaatttacagtctggagcccccaaaccagaagagaatccgagcctcaacatacagtttaagatccagcagcttgctatttcaggcttaaaagtaaaccgtttggacatgtatggggagaaatataagccatttaaaggagtcaaatacgtcacgaaagctggaaagttccaagtgaggacatgagaagaggccaaaattcctcaggaccagtttgttttccaagtgtcattacgatgtatcactattaggtaccaagtgagtgggaatacatattctagttaaagcatttgtgtctagctacacaccgctaacaaagttacttagttatcaatgtaggattcttaaggagctttaagctaaggaaaccttttagtgacttagcttattttgtatcttttcacttaggaagattttggaggtgatttttttccataggaggataccatctggcggctgcacattgtaacagtaaaggcagaaagctgtagtgataacctctctcctaaaagagttaactggtctcatccagcagaagctatcttaaatctgtgatgtgtcaggtgcagc

SEQ ID NO: 1424 - DNA, 466 bp, Artificial
  cDNA Sequence
ttctttcttcaggatctacagtctttgcagaaattcagggggtcattgatgcttgcattaaactatctggaatgcctgatctctccctttctttcatgaaccctaggcttctggatgatgtcagctttcacccctgcatccggttcaagcgttgggaatctgaaagagttttgtcatttattcctccagatggaaatttccgactcatatcataccgtgtcagctcacaaaagtatgttgatgcatcagccagaatctgccatcatacatatcaagtacaactcacctttccctgtttctttctgaaagttgagtacttgaggtcatcactgctcactttaaccatagctcaccaggagacccagtgagaacgggtgaaaatacgcacctaaaataatccgtatactttgaatgtatgagtgtagagtggtactaagtgagactagagtaaaatctatagccaaga

SEQ ID NO: 1425 - DNA, 656 bp, Artificial
  cDNA Sequence
gattttttttttttttttttttaatttgcttcactgtgtctcgagcactgatattggagaaaagcacatccggcataaagtgtaaaccagtgtctcaaaccactggaagaaccgggagagcaaacatgatttttcttatttcctctaagtaatctttctttagtaaaacaacaagtgatctttggcatagattcatactttaaaggcattaatattgcatttatatcaggcaagcaactatacaaatatgctgagggccttgaaaataatcatcctcattataaaggaaatagtgaaagcctgagtgtaaaggaccaacttaagttgtacacattcgatgttgggaactaacacacagcgatgggtgggaaggaaggatgttcaggcaaggttcttactcctttactcatctggttctggctttgggaaaaaataaggtttcatgtgctgggaaatacttagcagtaataagtaccaaaaaggaaacactgccctctcattttgcctagtaggaacttactgtggtgataagaaatatgaaacccattactctcttgaaccccatacttgggagtagatgcagagagcttggttgtagttggttgcagggaggtaggaattacaggataactgatttgcctgggccctgggtcttg

SEQ ID NO: 1426 - DNA, 360 bp, Artificial
  cDNA Sequence
aaacatcacactaaataatgttgagctaatatttttaagaaaacctatcacatagtaaacttttaataactgtacagtttggttttttttcccaatcttcctttgctcccaaacttactagccatgccttgttacacaataagtagaaaaaagaaagttatagaaacagatcaatttaaaaaaaaaaaaaaaactctcacaaagatgtggagaaaagatataaactccaaaatcaaaacaaagtagcctcttaagattatccaagccggccgcatagctgagattacaggcatgtaccaccatgcccggcccacagagttttctcttaaataaatttaagttttaaaaagaagtccattt

SEQ ID NO: 1427 - DNA, 907 bp, Artificial
  cDNA Sequence
ggggtgtgaggagaggagccgctgtttttcactgagctgccataccccgaaagcaggatggagctggagtgaggtggaggggccgcaagctgctgaccggcgtgtggaacactggtggtttgcagatcactgaggctggacaacgttcatggctctcgggtagaacctagtgaaacggccagaatgaattctatggacaggcacatccagcagaccaatgaccgactgcagtgcatcaagcagcacttacagaatcctgccaacttccacaatgccgccacggagctgctggactggtgcggagacccacgggccttccagcggcccttcgagcagagcctgatgggctgtttgacggtggtcagtcgggtggcagcccagcaaggctttgacctggacctcggctacagactgctggctgtgtgtgctgcaaaccgagacaagttcaccccgaagtctgccgccttgttgtcctcctggtgcgaagagctcggccgcctgctgctgctccgacatcagaagagccgccagagcgatccccctgggaaactccccatgcagccccctctcagctccatgagctccatgaaacccactctgtcgcacagtgatgggtcgttcccctatgactctgtcccttggcagcagaacaccaaccagcctcccggctccctttccgtggtcaccacggtttggggagtaaccaacacatcccagagccaggtccttgggaaccctatggccaatgccaacaaccccatgaatccaggcggcaaccccatggcgtcgggcatgaccaccagcaacccaggcctcaactccccacagtttgcggggcagcagcagcagttctcagccaaggctggccccgctcagccctacatccagcagagcatgtatggccggc

SEQ ID NO: 1428 - DNA, 514 bp, Artificial
  cDNA Sequence
cggccgccgccggccgggccccaagcccccgagggcgccagggcgggatcgcgaccggtgcaacttctagccttgttgtcctcctggtgcgaagagctcggccgcctgctgctgctccgacatcagaagagccgccagagcgatccccctgggaaactccccatgcagccccctctcagctccatgagctccatgaaacccactctgtcgcacagtgatgggtcgttcccctatgactctgtcccttggcagcagaacaccaaccagcctcccggctccctttccgtggtcaccacggtttggggagtaaccaacacatcccagagccaggtccttgggaaccctatggccaatgccaacaaccccatgaatccaggcggcaaccccatggcgtcgggcatgaccaccagcaacccaggcctcaactccccacagtttgcggggcagcagcagcagttctcagccaaggctggccccgctcagccctacatccagcagagcatgtatggccggc

SEQ ID NO: 1429 - DNA, 473 bp, Artificial
  cDNA Sequence
atggagatgatcgcagccctgggccccggcccgtccccctatcccctcccgcctcccccagggggcaccaactccaacgactacagcagccaaggcaacaactaccaaggccatggcaactttgacttcccccacgggaaccctggagggacatccatgaatgacttcatgcacgggcccccccagctctcccaccccccggacatgcccaacaacatggccgccctcgagaaacccctcagccaccccatgcaggaaactctccttcccgaactcacaaatcctgacgagctcctgtcttatctggacccccccgacctgccgagcaatagtaacgatgacctcctgtctctatttgagaacaactgagggccacccggtcggggccatccctccacactctgcatcctaccccacctacccaacacacttttccacctgggagcctgtgccctcagaccgccccgcaccag

SEQ ID NO: 1430 - DNA, 848 bp, Artificial
  cDNA Sequence
actcggccttctgggcgcgcgcgacgtcagtttgagttctgtgttctccccgcccgtgtcccgcccgacccgcgcccgcgatgctggcgctgcgctgcggctcccgctggctcggcctgctctccgtcccgcgctccgtgccgctgcgcctccccgcggcccgcgcctgcagcaagggctccggcgacccgtcctcttcctcctcctccgggaacccgctcgtgtacctggacgtggacgccaacgggaagccgctcggccgcgtggtgctggagctgaaggcagatgtcgtcccaaagacagctgagaacttcagagccctgtgcactggtgagaagggcttcggctacaaaggctccaccttccacagggtgatcccttccttcatgtgccaggcgggcgacttcaccaaccacaatggcacaggcgggaagtccatctacggaagccgctttcctgacgagaactttacactgaagcacgtggggccaggtgtcctgtccatggctaatgctggtcctaacaccaacggctcccagttcttcatctgcaccataaagacagactggttggatggcaagcatgttgtgttcggtcacgtcaaagagggcatggacgtcgtgaagaaaatagaatctttcggctctaagagtgggaggacatccaagaagattgtcatcacagactgtggccagttgagctaatctgtggccagggtgctggcatggtggcagctgcaaatgtccatgcacccaggtggccgcgttgggctgtcagccaaggtgcctgaaacgatacgtgtgcccactccactgtcacagtgtgcctgaggaaggctgctagggatg

SEQ ID NO: 1431 - DNA, 506 bp, Artificial
  cDNA Sequence
tgcttttaaaagtccttttaatacagcatgaagaggctatatttctataggcgagccgtatacagattctccaggaataaggcacacaacggaatgccatcccaagggctgcacttcggagacgtcggagccttctccacgcaccttccgagctgggcccacgggttctgttttgtctttttagctggactcacacgtatggacagacacagacacggacggggtcaccgcatgggggcggaggaggtcggacggcaagaatggtgtgattttcgtggtgcctgccctgccatggccgggggcagcaggcacacatgacttgagttggcattcctgacctagatgatccctaaagatccttccaatgcaaatagttccatgagtagacagcacacaggcttgagaagtggacagagtccaagtcctggccactgcttctgcacacctctgggcatgtaacagaggctagtttttgccaggcttgggccacttgggtgctgggcttt

SEQ ID NO: 1432 - DNA, 478 bp, Artificial
  cDNA Sequence
gcggccgcattgctgtcccaaggaatccagaggaaaatgaggccattgcaagcttcgtgaagaagtacaacacatatgcctatgtaggcctgactgagggtcccagccctggagacttccgctactcagacgggacccctgtaaactacaccaactggtaccgaggggagcccgcaggtcggggaaaagagcagtgtgtggagatgtacacagatgggcagtggaatgacaggaactgcctgtactcccgactgaccatctagcttatgtcttcatctgtgaaatgggaataagatacttgttgctgtcacagttattaccatccccccagctaccaaaattactaccagaactgttactatacacagaggctattgactgagcacctatcatttgccaagaaccttgacaagcacttctaatacagcatattatgtactattcaatcttcacacaatgtcacgggaccagtattgtt

SEQ ID NO: 1433 - DNA, 601 bp, Artificial
  cDNA Sequence
ggcaggcaacgtgttggaccttccggagcttctcagaagacagagggttttcttttgagatccctcccgtagctgtcatacagagtgcgatttatgacttgtaagttgtgctatggagcttgacaagtaagtttgatttcatttaatattttctttaaaccatcttagatcttctctttgacaagtatttcatctgttagtgttctcaaaatgtaaaatgggtaacttaatgagaacaaaaattgtaccctaagacatatttgcactatctacatatttgcaattaaatcttaacagatttaattgtaatagaatctaatggttttcctcttgaatttttttagacaccagaaattttcattactaataaataatgtttagcttcctagtcacaaaccaaacagaaagcaaatttcatcagagtttagaatggttaaaaccaacatagctgcaatatttttagttttgctttaaaattttttgaatcaatcagtaaatcaatcagagttgaccattatgtaatccacagaccttgaaataacagagatatatttctccgcagatcaatatctatatatgtttttaagatgagtagaaattc

SEQ ID NO: 1434 - DNA, 664 bp, Artificial
  cDNA Sequence
tgaacacattcacgatttattaagcttaaatcatctttattcagctcaggagtggggtggctggaagcataagcttcaggtccaggaagatgggtttggatccagcctctgccacttgctctctggaataatactcaaaacatttaactcctccaagcttcagtgtccttataaaaaatgaggaaacaatactggtcccgtgacattgtgtgaagattgaataagcctgaccaggcctgccacagagacctcagagtgccagagaatctccactgtgtccttagctctgcacagtcagggcttccccgaagtctgcctctctctgtcattatgcttggccaggattgctcatcctgatggcactgggttgcagagagagagctgaggggaccaggaggcaggcactttgtgtgactttggagggtccttctaccccaagacctcactgctgccatctgtaagtgaaggaactggaccagatggggaataaggagggctccatctcatgtcgaaggccaaggctaagagtggctgcctgggtgattatggggaagagtcagggcccatcagaggaatgaagtggctaagggtgcctccagtcccaatagccacaagtgaattctgttgaaagggagttctagcatctcacagaccaagtggagcc

SEQ ID NO: 1435 - DNA, 588 bp, Artificial
  cDNA Sequence
tttattaagcttaaatcatctttattcagctcaggagtggggtggctggaagcataagcttcaggtccaggaagatgggtttggatccagcctctgccacttgctctctggaataatactcaaaacatttaactcctccaagcttcagtgtccttataaaaaatgaggaaacaatactggtcccgtgacattgtgtgaagattgaatagtacataatatgctggggctgagttgccattcaaagactcaaaggagtgaatcgtacacatcaatcatggggttggcttggccaccaccctgctggaacactacctggccttctaacctcatggagagcctgaccaggcctgccacagagacctcagagtgccagagaatctccactgtgtccttagctctgcacagtcagggcttccccgaagtctgcctctctctgtcattatgcttggccaggattgctcatcctgatggcactgggttgcagagagagagctgaggggaccaggaggcaggcactttgtgtgactttggagggtccttctaccccaagacctcactgctgccatctgtaagtgaaggaactggacc

SEQ ID NO: 1436 - DNA, 653 bp, Artificial
  cDNA Sequence
tttattaagcttaaatcatctttattcagctcaggagtggggtggctggaagcataagcttcaggtccaggaagatgggtttggatccagcctctgccacttgctctctggaataatactcaaaacatttaactcctccaagcttcagtgtccttataaaaaatgaggaaacaatactgattgaatagtacataatatgctgtattagaagtgcttgtcaaggttcttggcaaatgataggtgctcagtcaatagcctctgtgtatagtaacagttctggtagtaattttggtagctggggggatggtaataactgtgacagcaacaagtatcttattcccatttcacagatgaagacataagctctgggaaaaaaaaatcttcaactgtcactgattaccttgcccaccccacgacatatcctaagacctggcacgtgataattttaatgaaatatctgggtgaatggattaatgaaaggagaaagcagagccagtggtgtggggggtggtgtgaatgcccactgaaatctgaagtagggtgcagatttgttcatcagttgaaagttactcgggtcacatctgaaggcggctctaggtcaccctagaggcctaggctggctgtcttcaggtcagggggctgagttgccattc

SEQ ID NO: 1437 - DNA, 531 bp, Artificial
  cDNA Sequence
tttattaagcttaaatcatctttattcagctcaggagtggggtggctggaagcataagcttcaggtccaggaagatgggtttggatccagcctctgccacttgctctctggaataatactcaaaacatttaactcctccaagcttcagtgtccttataaaaaatgaggaaacaatactggtcccgtgacattgtgtgaagattgaatagtacataatatgctgtattagaagtgcttgtcaaggttcttggcaaatgataggtgctcattctggtagtaattttggtagctggggggatggtaataactgtgacagcaacaagtatcttattcccatttcacagatgaagacataagctctgggaaaaaaaaatcttcaactgtcactgattaccttgcccaccccacgacatatcctaagacctggcacgtgataattttaatgaaatatctgggtgaatggattaatgaaaggagaaagcagagccagtggtgtggggggtggtgtgaatgcccactgaaatctgaagt

SEQ ID NO: 1438 - DNA, 669 bp, Artificial
  cDNA Sequence
ctcaaaacatttaactcctccaagcttcagtgtccttataaaaaatgaggaaacaatactggtcccgtgacattgtgtaaagattgaatagtacataatatgctgtattagaagtgcttgtcaaggttcttggcaaatgataggtgctcagtcaatagcctctgtgtatagtaacagttctggtagtaattttggtagctggggggatggtaataactgtgacagcaacaagtatcttattcccatttcacagatgaagacataagctctgggaaaaaaaaatcttcaactgtcactgattaccttgcccaccccacgacatatcctaagacctggcacgtgataattttaatgaaatatctgggtgaatggattaatgaaaggagaaagcagagccagtggtgtggggggtggtgtgaatgcccactgaaatctgaagtagggtgcagatttgttcatcagttgaaagttactcgggtcacatctgaaggcggctctaggtcaccctagaggcctaggctggctgtcttcaggtcagggggctgagttgccattcaaagactcaaaggagtgaatcagcctgaccaggcctgccacagagacctcagagtgccagagaatctccactgtgtccttagctctgcacagtcagggcttccccgaagtctg

SEQ ID NO: 1439 - DNA, 562 bp, Artificial
  cDNA Sequence
cagagacccaagcagctggaggctctgtgtgtgggtcgctgatttcttggagcctgaaaagaaggagcagcgactggacccagagccatgtggctgtgccctctggccctcaccctcatcttgatggcagcctctggtgctgcgtgcgaagtgaaggacgtttgtgttggaagccctggtatccccggcactcctggatcccacggcctgccaggcagggacgggagagatggtgtcaaaggagaccctggccctccaggccccatgggtccgcctggagaaacaccatgtcctcctgggaataatgggctgcctggagcccctggtgtccctggagagcgtggagagaagggggaggctggcgagagaggccctccagggcttccagctcatctagatgaggagctccaagccacactccacgacttcagacatcaaatcctgcagacaaggggagccctcagtctgcagggctccataatgacagtaggagagaaggtcttctccagcaatgggcagtccatcacttttgatgccattcaggaggcatgtgccagagcag

SEQ ID NO: 1440 - DNA, 726 bp, Artificial
  cDNA Sequence
cagagacccaagcagctggaggctctgtgtgtggatccatccctaccagggactcagcagggcctaagcagggggagtgggagaacagaccccaagaggaaggaagacctcatcactgactgtgagagggtcatcaccccccgatgatcaccttgaagggtccaggctgtgggccctattcatctcttttcattctcaggtcgctgatttcttggagcctgaaaagaaggagcagcgactggacccagagccatgtggctgtgccctctggccctcaccctcatcttgatggcagcctctggtgctgcgtgcgaagtgaaggacgtttgtgttggaagccctggtatccccggcactcctggatcccacggcctgccaggcagggacgggagagatggtgtcaaaggagaccctggccctccaggccccatgggtccgcctggagaaacaccatgtcctcctgggaataatgggctgcctggagcccctggtgtccctggagagcgtggagagaagggggaggctggcgagagaggccctccagggcttccagctcatctagatgaggagctccaagccacactccacgacttcagacatcaaatcctgcagacaaggggagccctcagtctgcagggctccataatgacagtaggagagaaggtcttctccagcaatgggcagtccatcacttttgatgccattcaggaggcatgtgccagagca

SEQ ID NO: 1441 - DNA, 721 bp, Artificial
  cDNA Sequence
cagctggaggctctgtgtgtggcagtcttgagaccccacaacctccagccggaggcctgaagcatgaggccatgccaggtgccaggtgatgcttggaattttcccgggtgcttcgggtcttcccagcactctggtctcgcccgccctgcctctcgggctctgcccagcttcctgagtcctgacagagcacagtgggggagatgttggcagaggtggcagatgggctcacggccatccctccggcaggagcagcgactggacccagagccatgtggctgtgccctctggccctcaccctcatcttgatggcagcctctggtgctgcgtgcgaagtgaaggacgtttgtgttggaagccctggtatccccggcactcctggatcccacggcctgccaggcagggacgggagagatggtgtcaaaggagaccctggccctccaggccccatgggtccgcctggagaaacaccatgtcctcctgggaataatgggctgcctggagcccctggtgtccctggagagcgtggagagaagggggaggctggcgagagaggccctccagggcttccagctcatctagatgaggagctccaagccacactccacgacttcagacatcaaatcctgcagacaaggggagccctcagtctgcagggctccataatgacagtaggagagaaggtcttctccagcaatgggcagtccatcacttttgatgccat

SEQ ID NO: 1442 - DNA, 644 bp, Artificial
  cDNA Sequence
gccagtttcccagggtaacatagtgaggcactgaaagaaaggagactgcactggagcccaggtccctgggctccccagagctccttactcttcctcctcctcagcagtcttgagaccccacaacctccagccggaggcctgaagcatgaggccatgccaggtgccaggtgatgcttggaattttcccgggtgcttcgggtcttcccagcactctggtctcgcccgccctgcctctcgggctctgcccagcttcctgagtcctgacagagcacagtgggggagatgttggcagaggtggcagatgggctcacggccatccctccggcaggagcagcgactggacccagagccatgtggctgtgccctctggccctcaccctcatcttgatggcagcctctggtgctgcgtgcgaagtgaaggacgtttgtgttggaagccctggtatccccggcactcctggatcccacggcctgccaggcagggacgggagagatggtgtcaaaggagaccctggccctccaggccccatgggtccgcctggagaaacaccatgtcctcctgggaataatgggctgcctggagcccctggtgtccctggagagcgtggagagaagggggaggctggcgagagaggccctccagg

SEQ ID NO: 1443 - DNA, 562 bp, Artificial; identical to SEQ ID NO: 1439
  cDNA Sequence

SEQ ID NO: 1444 - DNA, 726 bp, Artificial; identical to SEQ ID NO: 1440
  cDNA Sequence

SEQ ID NO: 1445 - DNA, 721 bp, Artificial; identical to SEQ ID NO: 1441
  cDNA Sequence

SEQ ID NO: 1446 - DNA, 333 bp, Artificial
  cDNA Sequence
ctacttcaataatctccacttgtggtccctgggacttcagccacctcctccaccagggtctcttctagtacatctgccacctcctccacttgcctggcctctgctatctgaaccaactcctctgggacctcaaccagctcctctacccattgtggcctgtaagacctcaaccaccaactccacatgtaccacttggataattttgaaatttgaagagtctcctgggccatgatatcttggaaaagtctccaccatatttgatgctccatgccccgtgctccctcctctctctctcatttccagtgtttccctttagaaacatttgcagtccta

SEQ ID NO: 1447 - DNA, 455 bp, Artificial
  cDNA Sequence
ttatttattatctgtttacttccatgggatatagtctccataagagagtagtcatcattgtatttgttgatgcttaataaataatcattgaatgggccgggcatgagccaccgtgcctggcctgaagatggcacttttaaaaagatttttttctaagtaaaatggcccccaaagagcccaatgatttttttaagggtttatttttcattttaaaaaaactggataaaaatgaaagctgtaaaatatgggaagaggagcaagagagctgctgagtttgcatttgaaattgtgaggggctggggaggacacgaccaggtagagaggacccctacccactagtccctgctctcacagcttgcgctccccacactcaggctgcaccaccagggaacacaggacagaagtctagaggacaagagaccaaactcaagtcttctttcttgtggttggttggg

SEQ ID NO: 1448 - DNA, 333 bp, Artificial; identical to SEQ ID NO: 1446
  cDNA Sequence

SEQ ID NO: 1449 - DNA, 638 bp, Artificial
  cDNA Sequence
ggcacaggctccccggtgcccgcccctccgctgcggaggggggccgcgagcgggcggccggggaggggccggcaccgccgccacaaaatgagcctgctgtcggccatcgacacgagcgccgcctcggtgtaccagcccgcccagctgctcaactgggtctacctgtcgctgcaggacacgcaccaggctagcgccttcgatgccttccggcccgagccgaccgccggcgccgcacccccggagctggccttcggcaagggccgccccgagcagctgggctcgcccctgcactccagctatctcaacagcttcttccagctgcagcgcggagaggcgctgagcaacagtgtgtacaagggcgcctcaccctatggctccctcaacaacatcgccgatggcctcagctccctcaccgagcacttctcagacctgaccctcacctccgaggctcgcaagcccagcaagcggcccccacccaactacctgtgccacctgtgcttcaacaaaggacactacatcaaggactgcccccaggcacgccccaaaggcgagggcctgactccataccagggcaaaaagcgctgcttcggcgagtacaagtgtcccaagtgcaagagaaaatggatgagcgggaactc

SEQ ID NO: 1450 - DNA, 381 bp, Artificial
  cDNA Sequence
cggccgcccgctctccccggcgcccgccgccgccgctcgcttttttaatgtccacagacagtgaaaaggaactcggcgttagggggctgccaccgtgtcggaggcgaggcgaggaagggagctggaataacaaaggcaagtaatggggtagattggatacctctggggtcttggaagaagctatgacttatttactgtctactatgtgaaatgactggactcttctatggacccagtggagctcagacaagggtccaggccctgacactgccccagagcaggggtgccagcacctatgaggatgccaagctcaggtcatcgccctgcggtgtctcagccaactgggcctcgaacagccccataaacttggacataaacaca

SEQ ID NO: 1451 - DNA, 461 bp, Artificial
  cDNA Sequence
aaaaaataatataagtatttctggtagttgaagccattgctgcaatgatataatactaaaattaattaaatattacagaactgatgaaatacaaaaagaagacttttgcttacagccataatggagcaaacgataatagatctgacttcctaccagggcaaaaatacagaaaattgaacaaaatatatcaaatgactgctttcagacactgcacagtatgcaactctctaagaaaatggtggcctggccaggcgtggtgactcacacctctgctattgctatccctatcccattatttaaaatgttcagcagaggagacaggcagaccttgaagcacagtgtttcctaagtattgccttagcatgttgaattctttgaaacatcttatttcatagacgaatattaacaataccaaatgatccgagcaagaaattctgatacagagttaagccagaaatcaa

SEQ ID NO: 1452 - DNA, 3122 bp, Artificial
  cDNA Sequence
cggccgccttgtgtgtgccaggagagtggcagtgccatgctgctgggagctgccccggagagcagcccaggaccccggcggggccgcccctcgtcctctctcgtccccgaggggtcgggcaggaaggaaaatcaaactttattcccctctgtgacttcctctgtgtgtgtgcatggggaaccggctccctcgagatggatgctgcattgcttcaggaggcaagcttcatcctcttgggtccttaaaggtgcttttgggggtcctttcgagggctactgtataagcgtgttcacgcgtgcctgaagcgggaagggtggtcagcaggcacaggagaagcgaatatggtacaccagaggatcgcttcctggcagaatttgggagctgtttattgcagcactgttgtgccctctgatgatgttacagtggtttatcaaaatgggttacctgtgatatctgtgaggctaccatcccggcgtgaacgctgtcagttcacactcaagcctatctctgactctgttggtgtatttttacgacaactgcaagaagaggatcggggaattgacagagttgctatctattcaccagatggtgttcgcgttgctgcttcaacaggaatagacctcctcctccttgatgactttaagctggtcattaatgacttaacataccacgtacgaccaccaaaaagagacctcttaagtcatgaaaatgcagcaacgctgaatgatgtaaagacattggtccagcaactatacaccacactgtgcattgagcagcaccagttaaacaaggaaagggagcttattgaaagactagaggatctcaaagagcagctggctcccctggaaaaggtacgaattgagattagcagaaaagctgagaagaggaccactttggtgctatggggtggccttgcctacatggccacacagtttggcattttggcccggcttacctggtgggaatattcctgggacatcatggagccagtaacatacttcatcacttatggaagtgccatggcaatgtatgcatattttgtaatgacacgccaggaatatgtttatccagaagccagagacagacaatacttactatttttccataaaggagccaaaaagtcacgttttgacctagagaaatacaatcaactcaaggatgcaattgctcaggcagaaatggaccttaagagactgagagacccattacaagtacatctgcctctccgacaaattggtgaaaaagattgatctgcaaaaagcctctgaatcctggcagaaggaacacctgtttgcctttttaattaaagcattgcaggtggaagctgggagccatgtggggggtagagcgtttttacctttaattataaaacaaaaacagaaaggatctgagggaagaagggaatgttaaaacctgaggatcaggcattgtggaatataagctcaaagggcttagtgaatattgtcttaaccaagtatctcagtttctggatgaaaatgatgcagttatatagttgagagattcataaagagaaaacaatgctgggggtgttcgtttcttgcatcttctttgcagagtcagcaaaagagtaacacaccagcaccccactcgactctatttgtttttaatttaactgtccctatttttgacataggagtaaataaatatactagaaaagcaaattctcatgatatgctaaaatatcattagcatttattttaaattggacccagtctctgcagagttaccaggaatctttccttccagcatccctttactgaccacctacctgtacctcttggttacactcattttttccatttgataattggaaccaacttataactgtttaataattgacactttagattatctcttaataccttcttaaatgtctatatatcccagtgctctggatcagtgtctaaaaatcactggcaacactgcatgaggttgttggttttgttttgttttattaattagtctttcacaggaggaataattgccctcctttatatacttatctattgataatcccctctccctccagaacacaaatcagagggaaagggggtgttcagctgtactaccaaatcaggaagatgtaaggtttacaaattggctaagaatcatggctctgtagccatttcaaccagaataattttattgctaatctgctttgtgtgacagcattccaggccagccagatgggactgccttgtctggaggctttgttcatctcgaaggacacacacttccacactgtttgtgagccctcccacctccacaacttcagttgtaaatcaagtgtgtggatctcaaagggtgcaatttatctttatataggaatacatttctagggcttccttcaagcccactctcttcaccctattttttcttatcttaaattgagagaaagagaattaatcttatactttgtcaaaacattttctaccatatttccagatgacatctgcgcttgaagagtcaaaggaatctgtgtctaatatcctgtttttaactgctgtaggggcaggatggaaaggatgatgggggctgccacaccactgattggccttttctttcacgtgattcatccttcctcattgtggcaaggagtttctttctctttttcttcctcctttgggatcattgtgtatgaaaagaaaaactttaaatgacaaacccagactccaggtgccttgcaaaggttgaaggccagccaggattgctgctgctgctgctactcctgccaacacccctttcattggcatgacggaatgaaaggatgcatgtctccacttcctgaccctccgcccacttccttctccctccaccacccccagtcgtcagctccttccctcatttatttttgttaagttgtgtgaattatttttaacccatttatcctgtttgtgcatagggtttttaagaagaaacagcacagtgcaacgagcaaatctttttggggtgtgtgggaagcaagggagggaggacatggagaaaagttctttaaacaaatagcaaactattgaacatgtgtaaaatcctgtatcatttatgaaatatgtataaaaagcaatgtaccttctggaacaataaatacttattcaatttttgaa

SEQ ID NO: 1453 - DNA, 1173 bp, Artificial
  cDNA Sequence
cggccgccttgtgtgtgccaggagagtggcagtgccatgctgctgggagctgccccggagagcagcccaggaccccggcggggccgcccctcgtcctctctcgtccccgaggggtcgggcaggaaggaaaatcaaactttattcccctctgtgacttcctctgtgtgtgtgcatggggaaccggctccctcgagatggatgctgcattgcttcaggaggcaagcttcatcctcttgggtccttaaaggtgcttttgggggtcctttcgagggctactgtataagcgtgttcacgcgtgcctgaagcgggaagggtggtcagcaggcacaggagaagcgaatatggtacaccagaggatcgcttcctggcagaatttgggagctgtttattgcagcactgttgtgccctctgatgatgttacagtggtttatcaaaatgggttacctgtgatatctgtgaggctaccatcccggcgtgaacgctgtcagttcacactcaagcctatctctgactctgttggtgtatttttacgacaactgcaagaagaggatcggggaattgacagagttgctatctattcaccagatggtgttcgcgttgctgcttcaacaggaatagacctcctcctccttgatgactttaagctggtcattaatgacttaacataccacgtacgaccaccaaaaagagacctcttaagtcatgaaaatgcagcaacgctgaatgatgtaaagacattggtccagcaactatacaccacactgtgcattgagcagcaccagttaaacaaggaaagggagcttattgaaagactagaggatctcaaagagcagctggctcccctggaaaaggtacgaattgagattagcagaaaagctgagaagaggaccactttggtgctatggggtggccttgcctacatggccacacagtttggcattttggcccggcttacctggtgggaatattcctgggacatcatggagccagtaacatacttcatcacttatggaagtgccatggcaatgtatgcatattttgtaatgacacgccaggaatatgtttatccagaagccagagacagacaatacttactatttttccataaaggagccaaaaagtcacgttttgacctagagaaatacaatcaactcaaggatgcaattgctcagg

SEQ ID NO: 1454 - DNA, 2973 bp, Artificial
  cDNA Sequence
ggatgtataatactttgctaaccccagcgtctatctctactgaattattggcaactaatcagtgactatactgaaaagtaccatatgtcagaaaatttttttttgactcaaccagcttccattataggcagtattaagcccatacagctgtcccagtgaccctagatttccaatgtacacctatagaactatgaccattaattatttcacttgttcatatagttcacaggaaaagctgttgttaaatcttcacaaacttgagtcctaaaaacagagcttcaacctaaactttgtttgcataggaaatgaggcaaaaagttaactgaaattttaaaaggaagaggtaatttttaaaaacgattttgaagattgaattttcctgaccattcttgaataattatggacctatgacaagtttcatttgaaattttcacagatggtgttcgcgttgctgcttcaacaggaatagacctcctcctccttgatgactttaagctggtcattaatgacttaacataccacgtacgaccaccaaaaagagacctcttaagtcatgaaaatgcagcaacgctgaatgatgtaaagacattggtccagcaactatacaccacactgtgcattgagcagcaccagttaaacaaggaaagggagcttattgaaagactagaggatctcaaagagcagctggctcccctggaaaaggtacgaattgagattagcagaaaagctgagaagaggaccactttggtgctatggggtggccttgcctacatggccacacagtttggcattttggcccggcttacctggtgggaatattcctgggacatcatggagccagtaacatacttcatcacttatggaagtgccatggcaatgtatgcatattttgtaatgacacgccaggaatatgtttatccagaagccagagacagacaatacttactatttttccataaaggagccaaaaagtcacgttttgacctagagaaatacaatcaactcaaggatgcaattgctcaggcagaaatggaccttaagagactgagagacccattacaagtacatctgcctctccgacaaattggtgaaaaagattgatctgcaaaaagcctctgaatcctggcagaaggaacacctgtttgcctttttaattaaagcattgcaggtggaagctgggagccatgtggggggtagagcgtttttacctttaattataaaacaaaaacagaaaggatctgagggaagaagggaatgttaaaacctgaggatcaggcattgtggaatataagctcaaagggcttagtgaatattgtcttaaccaagtatctcagtttctggatgaaaatgatgcagttatatagttgagagattcataaagagaaaacaatgctgggggtgttcgtttcttgcatcttctttgcagagtcagcaaaagagtaacacaccagcaccccactcgactctatttgtttttaatttaactgtccctatttttgacataggagtaaataaatatactagaaaagcaaattctcatgatatgctaaaatatcattagcatttattttaaattggacccagtctctgcagagttaccaggaatctttccttccagcatccctttactgaccacctacctgtacctcttggttacactcattttttccatttgataattggaaccaacttataactgtttaataattgacactttagattatctcttaataccttcttaaatgtctatatatcccagtgctctggatcagtgtctaaaaatcactggcaacactgcatgaggttgttggttttgttttgttttattaattagtctttcacaggaggaataattgccctcctttatatacttatctattgataatcccctctccctccagaacacaaatcagagggaaagggggtgttcagctgtactaccaaatcaggaagatgtaaggtttacaaattggctaagaatcatggctctgtagccatttcaaccagaataattttattgctaatctgctttgtgtgacagcattccaggccagccagatgggactgccttgtctggaggctttgttcatctcgaaggacacacacttccacactgtttgtgagccctcccacctccacaacttcagttgtaaatcaagtgtgtggatctcaaagggtgcaatttatctttatataggaatacatttctagggcttccttcaagcccactctcttcaccctattttttcttatcttaaattgagagaaagagaattaatcttatactttgtcaaaacattttctaccatatttccagatgacatctgcgcttgaagagtcaaaggaatctgtgtctaatatcctgtttttaactgctgtaggggcaggatggaaaggatgatgggggctgccacaccactgattggccttttctttcacgtgattcatccttcctcattgtggcaaggagtttctttctctttttcttcctcctttgggatcattgtgtatgaaaagaaaaactttaaatgacaaacccagactccaggtgccttgcaaaggttgaaggccagccaggattgctgctgctgctgctactcctgccaacacccctttcattggcatgacggaatgaaaggatgcatgtctccacttcctgaccctccgcccacttccttctccctccaccacccccagtcgtcagctccttccctcatttatttttgttaagttgtgtgaattatttttaacccatttatcctgtttgtgcatagggtttttaagaagaaacagcacagtgcaacgagcaaatctttttggggtgtgtgggaagcaagggagggaggacatggagaaaagttctttaaacaaatagcaaactattgaacatgtgtaaaatcctgtatcatttatgaaatatgtataaaaagcaatgtaccttctggaacaataaatacttattcaatttttgaa

SEQ ID NO: 1455 - DNA, 1024 bp, Artificial
  cDNA Sequence
ggatgtataatactttgctaaccccagcgtctatctctactgaattattggcaactaatcagtgactatactgaaaagtaccatatgtcagaaaatttttttttgactcaaccagcttccattataggcagtattaagcccatacagctgtcccagtgaccctagatttccaatgtacacctatagaactatgaccattaattatttcacttgttcatatagttcacaggaaaagctgttgttaaatcttcacaaacttgagtcctaaaaacagagcttcaacctaaactttgtttgcataggaaatgaggcaaaaagttaactgaaattttaaaaggaagaggtaatttttaaaaacgattttgaagattgaattttcctgaccattcttgaataattatggacctatgacaagtttcatttgaaattttcacagatggtgttcgcgttgctgcttcaacaggaatagacctcctcctccttgatgactttaagctggtcattaatgacttaacataccacgtacgaccaccaaaaagagacctcttaagtcatgaaaatgcagcaacgctgaatgatgtaaagacattggtccagcaactatacaccacactgtgcattgagcagcaccagttaaacaaggaaagggagcttattgaaagactagaggatctcaaagagcagctggctcccctggaaaaggtacgaattgagattagcagaaaagctgagaagaggaccactttggtgctatggggtggccttgcctacatggccacacagtttggcattttggcccggcttacctggtgggaatattcctgggacatcatggagccagtaacatacttcatcacttatggaagtgccatggcaatgtatgcatattttgtaatgacacgccaggaatatgtttatccagaagccagagacagacaatacttactatttttccataaaggagccaaaaagtcacgttttgacctagagaaatacaatcaactcaaggatgcaattgctcagg

SEQ ID NO: 1456 - DNA, 745 bp, Artificial
  cDNA Sequence
gagagtgggcggagggggtggaggtttgtctccgctgtttcatctctatggctgtcagaggtgggcggctttgaccgagaggctgctggagctcgtgtttggacgcgatgtttcgtctgaactcactttctgctttggcagaactggctgtgggttctcgatggtaccatggaggatcacagcccatccagatccggcgaagactaatgatggtggctttcctgggagcatctgcagtaactgcaagtactggtcttttgtggaagagggcccatgcagaatctccaccatgtgtagacaacctaaaaagtgacatcggtgataaagggaagaataaagatgaaggggatgtttgtaaccatgagaaaaagactgcagatcttgcccctcacccagaagagaaaaagaagaaacgttctggattcagagacagaaaagtgatggaatatgagaataggattcgagcctactccacgccagacaaaatcttccgatattttgccaccttgaaagtcatcagtgagcctggtgaagcagaagtgtttatgacaccagaagattttgtgcgatccataacacccaatgaaaaacaaccagaacacttgggtctggatcaatatataataaaacgctttgatggaaaggccagattctccaaaaagaaaatattacacagggtcagaaagaaaagtaaagggtcaattttacagaggaggaagaaagcacttcagaaagaagaaagaac

SEQ ID NO: 1457 - DNA, 811 bp, Artificial
  cDNA Sequence
ggcggagggggtggaggtttgtctccgctgtttcatctctatggctgtcagaggtgggcggctttgaccgagaggctgctggagctcgtgtttggacgcgatgtttcgtctgaactcactttctgctttggcagaactggctgtgggttctcgatggtaccatggaggatcacagcccatccagatccggcgaagactaatgatggtggctttcctgggagcatctgcagtaactgcaagtactggtcttttgtggaagagggcccatgcagaatctccaccatgtgtagacaacctaaaaagtgacatcggtgataaagggaagaataaagatgaaggggatgtttgtaaccatgagaaaaagactgcagatcttgcccctcacccagaagagaaaaagaagaaacgttctggattcagagacagaaaagtgatggaatatgagaataggattcgagcctactccacgccagacaaaatcttccgatattttgccaccttgaaagtcatcagtgagcctggtgaagcagaagtgtttatgacaccagaagattttgtgcgatccataacacccaatgaaaaacaaccagaacacttgggtctggatcaatatataataaaacgctttgatggaaagaaaatttcccaggaacgagaaaaatttgctgatgaaggcagtatattttacacccttggagaatgtgggctcatatccttttcagactacattttcctcacaactgttctttccactcctcagagaaattttgaaattgccttcaagatgtttgatttgaatggagatggagaa

SEQ ID NO: 1458 - DNA, 1113 bp, Artificial
  cDNA Sequence
aggttcagagcatcattcgctcccaaaccagtatgggtatgcgccacagagatcgtccaactactggcaacaccctcaagtctggcttgtgttcagccctcacaacctacttttttggagctgatctgaagggaaagctgacaatcaaaaacttcctcgaatttcagcgtaaactgcagcatgatgttctgaagcttgagtttgaacgccatgaccctgtggatgggagaattactgagaggcagtttggtggcatgctacttgcctacagtggggtgcagtccaagaagctgaccgccatgcagaggcagctcaagaagcacttcaaagaaggaaagggtctgacatttcaggaggtggagaacttctttactttcctaaagaacattaatgatgtggacactgcattgagtttttaccatatggctggagcatctcttgataaagtgaccatgcagcaggtggccaggacagtggctaaagtggagctctcagaccacgtgtgtgatgtggtgtttgcactctttgactgtgatggcaatggcgaactgagcaataaggaatttgtttccatcatgaagcaacggctgatgagaggcctggaaaagcccaaagacatgggtttcactcgcctcatgcaggccatgtggaaatgtgcacaggaaactgcctgggacttcgctttacccaaacagtaaccccacactgcaagaggggacccctccacccccagtaccctggaccccctccgcagagtctcggcagagccctttgtgctgctgcttctggaagtagtcccccttcctcccgggatgacctcaggactctgtcggtttcccctctttacccttccccgtccccgtgttctgctgggctctgattctgcccaatgagtatccccataggttctcaaaaacatgaacaagtctgtaaagctcagacatttgtcagcctcaacagcaccacccattcaagcatcctgtggataaagaattcagggaaccatccacacacctgccaaccctgggaagcatccagttctcaaatcgtttttgctatggatttatactaacaagaacattccttgacttccctcctgctggtgttttaaag

SEQ ID NO: 1459 - DNA, 433 bp, Artificial
  cDNA Sequence
agggtctgacatttcaggaggtggagaacttctttactttcctaaagaacattaatgatgtggacactgcattgagtttttaccatatggctggagcatctcttgataaagtgaccatgcagcaggtggccaggacagtggctaaagtggagctctcagaccacgtgtgtgatgtggtgtttgcactctttgactttgcttcatggctctgtgcactcccttttcttcctcgcagcctccctaagatgactccagtgtgaccctgtgcttagtgagcaatagtgattgagctcatgttccctgcaagtgccatttcctctccaggatgggcctctaaagctgaggcctggctcagagcctgtttgccctctgtcttaaacaattgtaaatatcacttaaattataaccatttgcaataaacatccccaaagtt

SEQ ID NO: 1460 - DNA, 529 bp, Artificial
  cDNA Sequence
agacccaagcagctggaggctctgtgtgtgggagcagcgactggacccagagccatgtggctgtgccctctggccctcaacctcatcttgatggcagcctctggtgctgtgtgcgaagtgaaggacgtttgtgttggaagccctggtatccccggcactcctggatcccacggcctgccaggcagggacgggagagatggtctcaaaggagaccctggccctccaggccccatgggtccacctggagaaatgccatgtcctcctggaaatgatgggctgcctggagcccctggtatccctggagagtgtggagagaagggggagcctggcgagaggggccctccagggcttccagctcatctagatgaggagctccaagccacactccacgactttagacatcaaatcctgcagacaaggggagccctcagtctgcagggctccataatgacagtaggagagaaggtcttctccagcaatgggcagtccatcacttttgatgccattcaggaggcatgtgccagagcag

SEQ ID NO: 1461 - DNA, 737 bp, Artificial
  cDNA Sequence
cagctggaggctctgtgtgtggcagcctggagaccccacaacctccagccggaggcctgaagcatgaggccatgccaggtgccaggtgatgctgggaattttcccgggagcttcgggtcttcccagcactctggtctcgcccgccctgcctctcgggctctgcccagcttcctgagtcctgacagagcacagtgggggagatgttggcagaggtggcagatgggctcacggccatccctcctgcaggagcagcgactggacccagagccatgtggctgtgccctctggccctcaacctcatcttgatggcagcctctggtgctgtgtgcgaagtgaaggacgtttgtgttggaagccctggtatccccggcactcctggatcccacggcctgccaggcagggacgggagagatggtctcaaaggagaccctggccctccaggccccatgggtccacctggagaaatgccatgtcctcctggaaatgatgggctgcctggagcccctggtatccctggagagtgtggagagaagggggagcctggcgagaggggccctccagggcttccagctcatctagatgaggagctccaagccacactccacgactttagacatcaaatcctgcagacaaggggagccctcagtctgcagggctccataatgacagtaggagagaaggtcttctccagcaatgggcagtccatcacttttgatgccattcaggaggcatgtgcc

SEQ ID NO: 1462 - DNA, 644 bp, Artificial
  cDNA Sequence
gccagtttcccagggtaacatagtgaggcactgaaagaaaggagactgcactggagcccaggtccccgggctccccagagctccttactcttcctcctcctcagcagcctggagaccccacaacctccagccggaggcctgaagcatgaggccatgccaggtgccaggtgatgctgggaattttcccgggagcttcgggtcttcccagcactctggtctcgcccgccctgcctctcgggctctgcccagcttcctgagtcctgacagagcacagtgggggagatgttggcagaggtggcagatgggctcacggccatccctcctgcaggagcagcgactggacccagagccatgtggctgtgccctctggccctcaacctcatcttgatggcagcctctggtgctgtgtgcgaagtgaaggacgtttgtgttggaagccctggtatccccggcactcctggatcccacggcctgccaggcagggacgggagagatggtctcaaaggagaccctggccctccaggccccatgggtccacctggagaaatgccatgtcctcctggaaatgatgggctgcctggagcccctggtatccctggagagtgtggagagaagggggagcctggcgagaggggccctccagg

SEQ ID NO: 1463 - DNA, 229 bp, Artificial
  cDNA Sequence
gatccaaaatttatagcattcttctaccaccacaggggctcatatgacattaacagacaagacacttttcagaaagacaggttgttcttttgggccacatctaagaaatctttgtctagccaaaagccacaaataatttctcattttttggcttctggaagatgtacagttaaatgttatatttgggactgttatctaatttgattaaattgcactctacaatatgata

SEQ ID NO: 1464 - DNA, 496 bp, Artificial
  cDNA Sequence
tctttcttccagctctaccctgaaagtcctccaggcaccggtcttttttttctgccttttgtttccctcccggcgagtcggcgcgacagtgaatttccgtttcccgcggtgtccaagcggacctgaggagttgcagctgtgagcaggttagagttacttgttattggtaaatagccactatggagactaaggaccagaagaaacaaagaaagaaaaacagtggacccaaagatgaaaagaaaaagaagcggcatctgcaggatctccagctaggagacgaagaagatgcccagaagagaaatcccaaagcttttgcagttcagtctgctgtgtggatggctcgatcctttcacaggactcaggatttgaagacaaaaaagcatcgtattccagtggttgatcgaactccactagagcccccaccaatagtggtagtggtgacggggcctccaaagttggaaagagcactttgatataatgcctcattcagaacttc

SEQ ID NO: 1465 - DNA, 535 bp, Artificial
  cDNA Sequence
cagttgctgaggctaagctggccaacttagagagaaagctatagagcctgagatcagaactggaccacacgaagaagctgtaagccttctccttggggaaaatgtctgggaagaagcttttcgtgaccaatggtgagcggatgcctttctccaaagtgaaggctctgtgtgctgggctccaggccacagtggctgcccccaagaatgccgaggagaataaggccatccaggatgtggccaaagacactgccttcctgggcatcacagatgaggcaactgaaggccagttcatgtacttgacgggcaggaggctgacctacagcaactggaagaaggatgagccaaatgaccacggctcaggggaggactgcgttattctcctgaacaacgggctctggaatggcatctcctgcacctcctccttcattgccatctgtgagtttcctgcctgaagaggcacgttcctcagccccctccttgcctccctgctgaactctctgctgctttggaagagaattcaatgttggttttcttc

SEQ ID NO: 1466 - DNA, 2029 bp, Artificial
  cDNA Sequence
gcgcgctcccggggaggtgttgcagccatggctacggcagccggcgcgacctactttcagcgaggcagtctgttctggttcacagtcatcaccctcagctttggctactacacatgggttgtcttctggcctcagagtatcccttatcagaaccttgggcccctgggccccttcactcagtacttggtggaccaccatcacaccctcctgtgcaatgggtattggcttgcctggctgattcatgtgggagagtccttgtatgccatagtattgtgcaagcataaaggcatcacaagtggtcgggctcagctactctggttcctacagactttcttctttgggatagcgtctctcaccatcttgattgcttacaaacggaagcgccaaaaacaaacttgaagttgtctgaaagcttgctctacacttttacattcatcctcacccttttttttgtggggtagaggaggtgcagtaatttactcagtgatctttctactttctagaaactgtccttcaaagctctttaagaccccctcgttagtcagttttttctcttatatgctctggttgagcttgaatagaccagttgttacttaagaaagaaacagagaaagattttagcttttcaatcctatttggcagaggacttcagctaccttcttacagtctttggctgtgttggtaccctcgtgtgctctgagctaagccacatactaaactgactttttggtttgtatacccttgctcccgccttctgatgaaaacaccttaccctcacaaccaccatctttcctctcctttccaaagctctttccaccttgctgcactaagataaagtgacacttccactatatgtcaattccacacacatttattaggtacctgtgaggtaggatcctatcctctcaaacttccatttctcatgctacagagaaagataaggaagatgagcaagtgcctggaatggggcaggctgagcagtcacacaggcatagaggcacgctgagaacctggaggggagactgcagagtgccttccctgatgctgcagccggaagtgatccttccctccacctggcccctgggacactgtgctctgcagtgtgcagggcctgatggcactgctagattgctccttcagctcagggccacagcttaaacagctttacctttcccctcagcacctgtcccactatcttgcacacaggtgctctaaccatgtttattgaacaaaggagggaaactgatttcactttcacttgttcattatcattccaatttttatgtgaaaatggcacaacccatttggggtaccctcaccccaaaataaaagcccaagtctacctttgactggtaccaccttttttgtggtttcgttggtgagaaacctttatctttttcatacctttctattctcaatcacttctccaaaagtgtgtctttccagctctgatttattcaaaacacaagcatttctgtttagagattctagcccatgggttatctggctagttattacctctcctgttcacttagttatactttattattgctcacaggctggggaggcagaatgactctgtcaccactaggagccattagggcttcttccctggaggactgcctgcttgctttctggggacactagccctcatttcccttctgtggtacagtggggcaaattatttgtattaagcaaacatttatgggaaacaacccgctcccgaaaacggagcccccaagtaaagcacaaccctgaaagattatgaactatgaattgtctctggtagagataaatttctgcaaacatatctcagtcttccctctgtttctctggtgattaagaagttcctttttggtaaggaaaaggatttttaaccatagagttaggcatcatggaaattcaaaccagatttcttaatacctggtcttcctcaaagagaaataataacagtaatagtggtgctgggaacaatatggcagattattgaatgaaattgattaacttgaataaaatgctgtgaattttc

SEQ ID NO: 1467 - DNA, 1561 bp, Artificial
  cDNA Sequence
cgctcccggggaggtgttgcagccatggctacggcagccggcgcgacctactttcagcgaggcagtctgttctggttcacagtcatcaccctcagctttggctactacacatgggttgtcttctggcctcagagtatcccttatcagaaccttgggcccctgggccccttcactcagtacttggtggaccaccatcacaccctcctgtgcaatgggtattggcttgcctggctgattcatgtgggagagtccttgtatgccatagtattgtgcaagcataaaggcatcacaagtggtcgggctcagctactctggttcctacagactttcttctttgggatagcgtctctcaccatcttgattgcttacaaacggaagcgccaaaaacaaacttgaagttgtctgaaagcttgctctacacttttacattcatcctcacccttttttttgtggggtagaggagagaaagataaggaagatgagcaagtgcctggaatggggcaggctgagcagtcacacaggcatagaggcacgctgagaacctggaggggagactgcagagtgccttccctgatgctgcagccggaagtgatccttccctccacctggcccctgggacactgtgctctgcagtgtgcagggcctgatggcactgctagattgctccttcagctcagggccacagcttaaacagctttacctttcccctcagcacctgtcccactatcttgcacacaggtgctctaaccatgtttattgaacaaaggagggaaactgatttcactttcacttgttcattatcattccaatttttatgtgaaaatggcacaacccatttggggtaccctcaccccaaaataaaagcccaagtctacctttgactggtaccaccttttttgtggtttcgttggtgagaaacctttatctttttcatacctttctattctcaatcacttctccaaaagtgtgtctttccagctctgatttattcaaaacacaagcatttctgtttagagattctagcccatgggttatctggctagttattacctctcctgttcacttagttatactttattattgctcacaggctggggaggcagaatgactctgtcaccactaggagccattagggcttcttccctggaggactgcctgcttgctttctggggacactagccctcatttcccttctgtggtacagtggggcaaattatttgtattaagcaaacatttatgggaaacaacccgctcccgaaaacggagcccccaagtaaagcacaaccctgaaagattatgaactatgaattgtctctggtagagataaatttctgcaaacatatctcagtcttccctctgtttctctggtgattaagaagttcctttttggtaaggaaaaggatttttaaccatagagttaggcatcatggaaattcaaaccagatttcttaatacctggtcttcctcaaagagaaataataacagtaatagtggtgctgggaacaatatggcagattattgaatgaaattgattaacttgaataaaatgctgtgaattttc

SEQ ID NO: 1468 - DNA, 1976 bp, Artificial
  cDNA Sequence
ggggagctctgggaacggggcctgtgcgcacgcgcatctgacggttgtctcggttactcattgggttgtcttctggcctcagagtatcccttatcagaaccttgggcccctgggccccttcactcagtacttggtggaccaccatcacaccctcctgtgcaatgggtattggcttgcctggctgattcatgtgggagagtccttgtatgccatagtattgtgcaagcataaaggcatcacaagtggtcgggctcagctactctggttcctacagactttcttctttgggatagcgtctctcaccatcttgattgcttacaaacggaagcgccaaaaacaaacttgaagttgtctgaaagcttgctctacacttttacattcatcctcacccttttttttgtggggtagaggaggtgcagtaatttactcagtgatctttctactttctagaaactgtccttcaaagctctttaagaccccctcgttagtcagttttttctcttatatgctctggttgagcttgaatagaccagttgttacttaagaaagaaacagagaaagattttagcttttcaatcctatttggcagaggacttcagctaccttcttacagtctttggctgtgttggtaccctcgtgtgctctgagctaagccacatactaaactgactttttggtttgtatacccttgctcccgccttctgatgaaaacaccttaccctcacaaccaccatctttcctctcctttccaaagctctttccaccttgctgcactaagataaagtgacacttccactatatgtcaattccacacacatttattaggtacctgtgaggtaggatcctatcctctcaaacttccatttctcatgctacagagaaagataaggaagatgagcaagtgcctggaatggggcaggctgagcagtcacacaggcatagaggcacgctgagaacctggaggggagactgcagagtgccttccctgatgctgcagccggaagtgatccttccctccacctggcccctgggacactgtgctctgcagtgtgcagggcctgatggcactgctagattgctccttcagctcagggccacagcttaaacagctttacctttcccctcagcacctgtcccactatcttgcacacaggtgctctaaccatgtttattgaacaaaggagggaaactgatttcactttcacttgttcattatcattccaatttttatgtgaaaatggcacaacccatttggggtaccctcaccccaaaataaaagcccaagtctacctttgactggtaccaccttttttgtggtttcgttggtgagaaacctttatctttttcatacctttctattctcaatcacttctccaaaagtgtgtctttccagctctgatttattcaaaacacaagcatttctgtttagagattctagcccatgggttatctggctagttattacctctcctgttcacttagttatactttattattgctcacaggctggggaggcagaatgactctgtcaccactaggagccattagggcttcttccctggaggactgcctgcttgctttctggggacactagccctcatttcccttctgtggtacagtggggcaaattatttgtattaagcaaacatttatgggaaacaacccgctcccgaaaacggagcccccaagtaaagcacaaccctgaaagattatgaactatgaattgtctctggtagagataaatttctgcaaacatatctcagtcttccctctgtttctctggtgattaagaagttcctttttggtaaggaaaaggatttttaaccatagagttaggcatcatggaaattcaaaccagatttcttaatacctggtcttcctcaaagagaaataataacagtaatagtggtgctgggaacaatatggcagattattgaatgaaattgattaacttgaataaaatgctgtgaattttc

SEQ ID NO: 1469 - DNA, 407 bp, Artificial
  cDNA Sequence
ggagacccaaatgactgttcagagtttcttcgtgggttgtcttctggcctcagagtatcccttatcagaaccttgggcccctgggccccttcactcagtacttggtggaccaccatcacaccctcctgtgcaatgggtattggcttgcctggctgattcatgtgggagagtccttgtatgccatagtattgtgcaagcaaaatgagctaagaatacggataaaggtatgtgaatgagaacaagttatgatgaccccaggaaaacccttctccgggttacctagccaccaactgtgacccttctgaaggaggaggaaacaagcactgctgttcagtgagcctgctcttccaagatggcaactcatctttatttttctttactaaatatcatacacatttacaggatca

SEQ ID NO: 1470 - DNA, 611 bp, Artificial
  cDNA Sequence
tcagtgggttgtcttctggcctcagagtatcccttatcagaaccttgggcccctgggccccttcactcagtacttggtggaccaccatcacaccctcctgtgcaatgggtattggcttgcctggctgattcatgtgggagagtccttgtatgccatagtattgtgcaagcataaaggcatcacaagtggtcgggctcagctactctggttcctacagactttcttctttgggatagcgtctctcaccatcttgattgcttacaaacggaagcgccaaaaacaaacttgaagttgtctgaaagcttgctctacacttttacattcatcctcacccttttttttgtggggtagaggaggtgcagtaatttactcagtgatctttctactttctagaaactgtccttcaaagctctttaagaccccctcgttagtcagttttttctcttatatgctctggttgagcttgaatagaccagttgttacttaagaaagaaacagagaaagattttagcttttcaatcctatttggcagaggacttcagctaccttcttacagtctttggctgtgttggtaccctcgtgtgctctgagctaagccacatactaaactg

SEQ ID NO: 1471 - DNA, 1812 bp, Artificial
  cDNA Sequence
ggtattggcttgcctggctgattcatgtgggagagtccttgtatgccatagtattgtgcaagcataaaggcatcacaagtggtcgggctcagctactctggttcctacagactttcttctttgggatagcgtctctcaccatcttgattgcttacaaacggaagcgccaaaaacaaacttgaagttgtctgaaagcttgctctacacttttacattcatcctcacccttttttttgtggggtagaggaggtgcagtaatttactcagtgatctttctactttctagaaactgtccttcaaagctctttaagaccccctcgttagtcagttttttctcttatatgctctggttgagcttgaatagaccagttgttacttaagaaagaaacagagaaagattttagcttttcaatcctatttggcagaggacttcagctaccttcttacagtctttggctgtgttggtaccctcgtgtgctctgagctaagccacatactaaactgactttttggtttgtatacccttgctcccgccttctgatgaaaacaccttaccctcacaaccaccatctttcctctcctttccaaagctctttccaccttgctgcactaagataaagtgacacttccactatatgtcaattccacacacatttattaggtacctgtgaggtaggatcctatcctctcaaacttccatttctcatgctacagagaaagataaggaagatgagcaagtgcctggaatggggcaggctgagcagtcacacaggcatagaggcacgctgagaacctggaggggagactgcagagtgccttccctgatgctgcagccggaagtgatccttccctccacctggcccctgggacactgtgctctgcagtgtgcagggcctgatggcactgctagattgctccttcagctcagggccacagcttaaacagctttacctttcccctcagcacctgtcccactatcttgcacacaggtgctctaaccatgtttattgaacaaaggagggaaactgatttcactttcacttgttcattatcattccaatttttatgtgaaaatggcacaacccatttggggtaccctcaccccaaaataaaagcccaagtctacctttgactggtaccaccttttttgtggtttcgttggtgagaaacctttatctttttcatacctttctattctcaatcacttctccaaaagtgtgtctttccagctctgatttattcaaaacacaagcatttctgtttagagattctagcccatgggttatctggctagttattacctctcctgttcacttagttatactttattattgctcacaggctggggaggcagaatgactctgtcaccactaggagccattagggcttcttccctggaggactgcctgcttgctttctggggacactagccctcatttcccttctgtggtacagtggggcaaattatttgtattaagcaaacatttatgggaaacaacccgctcccgaaaacggagcccccaagtaaagcacaaccctgaaagattatgaactatgaattgtctctggtagagataaatttctgcaaacatatctcagtcttccctctgtttctctggtgattaagaagttcctttttggtaaggaaaaggatttttaaccatagagttaggcatcatggaaattcaaaccagatttcttaatacctggtcttcctcaaagagaaataataacagtaatagtggtgctgggaacaatatggcagattattgaatgaaattgattaacttgaataaaatgctgtgaattttc

SEQ ID NO: 1472 - DNA, 771 bp, Artificial
  cDNA Sequence
agacgcggcgctgcgctcggccaggccggcaccatgcggcccctgctctgcgcgctgaccggactggccctgctccgcgccgcgggctctttggccgctgccgaacccttcagccctccgcgaggagactcagctcagagcacagcgtgtgacagacacatggctgtgcaacgccgtctagatgtcatggaggagatggtagagaagaccgtggatcacctggggacagaggtgaaaggcctgctgggcctgctggaggagctggcctggaacctgcccccgggacccttcagccccgctcccgaccttctcggagatggcttctgagccctggagctggagcccagcagttggaggtggtgcacctgccaggcagcgcccacagaaccagccctgtcctctcgacttccttccttagcttcatgtgaaataaaagctattctggtctcctctgtgtctgctgacagagtaacccgtttaactacagcctcctctcactccacttccatgcctggaggaagcctgcaaccccctccaggctcagacctggggacacccccactcctgtcatttataggggcagatggagcaggggttgattcacacagatgggggccctttgagtggccttgcttctcaaaatgtggccataggtgaaaagcaaggggatcagggtctcaggacccacccagactgtttaatccaaatctgcattgcaatgagacccccagggattttatgtgtccattaaagtggtttgttgttgttttt

SEQ ID NO: 1473 - DNA, 150 bp, Artificial
  cDNA Sequence
ctgtgcaacgccgtctagatgtcatggaggagatggtagagaagaccgtggatcacctggggacagaggtgaaaggcctgctgggcctgctggaggagctggcctggaacctgcccccgggacccttcagccccgctcccgaccttctcg

SEQ ID NO: 1474 - DNA, 436 bp, Artificial
  cDNA Sequence
ctggggaaactgaggcaggtaggggcagagcctgagtgaggaaaacccaggtcacttagcgcccagtcctttcccactgcaccgcactggaccgccagctgctctcttaggacctagctgatgaagcggaacgtggaaccacttctgtcctcgactttaccccacttcccactctagatggtagagaagaccgtggatcacctggggacagaggtgaaaggcctgctgggcctgctggaggagctggcctggaacctgcccccgggacccttcagccccgctcccgaccttctcggagatggcttctgagccctggagctggagcccagcagttggaggtggtgcacctgccaggcagcgcccacagaaccagccctgtcctctcgacttccttccttagcttcatgtgaaataaaagctattctggtctcctctg

SEQ ID NO: 1475 - DNA, 874 bp, Artificial
  cDNA Sequence
ttccagagctggctgactcttaatgtggaaacaagttttggctacagacattcaggtttaaggcacataccacaaattacaagaagccctgtcactgacagggaactggctttgttctcgtggtttctgcaaggaagatggaaggaatgactttctggccctttttttttgttttttctaaaaaggagtgagtttggcagtaacaaagctcgtgacacactcaccagatgcacaggctaccttctcaggcacgcctccctttctctcctcagcgaggacacggtgcttcacccacccagtcgccctcaccagaaatgtgtatgcagcaaacagacttgtatgcctctgtctggcaatgactgtaagaaaagaaaatatgcctccaaataaaaatatacaattacatgacgaaatgaagccaagtcttagccacaggcaaaggggaatgattgcatgagtcagaaaaatgaaacatctattttagcagcaagaggctgtgagggatggggtagaaaaggcatcctgagagagttctagaccgacccaggtcctgtggcacactatacgggtcaggaggggtggaagacaggcctaagctctaggacggtgaatctcggggctatttgtggatttgttagaaacagacattcttttggccttttcctggcactggtgttgccggcaggtgggcagaagtgagccaccagtcactgttcagtcattgccaccacagatcttcagcagaatcttccggtaatcccctgaaatgtcgtggtacagcgacttgccgtacatccgcttatactctgatctgatgtccaggaggtcggtctcgctgcgagacaccatgatgcgaatcagggtccggtccttt

SEQ ID NO: 1476 - DNA, 232 bp, Artificial
  cDNA Sequence
cgcgcctcaggagccagtgtaggcgccgcaaagcggaaggggcgcgcggataggctgccaggatggaaactaactacctgaagaggtgctttggaaattgcctggcccaggcactggcagaggtggcgaaggttcggcccagtgacccaatagaatacctggctcactggctttatcattacaggaaaacagcaaaagcaaaagaagagaatagggaaaagaagatccacct

SEQ ID NO: 1477 - DNA, 599 bp, Artificial
  cDNA Sequence
agaatagggaaaagaagatccacctgcaggaggaatatgacagtagcctcaaggaaatggaaatgacagaaatgctgaaacaggaagagtatcagattcaacagaactgtgaaaagtgtcacaaggaactgacttctgaaactgtttccacgaagaagaccatattcatgcaggaggacacaaacccccttgagaaggaggccttgaagcaggaattcctgccaggtacttccagtctgattccaggaatgcctcaacaggttcctccttcagagtctgctggccagattgaccagaacttcaaaatgccacaagaaataaattacaaggaggcttttcagcatgaagttgctcatgaaatgcctcctggctccaaatctcctttttaggttacagaaggtagatgcttctgatttacttctctcaaagctagaagccaagaaaatggccagctagaaccaagatttaaggggctgtaaaaggcaagttcagggactctccagcctactccttttctgaaaaacccttaatcatgtgaacatttgaactagttataggataaaataaactcagaataaggatttaaaataagtaaccaa

SEQ ID NO: 1478 - DNA, 1359 bp, Artificial
  cDNA Sequence
tgcccagactggtcttgaactcctgggctcaagcgatcctcccaaagccctgagattacaggcgtgagccagcgcgccggacacaacctcctactttcatgaaagagtgggcacttccaacaggaggaaaatgtctttcctccaggacccaagtttcttcaccatggggatgtggtccattggtgcaggagccctgggggctgctgccttggcattgctgcttgccaacacagacgtgtttctgtccaagccccagaaagcggccctggagtacctggaggatatagacctgaaaacactggagaaggaaccaaggactttcaaagcaaaggagctatgggaaaaaaatggagctgtgattatggccgtgcggaggccaggctgtttcctctgtcgagaggaagctgcggatctgtcctccctgaaaagcatgttggaccagctgggcgtccccctctatgcagtggtaaaggagcacatcaggactgaagtgaaggatttccagccttatttcaaaggagaaatcttcctggatgaaaagaaaaagttctatggtccacaaaggcggaagatgatgtttatgggatttatccgtctgggagtgtggtacaacttcttccgagcctggaacggaggcttctctggaaacctggaaggagaaggcttcatccttgggggagttttcgtggtgggatcaggaaagcagggcattcttcttgagcaccgagaaaaagaatttggagacaaagtaaacctactttctgttctggaagctgctaagatgatcaaaccacagactttggcctcagagaaaaaatgattgtgtgaaactgcccagctcagggataaccagggacattcacctgtgttcatgggatgtattgtttccactcgtgtccctaaggagtgagaaacccatttatactctactctcagtatggattattaatgtattttaatattctgtttaggcccactaaggcaaaatagccccaaaacaagactgacaaaaatctgaaaaactaatgaggattattaagctaaaacctgggaaataggaggcttaaaattgactgccaggctgggtgcagtggctcacacctgtaatcccagcactttgggaggccaaggtgagcaagtcacttgaggtcgggagttcgagaccagcctgagcaacatggcgaaaccccgtctctactaaaaatacaaaaatcacccgggtgtggtggcaggcacctgtagtcccagctacccgggaggctgaggcaggagaatcacttgaacctgggaggtggaggttgcggtgagctgagatcacaccactgtattccagcctgggtgactgagactctaactaaa

SEQ ID NO: 1479 - DNA, 1379 bp, Artificial
  cDNA Sequence
gcggtggcgcggtagcgcgcgatgcagcacaggctagaggctgcgcaagcgcggggcccgcccctgggaccctccgggccgggcggtttggccccttagcgcccgggcgtcggggcggtaaaaggccggcagaagggaggcacttgagaaatgtctttcctccaggacccaagtttcttcaccatggggatgtggtccattggtgcaggagccctgggggctgctgccttggcattgctgcttgccaacacagacgtgtttctgtccaagccccagaaagcggccctggagtacctggaggatatagacctgaaaacactggagaaggaaccaaggactttcaaagcaaaggagctatgggaaaaaaatggagctgtgattatggccgtgcggaggccaggctgtttcctctgtcgagaggaagctgcggatctgtcctccctgaaaagcatgttggaccagctgggcgtccccctctatgcagtggtaaaggagcacatcaggactgaagtgaaggatttccagccttatttcaaaggagaaatcttcctggatgaaaagaaaaagttctatggtccacaaaggcggaagatgatgtttatgggatttatccgtctgggagtgtggtacaacttcttccgagcctggaacggaggcttctctggaaacctggaaggagaaggcttcatccttgggggagttttcgtggtgggatcaggaaagcagggcattcttcttgagcaccgagaaaaagaatttggagacaaagtaaacctactttctgttctggaagctgctaagatgatcaaaccacagactttggcctcagagaaaaaatgattgtgtgaaactgcccagctcagggataaccagggacattcacctgtgttcatgggatgtattgtttccactcgtgtccctaaggagtgagaaacccatttatactctactctcagtatggattattaatgtattttaatattctgtttaggcccactaaggcaaaatagccccaaaacaagactgacaaaaatctgaaaaactaatgaggattattaagctaaaacctgggaaataggaggcttaaaattgactgccaggctgggtgcagtggctcacacctgtaatcccagcactttgggaggccaaggtgagcaagtcacttgaggtcgggagttcgagaccagcctgagcaacatggcgaaaccccgtctctactaaaaatacaaaaatcacccgggtgtggtggcaggcacctgtagtcccagctacccgggaggctgaggcaggagaatcacttgaacctgggaggtggaggttgcggtgagctgagatcacaccactgtattccagcctgggtgactgagactctaactaaa

SEQ ID NO: 1480 - DNA, 1273 bp, Artificial
  cDNA Sequence
ggccccttagcgcccgggcgtcggggcggtaaaaggccggcagaagggaggcacttgaggacccaagtttcttcaccatggggatgtggtccattggtgcaggagccctgggggctgctgccttggcattgctgcttgccaacacagacgtgtttctgtccaagccccagaaagcggccctggagtacctggaggatatagacctgaaaacactggagaaggaaccaaggactttcaaagcaaaggagctatgggaaaaaaatggagctgtgattatggccgtgcggaggccaggctgtttcctctgtcgagaggaagctgcggatctgtcctccctgaaaagcatgttggaccagctgggcgtccccctctatgcagtggtaaaggagcacatcaggactgaagtgaaggatttccagccttatttcaaaggagaaatcttcctggatgaaaagaaaaagttctatggtccacaaaggcggaagatgatgtttatgggatttatccgtctgggagtgtggtacaacttcttccgagcctggaacggaggcttctctggaaacctggaaggagaaggcttcatccttgggggagttttcgtggtgggatcaggaaagcagggcattcttcttgagcaccgagaaaaagaatttggagacaaagtaaacctactttctgttctggaagctgctaagatgatcaaaccacagactttggcctcagagaaaaaatgattgtgtgaaactgcccagctcagggataaccagggacattcacctgtgttcatgggatgtattgtttccactcgtgtccctaaggagtgagaaacccatttatactctactctcagtatggattattaatgtattttaatattctgtttaggcccactaaggcaaaatagccccaaaacaagactgacaaaaatctgaaaaactaatgaggattattaagctaaaacctgggaaataggaggcttaaaattgactgccaggctgggtgcagtggctcacacctgtaatcccagcactttgggaggccaaggtgagcaagtcacttgaggtcgggagttcgagaccagcctgagcaacatggcgaaaccccgtctctactaaaaatacaaaaatcacccgggtgtggtggcaggcacctgtagtcccagctacccgggaggctgaggcaggagaatcacttgaacctgggaggtggaggttgcggtgagctgagatcacaccactgtattccagcctgggtgactgagactctaactaaa

SEQ ID NO: 1481 - DNA, 1265 bp, Artificial
  cDNA Sequence
gtcaagagaagcagaggtgtggacgctgtgtatgaaatgtctttcctccaggacccaagtttcttcaccatggggatgtggtccattggtgcaggagccctgggggctgctgccttggcattgctgcttgccaacacagacgtgtttctgtccaagccccagaaagcggccctggagtacctggaggatatagacctgaaaacactggagaaggaaccaaggactttcaaagcaaaggagctatgggaaaaaaatggagctgtgattatggccgtgcggaggccaggctgtttcctctgtcgagaggaagctgcggatctgtcctccctgaaaagcatgttggaccagctgggcgtccccctctatgcagtggtaaaggagcacatcaggactgaagtgaaggatttccagccttatttcaaaggagaaatcttcctggatgaaaagaaaaagttctatggtccacaaaggcggaagatgatgtttatgggatttatccgtctgggagtgtggtacaacttcttccgagcctggaacggaggcttctctggaaacctggaaggagaaggcttcatccttgggggagttttcgtggtgggatcaggaaagcagggcattcttcttgagcaccgagaaaaagaatttggagacaaagtaaacctactttctgttctggaagctgctaagatgatcaaaccacagactttggcctcagagaaaaaatgattgtgtgaaactgcccagctcagggataaccagggacattcacctgtgttcatgggatgtattgtttccactcgtgtccctaaggagtgagaaacccatttatactctactctcagtatggattattaatgtattttaatattctgtttaggcccactaaggcaaaatagccccaaaacaagactgacaaaaatctgaaaaactaatgaggattattaagctaaaacctgggaaataggaggcttaaaattgactgccaggctgggtgcagtggctcacacctgtaatcccagcactttgggaggccaaggtgagcaagtcacttgaggtcgggagttcgagaccagcctgagcaacatggcgaaaccccgtctctactaaaaatacaaaaatcacccgggtgtggtggcaggcacctgtagtcccagctacccgggaggctgaggcaggagaatcacttgaacctgggaggtggaggttgcggtgagctgagatcacaccactgtattccagcctgggtgactgagactctaactaaa

SEQ ID NO: 1482 - DNA, 3521 bp, Artificial
  cDNA Sequence
tattatagatactctaacgccaaggtcagctgctggtacaagtacctccttttcagctacaacatcatcttctggttggctggagttgtcttccttggagtcgggctgtgggcatggagcgaaaagggtgtgctgtccgacctcaccaaagtgacccggatgcatggaatcgaccctgtggtgctggtcctgatggtgggcgtggtgatgttcaccctggggttcgccggctgcgtgggggctctgcgggagaatatctgcttgctcaactttgtgattctgtggcaccatcgtgctcatcttcttcctggagctggctgtggccgtgctggccttcctgttccaggactgggtgagggaccggttccgggagttcttcgagagcaacatcaagtcctaccgggacgatatcgatctgcaaaacctcatcgactcccttcagaaagctaaccagtgctgtggcgcatatggccctgaagactgggacctcaacgtctacttcaattgcagcggtgccagctacagccgagagaagtgcggggtccccttctcctgctgcgtgccagatcctgcgcaaaaagttgtgaacacacagtgtggatatgatgtcaggattcagctgaagagcaagtgggatgagtccatcttcacgaaaggctgcatccaggcgctggaaagctggctcccgcggaacatttacattgtggctggcgtcttcatcgccatctcgctgttgcagatatttggcatcttcctggcaaggacgctgatctcagacatcgaggcagtgaaggccggccatcacttctgaggagcagagttgagggagccgagctgagccacgctgggaggccagagcctttctctgccatcagccctacgtccagagggagaggagccgacacccccagagccagtgccccatcttaagcatcagcgtgacgtgacctctctgtttctgcttgctggtgctgaagaccaagggtcccccttgttacctgcccaaacttgtgactgcatccctctggagtctacccagagacagagaatgtgtctttatgtgggagtggtgactctgaaagacagagagggctcctgtggctgccaggagggcttgactcagaccccctgcagctcaagcatgtctgcaggacaccctggtcccctctccactggcatccagacatctgctttgggtcatccacatctgtgggtgggccgtgggtagagggacccacaggcgtggacagggcatctctctccatcaagcaaagcagcatgggggcctgcccgtaacgggaggcggacgtggccccgctgggcctctgagtgccagcgcagtctgctgggacatgcacatatcaggggttgtttgcaggatcctcagccatgttcaagtgaagtaagcctgagccagtgcgtggactggtgccacgggagtgccttgtccactgtccccctgtgtccaccagctattctcctggcgccggaactgcctctggtcttgatagcattaagccctgatggcgccggtggcgcggtgggcatggttcttcactgagagccggctctccttttcttaaagtgtgtaaatagtttatttataggggtaagaatgttctcacaccatttcacttcctcttcctctcctccagcattctcctctgagcagccttagatagtgtccatggctggagccgaccctttgagtccccttgagtgtcttaagaaccagcccacaacagcctctctttctcctccacatactgcagcctccctccatgcatcccacatacaagcactcccccactccccagcgtggcctcactgtcttctggtcttggtgctactgaaattgtcacccagaatttgaatcctgaccctccccactgcaagcccagggagccccagcccaagatggccagcctgaaactgttggccagggctcctcttgtggccatgtacccagggctggctggcctgccatttgcctctccccggagacagccgttcttctgcaaccacaccccgtgcctagccacaaccccaggctgcagctgctcagaagctccaggcattttgtttctggtgaccgcccctaatgggatatcggtgatcactggtccacccttcctgtcagggcttttctggggctgctcttggaaatgaagtcttaagtactgaataactcccctggggatagctggggcatttgtctagctgggctactttctaacactttgccatagctcagaccacttctcatcgcccgttcattctcaaatgcttttggcgtctccagggtgcctcaggaaaacatgaagtgggcattgtagaacttggggctactgtgtaactttggaagaaaaagttaagggtacttttaagtggatactgttttgatgaaattgccaacttcagggagcccagcttggagaaggaggacgtgagtattccttacaaggctccgaaacaattctttcttcacttagttttctttctgtgctctgcatcttatattccagcagggtcttccaatgcatggtttaataactactagaactggccaggtgcagtggctcacgcctgtaatcccagaactttgggaggctaagacaggcagatcacttgaggccaggagttcgagaccagcctggacaacatggtgatacccagtttctactaaaaatacaaaaattagtcgggcatggtgatgtgcacctgtagtcccagctgctcgggaggctgaggcaggagaatcgcttgaacccgggagacagaggttgcaacgagccaagatcgagccactgcgctccggcctgggtgacaggagactccatctcaaaaaataaaattaaaaaaaaactactacaataaattatcaccttggactgtataaaacaacttttaaactagtctttttaaaaagtacacttaaataaaaatctaaacataagagaatgtaaagtgaaaagtgaaagtatgtcttctgttacgcagaggtaactactattaggaatccttcctgaaaatgtccatgcatctactcaggtcatcacacccatggaatcattttacatactattttatgagtgttacttaatatactgatccacagtgcgttttcacggtcacgccatcagttgtaggagtgtgccaagaacagatgggccttgcctttgtaccagaggagtccatttacagttgcaggtaatagaaaacccaattcagactggcctaaacaatgaggggaggttttggctcttgaaactggaaagtcccaaggtggggtgagtttcaggtttgggttgatccaagtggctcagtgacgtcaacaggatcttgtttccatttctctgccttccacagcctccccttcatctatggtggagggaaggagtctaccacagacaaaccccgagcctccccctgatgggtggtgtggtggtgaagccagcaagggaagggatccccggacacacccctcctcatgctttatcccactgaaaccatgcggctgt

SEQ ID NO: 1483 - DNA, 484 bp, Artificial
  cDNA Sequence
agctgaagagcaagtgggatgagtccatcttcacgaaaggctgcatccaggcgctggaaagctggctcccgcggaacatttacattgtggctggcgtcttcatcgccatctcgctgttgcagatatttggcatcttcctggcaaggacgctgatctcagacatcgaggcagtgaaggccggccatcacttctgaggagcagagttgagggagccgagctgagccacgctgggaggccagagcctttctctgccatcagccctacgtccagagggagaggagccgacacccccagagccagtgccccatcttaagcatcagcgtgacgtgacctctctgtttctgcttgctggtgctgaagaccaagggtcccccttgttacctgcccaaacttgtgactgcatccctctggagtctacccagagacagagaatgtgtctttatgtgggagtggtgactctgaaagacagagagggctcctgtgg

SEQ ID NO: 1484 - DNA, 495 bp, Artificial
  cDNA Sequence
gtcttcatcgccatctcgctgttgcagaacccccagaggacatgactactgaaggctgtgctggcaggatcacaggtaaggatctagcaaattgtcccagcttcattgactgagctttcatccttgttgcactactttgagctgccattttgatcatataataatgatttagtagagctcttttttggttcaacctacctgttcttgtatcagaactgaaatgtttgattttataaatttgaatagtggcacaatatagagttcactattcctcaatattttcaaggctgtttcttatctgttcattcttttggttaacttgggaattattttatcaagtctctctacttcccaatttcctttcacctttggctcgaaatgatattcaatgtatacattaacttgagttacattttgctgcataatgcttgagttacattttgagtattacgtgttactcataatacatattgagttacattttgctgcataata

SEQ ID NO: 1485 - DNA, 610 bp, Artificial
  cDNA Sequence
tagtgaaatgtctcaagaataccccagccttctttgcggagaggctcaacaaggccatgaggggggcaggaacaaaggaccggaccctgattcgcatcatggtgtctcgcagcgagaccgacctcctggacatcagatcagagtataagcggatgtacggcaagtcgctgtaccacgacatctcgggagatacttcaggggattaccggaagattctgctgaagatctgtggtggcaatgactgaacagtgactggtggctcacttctgcccacctgccggcaacaccagtgccaggaaaaggccaaaagaatgtctgtttctaacaaatccacaaatagccccgagattcaccgtcctagagcttaggcctgtcttccacccctcctgacccgtatagtgtgccacaggacctgggtcggtctagaactctctcaggatgccttttctaccccatccctcacagcctcttgctgctaaaatagatgtttcatttttctgactcatgcaatcattcccctttgcctgtggctaagacttggcttcatttcgtcatgtaattgtatatttttatttggaggcatattttcttttcttacagtcattgccag

SEQ ID NO: 1486 - DNA, 374 bp, Artificial
  cDNA Sequence
gaaactttgagaagacaatcttggctctgatgaagaccccagtcctctttgacatttatgagataaaggaagccatcaagggggttggcactgatgaagcctgcctgattgagatcctcgcttcccgcagcaatgagcacatccgagaattaaacagagcctacaaagcaggaaaaggccaaaagaatgtctgtttctaacaaatccacaaatagccccgagattcaccgtcctagagcttaggcctgtcttccacccctcctgacccgtatagtgtgccacaggacctgggtcggtctagaactctctcaggatgccttttctaccccatccctcacagcctcttgctgctaaaatagatgtttcatttttct

SEQ ID NO: 1487 - DNA, 333 bp, Artificial
  cDNA Sequence
aaaaagaccctggaagaggccattcgaagcgacacatcagggcacttccagcggctcctcatctctctctctcagggaaaccgtgatgaaagcacaaacgtggacatgtcactcgcccagagagatgcccaggagctgtatgcggccggggagaaccgcctgggaacagacgagtccaagttcaatgcggttctgtgctcccggagccgggcccacctggtagcagttttcaatgagtaccagagaatgacaggccgggacattgagaagagcatctgccgggagatgtccggggacctggaggagggcatgctggccgtgggtaagtgtctc

SEQ ID NO: 1488 - DNA, 852 bp, Artificial
  cDNA Sequence
tcctttcagggaaaccgtgatgaaagcacaaacgtggacatgtcactcgcccagagagatgcccaggagctgtatgcggccggggagaaccgcctgggaacagacgagtccaagttcaatgcggttctgtgctcccggagccgggcccacctggtagcagttttcaatgagtaccagagaatgacaggccgggacattgagaagagcatctgccgggagatgtccggggacctggaggagggcatgctggccgtgggtaagtgtctcagccttctttgcggagaggctcaacaaggccatgaggggggcaggaacaaaggaccggaccctgattcgcatcatggtgtctcgcagcgagaccgacctcctggacatcagatcagagtataagcggatgtacggcaagtcgctgtaccacgacatctcgggagatacttcaggggattaccggaagattctgctgaagatctgtggtggcaatgactgaacagtgactggtggctcacttctgcccacctgccggcaacaccagtgccaggaaaaggccaaaagaatgtctgtttctaacaaatccacaaatagccccgagattcaccgtcctagagcttaggcctgtcttccacccctcctgacccgtatagtgtgccacaggacctgggtcggtctagaactctctcaggatgccttttctaccccatccctcacagcctcttgctgctaaaatagatgtttcatttttctgactcatgcaatcattcccctttgcctgtggctaagacttggcttcatttcgtcatgtaattgtatatttttatttggaggcatattttcttttcttacagtcattgccag

SEQ ID NO: 1489 - DNA, 635 bp, Artificial
  cDNA Sequence
gacctggaggagggcatgctggccgtggtgaaatgtctcaagaataccccagccttctttgcggagaggctcaacaaggccatgaggggggcaggaacaaaggaccggaccctgattcgcatcatggtgtctcgcagcgagaccgacctcctggacatcagatcagagtataagcggatgtacggcaagtcgctgtaccacgacatctcgggagatacttcaggggattaccggaagattctgctgaagatctgtggtggcaatgactgaacagtgactggtggctcacttctgcccacctgccggcaacaccagtgccaggaaaaggccaaaagaatgtctgtttctaacaaatccacaaatagccccgagattcaccgtcctagagcttaggcctgtcttccacccctcctgacccgtatagtgtgccacaggacctgggtcggtctagaactctctcaggatgccttttctaccccatccctcacagcctcttgctgctaaaatagatgtttcatttttctgactcatgcaatcattcccctttgcctgtggctaagacttggcttcatttcgtcatgtaattgtatatttttatttggaggcatattttcttttcttacagtcattgccag

SEQ ID NO: 1490 - DNA, 598 bp, Artificial
  cDNA Sequence
gaccccaggagcaggggtcgcgccgaagagcagagtccgcggctggaaaccaggcaggggagccacggagtagtcacacaggttttctgccgcctttcaactggtcttattttgctttcatttttcaccagcccatgtggggtgtttaatgttgcacgcgaacgcagtttcttccgggcccggaaggcccacgcacgcaacaatgttgtgcaagtgactggaaaccacctgagtgtccctccatgggggtgggttgcccagcatggacctctactcctgtcacaatgaagtcgactgtttcgtcgagggaagtggccaccgttgataaaatgaaaagacgccatgcagaatactgtgcacaggaggaaaggtctgcgtgccctaagagagagctgctggcgtgcagagagaagcagagatgccgacgacggggaggaaacacactggcggtggtgaggctccttccagcagccacagccctggttcctctcagtctgtgaccctcccacatccttcccatctatgagagcctgtaaactccttttgcttaaccttgttttagttaaggttttaaacagttgccaccagtgtgccctaa

SEQ ID NO: 1491 - DNA, 617 bp, Artificial
  cDNA Sequence
ccaacagtttcaggctggccatcttgggctggggctccctgggcttgcaggcaatcggccccagccccctcacacctatcagcctcctccatggcaacatgatggagtattagcccctaattttagaggtgttaggagctaaattgtgtcctcaaaatccatacactgaagtcctaacccccaggacttcagaaggtgactgtatttgtagacaggctctttacagaggtaattatgctaaaatgaggccatcagggtgccccctaatccaatatgaagagcatcctgctaagaggaggagatcaggacacagacatgcacagaggggagcccacgtgaggacacagggagaggacagccacctgcagccaggagagaggcctggaacagacccttccatcacagccctctgaaggcacccacctcacctcgccagcaccttgatcttggacttctagcctccaaactgtgagaaaataaatgcctgctgtggcttaaatttctgtctgtggtatgttgtgacagcagccttagcaaattaatataagtggcaaaaaaaatcataattagggaagctgatgttgatataggttcttatcttagtccattcaggcaac

SEQ ID NO: 1492 - DNA, 612 bp, Artificial
  cDNA Sequence
cgggacgccgctcctgggtggcgagcaggcgcgtgtgtaggggagttagaaatggagtcaatatatcttcaaaagcaccttggggcctgtttaactcaaggtcttgcagaagtggcaagagttcgcccagtggatccgatagaatatttagcattgtggatttacaagtataaggaaaatgtgaccatggaacaactgagacaaaaggaaatggccaagctggagcgtgaaagagaattagctctgatggagcaggaaatgatggagaggctcaaagcagaggagctcttacttcagcagcaacagctggcattgcagctagagttggaaatgcaagaaaaggagaggcagagaatacaagaactacagagagctcaagaacaattaggcaaggagatgagaatgaatatggaaaatctagttaggaatgaagatattctacattcagaggaagcaacactagactcaggcaaaacactagctgaaatcagcgatcgttatggagcacctaacttgagcagagtggaagaacttgatgaaccaatgttttctgatattgcattaaacattgatcaagatttgtaggaccaaccaacctaagagcaataaatg

SEQ ID NO: 1493 - DNA, 829 bp, Artificial
  cDNA Sequence
ggggtgagcgcaccggaaaggcccgaactgtttttgggatttgttcccctagcttcgctgggtccggcgggcagaggcggttctgaccgttgggccttgggcgtcgagcaggactcacctgaggcggagagaggccgcttcgcgcctggggctcccgaaagcggccagctgtcctcctgctccccctgagcggggagcgctgcgtctcctgcgggctgcgggagacccttccagactcccgggtgggaaaaccacactgagcgccccgggaggttgccagatacaatactgtatctggcacccctgcccgggtgcccccgcccagttggctggctggctggctagctgtctcccaggtgtgggagttagaaatggagtcaatatatcttcaaaagcaccttggggcctgtttaactcaaggtcttgcagaagtggcaagagttcgcccagtggatccgatagaatatttagcattgtggatttacaagtataaggaaaatgtgaccatggaacaactgagacaaaaggaaatggccaagctggagcgtgaaagagaattagctctgatggagcaggaaatgatggagaggctcaaagcagaggagctcttacttcagcagcaacagctggcattgcagctagagttggaaatgcaagaaaaggagaggcagagaatacaagaactacagagagctcaagaacaattaggcaaggagatgagaatgaatatggaaaatctagttaggaatgaagatattctacattcagaggaagcaacactagactcaggcaaaacactagctgaaatcagcgatcgttatggagcacc

SEQ ID NO: 1494 - DNA, 849 bp, Artificial
  cDNA Sequence
atataggagtcgctcaggagcaagctgtggcaagctggagggagggacacatcccgtgttccatccactccctcccttctcagcagtcctcgcctgttctcacgtgctcacaggcagttaggcagaagtgatccccgtggctctgccaaagacaagcctgttgggttgaaagaagaagaagaagaagaaaaaaaaactcaggcaaagtcacagcctcaaaattgttcactgaaagaagcgtgagtggagaagtgtgagaagatgaatggaccggtggatggcttgtgtgaccactctctaagtgaaggagtcttcatgttcacatcggagtctgtgggagagggacacccggataagatctgtgaccagatcagtgatgcagtgctggatgcccatctcaagcaagaccccaatgccaaggtggcctgtgagacagtgtgcaagaccggcatggtgctgctgtgtggtgagatcacctcaatggccatggtggactaccagcgggtggtgagggacaccatcaagcacatcggctacgatgactcagccaagggctttgacttcaagacttgcaacgtgctggtggctttggagcagcaatccccagatattgcccagtgcgtccatctggacagaaatgaggaggatgtgggggcaggagatcagggtttgatgttcggctatgctaccgacgagacagaggagtgcatgcccctcaccatcatccttgctcacaagctcaacgcccggatggcagacctcaggcgctccggcctcctcccctggctgcggcctgactctaagactcaggtgacagttcagtacatgcaggacaatggcgcagtcatc

SEQ ID NO: 1495 - DNA, 667 bp, Artificial
  cDNA Sequence
atataggagtcgctcaggagcaagctgtggcaagctggagggagggacacatcccgtgttccatccactccctcccttctcagcagtcctcgcctgttctcacgtgctcacaggcagttaggcagaagtgatccccgtggctctgccaaagacaagcctgttgggttgaaagaagaagaagaagaagaaaaaaaaactcaggcaaagtcacagcctcaaaattgttcactgaaagaagcgtgagtggagaagtgtgagaagatgaatggaccggtggatggcttgtgtgaccactctctaagtgaaggagtcttcatgttcacatcggagtctgtgggagagggacacccggataagatctgtgaccagatcagtgatgcagtgctggatgcccatctcaagcaagaccccaatgccaaggtggcctgtgagacagtgtgcaagaccggcatggtgctgctgtgtggtgagatcacctcaatggccatggtggactaccagcgggtggtgagggacaccatcaagcacatcggctacgatgactcagccaagggctttgacttcaagacttgcaacgtgctggtggctttggagcagcaatccccagatattgcccagtgcgtccatctggacagaaatgaggaggatgtgggggcaggagatcagg

SEQ ID NO: 1496 - DNA, 437 bp, Artificial
  cDNA Sequence
cggagtctgtgggagagggacacccggataagatctgtgaccagatcagtgatgcagtgctggatgcccatctcaagcaagaccccaatgccaaggtggcctgtggctttgacttcaagacttgcaacgtgctggtggctttggagcagcaatccccagatattgcccagtgcgtccatctggacagaaatgaggaggatgtgggggcaggagatcagggtttgatgttcggctatgctaccgacgagacagaggagtgcatgcccctcaccatcatccttgctcacaagctcaacgcccggatggcagacctcaggcgctccggcctcctcccctggctgcggcctgactctaagactcaggtgacagttcagtacatgcaggacaatggcgcagtcatccctgtgcgcatccacaccatcgtcatctctgtgcag

SEQ ID NO: 1497 - DNA, 407 bp, Artificial
  cDNA Sequence
acagaggcttcaatccctgacgctgcaccttgctggaaggtttcctatgccattggtgtggccgagccgctgtccatttccatcttcacctacggaacctctcagaagacagagcgagagctgctggatgtggtgcataagaacttcgacctccggccgggcgtcattgtcagggatttggacttgaagaagcccatctaccagaagacagcatgctacggccatttcggaagaagcgagttcccatgggaggttcccaggaagcttgtattttagagccagggggagctgggcctggtctcaccctggaggcacctggtggccatgctcctcttccccagacgcctggctgctgatcgccttccccacccaccaaccctcagggcaaagccaggtccctctcattt

SEQ ID NO: 1498 - DNA, 359 bp, Artificial
  cDNA Sequence
tctggataacttccacagggtcccacagccacgtgtttagacctagatgtataactaggagctttgactcaggagcctgtgacataccccctcccccaccgttgtctcatgccagtaacaggctcaaacaatgacaaagcagattcagaaatgaggccatggactctgtcctgaaggcctgaggttactggaaattaggggattaacccactagctcttgttgagccgtgggcaattgtctgaaaaatgactgagggtgagttggcttacctggcccatcagggtaggctggagttagggactgaccagcagctttagaatcccagccccctgaccactcagagacatgcagagattgg

SEQ ID NO: 1499 - DNA, 971 bp, Artificial
  cDNA Sequence
gcctctggcacctggggcagccgcgcccgcggagttttccgcccggcgctgacggctgctgcgcccgcggctccccagtgccccgagtgccccgcgggccccgcgagcgggagtgggacccagcccctaggcagaacccaggcgccgcgcccgggacgcccgcggagagagccactcccgcccacgtcccatttcgcccctcgcgtccggagtccccgtggccagatctaaccatgagctaccctggctatcccccgcccccaggtggctacccaccagctgcaccaggtggtggtccctggggaggtgctgcctaccctcctccgcccagcatgccccccatcgggctggataacgtggccacctatgcggggcagttcaaccaggactatctctcgggaatggcggccaacatgtctgggacatttggaggagccaacatgcccaacctgtaccctggggcccctggggctggctacccaccagtgccccctggcggctttgggcagcccccctctgcccagcagcctgttcctccctatgggatgtatccacccccaggaggaaacccaccctccaggatgccctcatatccgccatacccaggggcccctgtgccgggccagcccatgccaccccccggacagcagcccccaggggcctaccctgggcagccaccagtgacctaccctggtcagcctccagtgccactccctgggcagcagcagccagtgccgagctacccaggatacccggggtctgggactgtcacccccgctgtgcccccaacccagtttggaagccgaggcaccatcactgatgctcccggctttgaccccctgcgagatgccgaggtcctgcggaaggccatgaaaggcttcgggacggatgagcaggccatcattgactgcctggggagtcgctccaacaagcagcggcagcagatcctactttccttcaagacggcttac

SEQ ID NO: 1500 - DNA, 344 bp, Artificial
  cDNA Sequence
agatctaaccatgagctaccctggctatcccccgcccccaggtggctacccaccagctgcaccaggtggtggtccctggggaggtgctgcctaccctcctccgcccagcatgccccccatcgggctggataacgtggccacctatgcggggcagttcaaccaggactatctctcgggaatggcggccaacatgtctgggacatttggaggagccaacatgcccaacctgtaccctggggcccctggggctggctacccaccagtgccccctggcggctttgggcagcccccctctgcccagcagcctgttcctccctatgggatgtatccacccccaggaggaa

SEQ ID NO: 1501 - DNA, 334 bp, Artificial
  cDNA Sequence
agacttgggcttttattttggggtgaggggtaaggtgttttcatcagaaggcgggagcaagggtatacaaaccaaaaagtcagtttagtatgtggcttagctcagagcacacgagggtaccaacacagccaaagactgtaagaaggtagctgaagtcctctgccaaataggattgaaaagctaaaatctttctctgtttctttcttaagtaacaactggtctattcaagctcaaccagagcatataagagaaaaaactgactaacgagggggtcttaaagagctttgaaggacagtttctagaaagtagaaagatcactgagtaaattactgca

SEQ ID NO: 1502 - DNA, 1275 bp, Artificial
  cDNA Sequence
tggagctcctggggcctaacaaaaagaaacctgccatgctgctcttcctcctctctgcactggtcctgctcacacagcccctgggctacctggaagcagaaatgaagacctactcccacagaacaatgcccagtgcttgcaccctggtcatgtgtagctcagtggagagtggcctgcctggtcgcgatggacgggatgggagagagggccctcggggcgagaagggggacccaggtttgccaggagctgcagggcaagcagggatgcctggacaagctggcccagttgggcccaaaggggacaatggctctgttggagaacctggaccaaagggagacactgggccaagtggacctccaggacctcccggtgtgcctggtccagctggaagagaaggtcccctggggaagcaggggaacataggacctcagggcaagccaggcccaaaaggagaagctgggcccaaaggagaagtaggtgccccaggcatgcagggctcggcaggggcaagaggcctcgcaggccctaagggagagcgaggtgtccctggtgagcgtggagtccctggaaacacaggggcagcagggtctgctggagccatgggtccccagggaagtccaggtgccaggggacccccgggattgaagggggacaaaggcattcctggagacaaaggagcaaagggagaaagtgggcttccagatgttgcttctctgaggcagcaggttgaggccttacagggacaagtacagcacctccaggctgctttctctcagtataagaaagttgagctcttcccaaatggccaaagtgtcggggagaagattttcaagacagcaggctttgtaaaaccatttacggaggcacagctgctgtgcacacaggctggtggacagttggcctctccacgctctgccgctgagaatgccgccttgcaacagctggtcgtagctaagaacgaggctgctttcctgagcatgactgattccaagacagagggcaagttcacctaccccacaggagagtccctggtctattccaactgggccccaggggagcccaacgatgatggcgggtcagaggactgtgtggagatcttcaccaatggcaagtggaatgacagggcttgtggagaaaagcgtcttgtggtctgcgagttctgagccaactggggtgggtggggcagtgcttggcccaggagtttggccagaagtcaaggcttagaccctcatgctgccaatatcctaataaaaaggtgaccatctgtgccgggaa

SEQ ID NO: 1503 - DNA, 1259 bp, Artificial
  cDNA Sequence
ggcctaacaaaaagaaacctgccatgctgctcttcctcctctctgcactggtcctgctcacacagcccctgggctacctggaagcagaaatgaagacctactcccacagaacaatgcccagtgcttgcaccctggtcatgtgtagctcagtggagagtggcctgcctggtcgcgatggacgggatgggagagagggccctcggggcgagaagggggacccaggtagggagctgcagggcaagcagggatgcctggacaagctggcccagttgggcccaaaggggacaatggctctgttggagaacctggaccaaagggagacactgggccaagtggacctccaggacctcccggtgtgcctggtccagctggaagagaaggtcccctggggaagcaggggaacataggacctcagggcaagccaggcccaaaaggagaagctgggcccaaaggagaagtaggtgccccaggcatgcagggctcggcaggggcaagaggcctcgcaggccctaagggagagcgaggtgtccctggtgagcgtggagtccctggaaacacaggggcagcagggtctgctggagccatgggtccccagggaagtccaggtgccaggggacccccgggattgaagggggacaaaggcattcctggagacaaaggagcaaagggagaaagtgggcttccagatgttgcttctctgaggcagcaggttgaggccttacagggacaagtacagcacctccaggctgctttctctcagtataagaaagttgagctcttcccaaatggccaaagtgtcggggagaagattttcaagacagcaggctttgtaaaaccatttacggaggcacagctgctgtgcacacaggctggtggacagttggcctctccacgctctgccgctgagaatgccgccttgcaacagctggtcgtagctaagaacgaggctgctttcctgagcatgactgattccaagacagagggcaagttcacctaccccacaggagagtccctggtctattccaactgggccccaggggagcccaacgatgatggcgggtcagaggactgtgtggagatcttcaccaatggcaagtggaatgacagggcttgtggagaaaagcgtcttgtggtctgcgagttctgagccaactggggtgggtggggcagtgcttggcccaggagtttggccagaagtcaaggcttagaccctcatgctgccaatatcctaataaaaaggtgaccatctgtgccgggaa

SEQ ID NO: 1504 - DNA, 497 bp, Artificial
  cDNA Sequence
aatttattttgagccacgctgtgaccccgaaggtctggatcatgctatgctgctggttggctacagctatgaaggagcagactcagataacaataaatattggctggtgaagaacagctagggtaaaaactggggcatggatggctacataaagatggccaaagaccggaggaacaactgtggaattgccacagcagccagctaccccactgtgtgagctgatggatggtgatgaggaagaacttgactgaggatggcacatccaaaggaggaatttatcttcaatctaccagcccctgctgtgtggaatgcgcacttcaatcattgaagatccaagtgtgattggaattctgatattttcacactggtaaatgttacctgtattttaattactgctataaacatgtttgtattattgattcacttactttgtattttcattttaaaaggatatatacaattttacctgtttaaataaactgtaatttcaaatatac

SEQ ID NO: 1505 - DNA, 738 bp, Artificial
  cDNA Sequence
attcttcctccattacctcactgcctccggtggctgctgggataccggaggactcgggtcccggctcgactcagtcctccagccgcccggggaatacctctagttcttcccggccgccgccgccgccgccgccccgccgcttcctcctccgcctgccggcctccttcgccccgtcccgtccgcgcagcgcgtccggcccgcccgcaggccagcttctctcgggagcccccacccaggcgcatggctccatgaagcaagaggaggaggcagagcgcgagaggtcccgtccgccccagccgcgtctgggccaggataaaagcaaaaccatattcctgctgctgtcagttatgatgcactgagaaaacttcagagacctaaactttttccagagaagagaagctttactggtgttccagccctaagaaacctttgttcaagaaaacggcagatgctctgttgaatccactggagattgttctgatactaaggacaagtatcaaccatctttcctgtgaaaaattccctctcgtactttagttctgtggatccaaaatttatagcattcttctaccaccacaggggctcatatgacattaacagacaagacacttttcagaaagacaggcaacgtgttggaccttccggagcttctcagaagacagagggttttcttttgaggatttaaacctcagacacagggagctgacctattcaccttagaatcctctggggcaccca

SEQ ID NO: 1506 - DNA, 588 bp, Artificial
  cDNA Sequence
ccgccgccccgccgcttcctcctccgcctgccggcctccttcgccccgtcccgtccgcgcagcgcgtccggcccgcccgcaggccagcttctctcgggagcccccacccaggcgcatggctccatgaagcaagaggaggaggcagagcgcgagaggtcccgtccgccccagccgcgtctgggccaggataaaagcaaaaccatattcctgctgctgtcagttatgatgcactgagaaaacttcagagacctaaactttttccagagaagagaagctttactggtgttccagccctaagaaacctttgttcaagaaaacggcagatgctctgttgaatccactggagattgttctgatactaaggacaagtatcaaccatctttcctgtgaaaaattccctctcgtactttagttctgtggatccaaaatttatagcattcttctaccaccacaggggctcatatgacattaacagacaagacacttttcagaaagacaggcaacgtgttggaccttccggagcttctcagaagacagagggttttcttttgaggtaaatttgatagtacattttgatagtacaggagg

SEQ ID NO: 1507 - DNA, 519 bp, Artificial
  cDNA Sequence
ccgccgccccgccgcttcctcctccgcctgccggcctccttcgccccgtcccgtccgcgcagcgcgtccggcccgcccgcaggccagcttctctcgggagcccccacccaggcgcatggctccatgaagcaagaggaggaggcagagcgcgagaggtcccgtccgccccagccgcgtctgggccaggataaaagcaaaaccatattcctgctgctgtcagttatgatgcactgagaaaacttcagagacctaaactttttccagagaagagaagctttactggtgttccagccctaagaaacctttgttcaagaaaacggcagatgctctgttgaatccactggagattgttctgatactaaggacaagtatcaaccatctttcctgtgaaaaattccctctcgtactttagttctgtggatccaaaatttatagcattcttctaccaccacaggggctcatatgacattaacagacaagacacttttcagaaagacagggaactgtggaagtaaacca

SEQ ID NO: 1508 - DNA, 925 bp, Artificial
  cDNA Sequence
ccgccgccccgccgcttcctcctccgcctgccggcctccttcgccccgtcccgtccgcgcagcgcgtccggcccgcccgcaggccagcttctctcgggagcccccacccaggcgcatggctccatgaagcaagaggaggaggcagagcgcgagaggtcccgtccgccccagccgcgtctgggccaggataaaagcaaaaccatattcctgctgctgtcagttatgatgcactgagaaaacttcagagacctaaactttttccagagaagagaagctttactggtgttccagccctaagaaacctttgttcaagaaaacggcagatgctctgttgaatccactggagattgttctgatactaaggacaagtatcaaccatctttcctgtgaaaaattccctctcgtactttagttctgtggatccaaaatttatagcattcttctaccaccacaggggctcatatgacattaacagacaagacacttttcagaaagacaggtaagtcatttgttaaaatctcactactgttgtttaacagaaacatatatatgcatgtatatgtgtgtactgtatggaaaaagtggaattagagtttatctagaaaagaaaaaattacctcatctaagtgcagaaatgaataatacttaaaccataccatacaattctctatcatatttccacagataagtcaaaaatttaaaaaatcttattgttcatgcataaatgcagaaaacaatacctctagtatatgtttgtgttctattgtactttcacagaaggtgtttgatacttaatactgtgtttattaagaaaaatctttgcaatggttatggaattaaaatttcatgtaaaaatgattatgtagatcaagaaaagttgcaattttctggattcctgatattttaaataaaagtagtttccaaa

SEQ ID NO: 1509 - DNA, 513 bp, Artificial
  cDNA Sequence
ttttccagagaagagaagctttactggtgttccagccctaaggctcatatgacattaacagacaagacacttttcagaaagacaggtaagtcatttgttaaaatctcactactgttgtttaacagaaacatatatatgcatgtatatgtgtgtactgtatggaaaaagtggaattagagtttatctagaaaagaaaaaattacctcatctaagtgcagaaatgaataatacttaaaccataccatacaattctctatcatatttccacagataagtcaaaaatttaaaaaatcttattgttcatgcataaatgcagaaaacaatacctctagtatatgtttgtgttctattgtactttcacagaaggtgtttgatacttaatactgtgtttattaagaaaaatctttgcaatggttatggaattaaaatttcatgtaaaaatgattatgtagatcaagaaaagttgcaattttctggattcctgatattttaaataaaagtagtttccaaagg

SEQ ID NO: 1510 - DNA, 298 bp, Artificial
  cDNA Sequence
gtagcaaccatctttcctgtgaaaaattccctctcgtactttagttctgtggatccaaaatttatagcattcttctaccaccacaggggctcatatgacattaacagacaagacacttttcagaaagacaggcaacgtgttggaccttccggagcttctcagaagacagagggttttcttttgaggtaaatttgatagtacattttgatagtacaggaggcgatacggcatggtgacagaaaagcgccggcttggttagcaggaccacctggcagggctgcaggctgtgccacttacc

SEQ ID NO: 1511 - DNA, 557 bp, Artificial
  cDNA Sequence
gtagcaaccatctttcctgtgaaaaattccctctcgtactttagttctgtggatccaaaatttatagcattcttctaccaccacaggggctcatatgacattaacagacaagacacttttcagaaagacaggtaagtcatttgttaaaatctcactactgttgtttaacagaaacatatatatgcatgtatatgtgtgtactgtatggaaaaagtggaattagagtttatctagaaaagaaaaaattacctcatctaagtgcagaaatgaataatacttaaaccataccatacaattctctatcatatttccacagataagtcaaaaatttaaaaaatcttattgttcatgcataaatgcagaaaacaatacctctagtatatgtttgtgttctattgtactttcacagaaggtgtttgatacttaatactgtgtttattaagaaaaatctttgcaatggttatggaattaaaatttcatgtaaaaatgattatgtagatcaagaaaagttgcaattttctggattcctgatattttaaataaaagtagtttccaaa

SEQ ID NO: 1512 - DNA, 357 bp, Artificial
  cDNA Sequence
gctggaggaaatggaaaggcctattccccaaagcagtgtttgtctcacagaaatagagatattatgtgtaataaattgggaaaacttgtgaaatgaaacatctgttctgcatgcttaagcaccaaggcacttgcaaaatatgaatttttactccatattccaaatgctgtgatgatgagctgagaatgagtttggaaggttcatctctttccaataaaaaggttcatcatgcctctctgacttttataattattttggaacattttagataggaaattgaaagaggagggaaagaatgatgacagaactgaagaagaattgatgaaaggctaatttaaccaaatcaacaaagccatt

SEQ ID NO: 1513 - DNA, 455 bp, Artificial; identical to SEQ ID NO: 1447
  cDNA Sequence

SEQ ID NO: 1514 - DNA, 669 bp, Artificial
  cDNA Sequence
ctcaaaacatttaactcctccaagcttcagtgtccttataaaaaatgaggaaacaatactggtcccgtgacattgtgtgaagattgaatagtacataatatgctgtattagaagtgcttgtcaaggttcttggcaaatgataggtgctcagtcaatagcctctgtgtatagtaacagttctggtagtaattttggtagctggggggatggtaataactgtgacagcaacaagtatcttattcccatttcacagatgaagacataagctctgggaaaaaaaaatcttcaactgtcactgattaccttgcccaccccacgacatatcctaagacctggcacgtgataattttaatgaaatatctgggtgaatggattaatgaaaggagaaagcagagccagtggtgtggggggtgatgtgaatgcccactgaaatctgaagtagggtgcagatttgttcatcagttgaaagttactcgggtcacatctgaaggcggctctaggtcaccctagaggcctaggctggctgtcttcaggtcagggggctgagttgccattcaaagactcaaaggagtgaatcagcctgaccaggcctgccacagagacctcagagtgccagagaatctccactgtgtccttagctctgcacagtcagggcttccccgaagtctg

SEQ ID NO: 1515 - DNA, 527 bp, Artificial
  cDNA Sequence
ctcttgccttggatctgagaaaggctaccagtgtgaatgtccccggggcctggtgctgtctgaggataaccacacttgccaagtccctgtgttgtgcaaatcaaatgccattgaagtgaacatccccagggagctggttggtggcctggagctcttcctgaccaacacctcctgccgaggagtgtccaacggcacccatgtcaacatcctcttctctctcaagacatgtggtacagtggtcgatgtggtgaatgacaagattgtggccagcaacctcgtgacaggtctacccaagcagaccccggggagcagcggggacttcatcatccgaaccagcaagctgctgatcccggtgacctgcgagtttccacgcctgtacaccatttctgaaggatacgttcccaaccttcgaaactccccactggaaatcatgagccgaaatcatgggatcttcccattcactctggagatcttcaaggacaatgagtttgaagagccttaccgggaagctctgcccaccctcaagc

SEQ ID NO: 1516 - DNA, 377 bp, Artificial
  cDNA Sequence
atcacctagcaaagcacttccaggtccctgtcttcaagtttgtgggcaaagaccacaaggaagtgtttctgcactgccgggttcttgtctgtggagtgttggacgagcgttcccgctgtgcccagggttgccaccggcgaatgcgtcgtggggcaggaggagaggactcagccggtctacagggccagacgctaacaggcggcccgatccgcatcgactgggaggactagttcgtagccatacctcgagtccctgcattggacggctctgctctttggagcttctccccccaccgccctctaagaacatctgccaacagctgggttcagacttcacactaaataatcacttccatcaaggataactctaggattgct

SEQ ID NO: 1517 - DNA, 2458 bp, Artificial
  cDNA Sequence
gtgctgattcctgaggactaggaaggtgccccgaaaagaattcagagacctgacaatgtccctgtattgtggaatagcttgcaggagaaaatttttttggtgctataggctgctgtcaacctatgttactaagacacggtatttatttgaactgaaggaagatgatgatgcatgtaaaaaagcccagcaaacaggagcgttttacctctttcatagtctggctcctctgcttcagacttcagcacatcaatacctggccccccggcacagcctgttagagttggaaaggctcctgggtaaatttggacaggatgcacaaagaatagaagattctgtgctgattggatgctctgagcagcaggaagcatggtttgctctggatctaggtctggatagctccttttccataagtgcctccttacacaaacctgaaatggagacagagctcaaggggtctttcattgagctgagaaaggcactctttcaactcaatgcaagggatgcctccttgctgtccacggctcaagctcttctccgctggcatgatgctcatcagttctgcagcagaagtgggcagcccaccaagaagaacgtggctggcagcaagcgtgtgtgcccttccaataatataatctattatccacaggtgaaagtgtggaagagaccatccgccgagaagttgcagaagaggtgggattggaggtggaaagcctgcagtactatgcatcccagcattggcccttccctagtggctcactcatgattgcttgccatgcaactgtgaaaccagggcagacagaaatccaggtgaacttgagagaattagagacagctgcctggttcagtcatgatgaggtagccacagccctgaagagaaagggcccctatactcagcaacagaatgggactttcccattctggctgccccctaagttagccatctcccaccaactgattaaggagtgggtggaaaaacagacctgttcttccctgcctgcttagcccggatcaagtcacttagatcgctccttggtattcctgagggacaaactagagatcagttgacaaaggagaagtgacaaaagataagctgcagaaggacctcagaagggcagagcaaagggtgagcctacagtaagacacttctatcagcagtgttaatggaagaaattcctaccaatgggcaatcaaaaaagccagtgtgagaagaaaactgatgagctgtcaactgtcaaaaatcagggggaagggggaagcattagtttggatgtaggcccttgttcagtcattttctctaaggccttggaagcaaacatcttctggcatatggcttgttaatgttgtgtttacactaactgccaaaatgtgcctgttgtaagtttggttaaaacttttatcttagtattgaaaatatatagcaagttttaagtcattactgagttacttgttacccttacagaattaagaaaaatagcacagtatgacattttaaaattcatgtacaggtgcattctagttacatgaacatgctagttaaataaaagtcacaattaagtcattatgactcagagtactttataataaatcagatgccctgaggctctgttgaggaagtagaatcccaatgggactccagacagtaaatctttttcgctgttttcagctctgtcacatgctcagtttgtgacccagggaaaagactattgctttgccatgcctgttttcctaaataaaacagttgctggcatttgcacatccacaacgtgttgattaacaaagggattggtggagataaacagatgccaaacctgacctatttcttaaactttatggaataaactaaatttaggatttctcatcattcatatatgatgccataagggagaagagtttatttggggaaaataaaagaaatttccacacctttgttctgatgtctttttctgtcctgtgaattgagaaaattttacaaggtgagaatttgggggtaggggaaaggatccctattggtgacaattaaacatttaagtccaggtttcaagtcagtgtaacaactgaagcaatgtgcaggaggaatgttagaggtcttgctgaaaagaggaaataatcatatcttcagaagattctagggacttatttgtgattaaagacaaaagctccagagaccctaaggttatttacatgtcaaagtcccataggactaagtcccaaagtcccatagcactaaagagattctaaaactagaaaagttaaagcactgaatttccttttgatctcaaaaggtcattgctctctccactgccagcaaaccatcattgctttggggaaatcaaagtgccttcatcaggaaatgttgagggataatatgtgatgggacttgattgtcttgttagattggcagcttgcctttacctgggctgaacccagcatgcagaagggaaaagcactcacaaaagag

SEQ ID NO: 1518 - DNA, 1009 bp, Artificial
  cDNA Sequence
ccgcgagtgccacagtctaaggtgctgtacattacctcaaatccgcccagtggcacccgactcgctctcctctccctcaccgacgcccctgagtcgaaataatctgctaccacctattggcacagctgaagtggaacatgtgagcactgtggggccacaaagacagatgaaaccccatggcgactctagtcgagctcaaagtgcggtggtggatgaacctaactatcagcagccacaagaaaggctccttttgcccgactttttccccaggcccaacacaactcaatcatttttggtagagtgacgtacttcctagaatggtcttgatagttggggaaagaaaaggtggggggaataatagtttggcagacttaagattttatctagaggcttaacccagaataaaagttgagtttccaacaataaaaagtgttataaatacattttgttcaaattctaactagtccctgatgcctattctttaatgccttatacagaaatcacaaatattctaagcaatttaacacttaagatatgtctgaccacaagcaagaatattaaatcccagtacacatcagataagcataactttattatgtaatcctgttcttctggaattacatcaaaagtggtctcagattatgatgagtcctggtggatgagtgagttgggactttaataaaaaatttttttcagaagcaggctcttgccatgttgcccagactagacctggaactcctgggctcaagcaatcctgccttagcctcccgagtagctgggactacaggtgcacaccactgtacccagcttaggactttttctttctactggtgttttaaatgctgacactgcctaccatttattaggcatttactagcccttttaagtaatagaaaaaacctgatcagcaatggggtcatgcactgaccctccccatttgtaggctgggagctcgaccccacataatctgctttgtggcaagagcacttggagagcctggggaagtaac

SEQ ID NO: 1519 - DNA, 907 bp, Artificial
  cDNA Sequence
cgcgagtgccacagtctaagatgagtctctgtcaagcaagcagacatcagccaaatgtgaatgatctcttggttcatggaatgcctctacagccaagaaatctctccctaatggacaagctcctagatcttgatgacaagctacttatgaggcctgggtccagtaccatcctttcaactcgaaattggccaaatcgagctgtggagtttagtacatcatctctgtcatacacagtgcagtccaccaggagacgcaatccaccaccacgaactcttcatccgatcagcacgagccattcatgtgctgaaacaccaagatctgtggaagaaatcctcagaggagcccgagtgtaggtttcaaaagcagaacttctggaaaccgtgcccagtggcacccgactcgctctcctctccctcaccgacgcccctgagtcgaaataatctgctaccacctattggcacagctgaagtggaacatgtgagcactgtggggccacaaagacagatgaaaccccatggcgactctagtcgagctcaaagtgcggtggtggatgaacctaactatcagcagccacaagaaaggctccttttgcccgactttttccccaggcccaacacaactcaatcatttttgctggatacacagtatcgtcgctcatgtgcagttgagtatcctcatcaggcccgacctggcaggggatctgcaggtcctcagttacatgggtctacaaaatctcaaagcggaggcagaccagtctctcgaaccaggcagggaccataaggcaaatgagaagaatctatcaggctgcaggaaacacgagatttcatgaagcagtattcagtcatcaagtgatgcagagcttgtatagaagatcgactagaaatcatcttcatgaagagtgattttg

SEQ ID NO: 1520 - DNA, 1355 bp, Artificial
  cDNA Sequence
aaaaattaaagcatggggaaaaagtataaataaccaaattggaaatattaacttttggcaaaatgagtctctgtcaagcaagcagacatcagccaaatgtgaatgatctcttggttcatggaatgcctctacagccaagaaatctctccctaatggacaagctcctagatcttgatgacaagctacttatgaggcctgggtccagtaccatcctttcaactcgaaattggccaaatcgagctgtggagtttagtacatcatctctgtcatacacagtgcagtccaccaggagacgcaatccaccaccacgaactcttcatccgatcagcacgagccattcatgtgctgaaacaccaagatctgtggaagaaatcctcagaggagcccgagtcccagtggcacccgactcgctctcctctccctcaccgacgcccctgagtcgaaataatctgctaccacctattggcacagctgaagtggaacatgtgagcactgtggggccacaaagacagatgaaaccccatggcgactctagtcgagctcaaagtgcggtggtggatgaacctaactatcagcagccacaagaaaggctccttttgcccgactttttccccaggcccaacacaactcaatcatttttggtagagtgacgtacttcctagaatggtcttgatagttggggaaagaaaaggtggggggaataatagtttggcagacttaagattttatctagaggcttaacccagaataaaagttgagtttccaacaataaaaagtgttataaatacattttgttcaaattctaactagtccctgatgcctattctttaatgccttatacagaaatcacaaatattctaagcaatttaacacttaagatatgtctgaccacaagcaagaatattaaatcccagtacacatcagataagcataactttattatgtaatcctgttcttctggaattacatcaaaagtggtctcagattatgatgagtcctggtggatgagtgagttgggactttaataaaaaatttttttcagaagcaggctcttgccatgttgcccagactagacctggaactcctgggctcaagcaatcctgccttagcctcccgagtagctgggactacaggtgcacaccactgtacccagcttaggactttttctttctactggtgttttaaatgctgacactgcctaccatttattaggcatttactagcccttttaagtaatagaaaaaacctgatcagcaatggggtcatgcactgaccctccccatttgtaggctgggagctcgaccccacataatctgctttgtggcaagagcacttggagagcctggggaagtaac

SEQ ID NO: 1521 - DNA, 606 bp, Artificial
  cDNA Sequence
gtaattctgcaggatctgtgccctgatcttgatttatactgtgttttgtcaaaagtacaaacacagtgctaatttatgacgtggaattggagctgtttggcctgcacttaccatatctgccatggtcgatagggttttaactacataccacattacagatagttttcactgtttctgtaacttttgtctcctctgcagaaaccccatggcgactctagtcgagctcaaagtgcggtggtggatgaacctaactatcagcagccacaagaaaggctccttttgcccgactttttccccaggcccaacacaactcaatcatttttgctggatacacagtatcgtcgctcatgtgcagttgagtatcctcatcaggcccgacctggcaggggatctgcaggtcctcagttacatgggtctacaaaatctcaaagcggaggcagaccagtctctcgaaccaggcagggaccataaggcaaatgagaagaatctatcaggctgcaggaaacacgagatttcatgaagcagtattcagtcatcaagtgatgcagagcttgtatagaagatcgactagaaatcatcttcatgaagagtgattttggcacaagt

SEQ ID NO: 1522 - DNA, 388 bp, Artificial
  cDNA Sequence
cttcattcactacacactctgagcctcatcatgcaaaaatacctaggagccaattttaaacatagaattcttttagctgttgattcacaaaatgtcttaggatgattaatttctaaaaatatcctcaaaggtatgagataataaggccacagcagtgttttcaatgcggcttccaagttaagcattattatgtggatgtagctatatctataccaacagagctataaatgcattcatttggggatgagtagtcttgatgtataattaatctctcattccttctgacagtactttttttcaaatttcaattactgtcttaaggataaggaatactgcaagctgctccagatcctactgaagggaatgaaggtttaggaactttacccga

SEQ ID NO: 1523 - DNA, 545 bp, Artificial
  cDNA Sequence
tcgcacactgaaatatccttttattgcaactcaaattttcaaaaaccagaaaatcaaattattatgctctagccaaattatgtaatgttttctttttcttttctctgtcacccaggctggactgtagtggaacaatcacagttcactgcagcatcggcctcctgggctcaaactccgtctcaaaaaaaaaaaaaaaaagagaatatgcattaggcaagacaatataaacctccaattacaaaaatcaattaagaaaggttaactgttcttgcacttgtgggatgaacatgaagatctgaatgggccatgaatagtctggctgggggttttgaagcaggaagtcttggaagccagtaaattgtaaagttgtccaagagacccagagcccaactcaaaagtccaatcctcccatagccactgtctatcccaagacaaagtcgaaaaaagctaattagtacccacacccagctctaagtcacacaagaacaaatctctccctgggccctgtgcaggccaggccagaagagcaagggcaactcaggata

SEQ ID NO: 1524 - DNA, 635 bp, Artificial
  cDNA Sequence
cgtcccacccctatcgaggcagtcacaccttaaaaaaaaaaggaggggttattcctgcttttgccgtgctgtgatccagggcagagtttctcgtcaaccagtaaaacatccagtaacacagccaatggaaataaatgaatgggtctctgtttatagtgaagattctttcgttctccagctccaggcttcatacggtaaaactctctgggaaggaaaggaactcagagtcccatgcagaaaattgttcagctggaggggtatcagaaagatggatttccaaagccaactgtttcctgtagtgtgtggatctctgcaagcagagcctcatctttcaatttcagctacatgaaagaggaagaaagggaaagatatatgtcatacgtgatatactttatgtggctttgaagacccctcttttgtggggctacggctaaagaacatagttccctgggatggaattggctcttcctatttccctacttcatgaaaactccagtagaagaccttagaaccttgtcctggttacatggatatgtttactttgtgaaaattcatcaagcactatgcacggtcatgatttgtacatttttttgtaagataacttcattaaaatttactttttttatttttaaaaa

SEQ ID NO: 1525 - DNA, 512 bp, Artificial
  cDNA Sequence
aaaaaaaaaaggaggggttattcctgcttttgccgtgctgtgatccagggcagagctccaggcttcatacggtaaaactctctgggaaggaaaggaactcagagtcccatgcagaaaattgttcagctggaggggtatcagaaagatggatttccaaagccaactgtttcctgtagtgtgtggatctctgcaagcagagcctcatctttcaatttcagctacatgaaagaggaagaaagggaaagatatatgtcatacgtgatatactttatgtggctttgaagacccctcttttgtggggctacggctaaagaacatagttccctgggatggaattggctcttcctatttccctacttcatgaaaactccagtagaagaccttagaaccttgtcctggttacatggatatgtttactttgtgaaaattcatcaagcactatgcacggtcatgatttgtacatttttttgtaagataacttcattaaaatttactttttttatttttaaaaa

SEQ ID NO: 1526 - DNA, 329 bp, Artificial
  cDNA Sequence
atggaaaaatcctccttgaagctgaagaactgtcttctgagcaactggcacaaggaatacgtagaggcacattctacatgggcgactgaatataacacaggaaaaggtctcgtccaaattctgactgataacatctgacaatttctcggatttcctgatttgttcttgtgcacaaaatctcaatcaatacacgttcctgagttcctgctccctacatgaaatgaagggaagattatacaaagaaaaatgaaatttctgcaagtaattaaatcttcgtcaaatatttctttgttctgtagaactaaaaactatatattcagatggatgat

SEQ ID NO: 1527 - DNA, 634 bp, Artificial
  cDNA Sequence
gcccgccctcacacacagctagctcttcaggccaggcccccagggtttcgtccacctctcacctttgacgacgcgaatgaagaatgaggaggtgctgcgatcgaacgactgcgaggaaacacacccgctctcatggcattcccagtaaactgagaagacgtgattaaacctcaggatctcctactaatagagaaatgtataacgatttagctaccagatctgaatactgaagggttggtaggggaccagagaatagaggaagcattgtaggttctagagtggagaagggaccatccaaaatggagtttgaaagagaattctggcctttgtgtttagagtctggaattgtcaagagtctgaaagcacagaataagactgcagctagagcaatttaggcgccatagtttgtcaaaacaggtaaggggaataaaggggatgacaccaagagatgtgcaaagaatctgaagaattcacctgaaaaggatacaacctcctcctggaaggcagaggagtaaatagggaattggaaattaattccttatttctgcacatgcacagaatctgggcccaggtgacttatggaacctttatagagaccacggtgactgacactcatgggaaagggggtagaggg

SEQ ID NO: 1528 - DNA, 452 bp, Artificial
  cDNA Sequence
aaggggctaagctgggtatagccacagtgcttccttttgtccttactaaagatactgtcaatattcagagattctcgtttgggtctccatgtgggacgatacttgctggaagaactggattttgactcactgctggtactctctatttcccagtcacgagagtgtaaaggcagggtcctaggaggttttttgtcaggctggtctcctcctctgcccctgcagtgagagcctacattggtctgagaagccagggatggtctgttatggatcatattgctgactgtctctttaaaatctctcagcctgttggtgctgctggatggtttggaggcatttctaggagcctgcttctctttcagtggcttgccttcactgtggtatcccgaggcctggggctcatcgcctttcctcctaacccgaccagagctcctcttgcgctctatcagtgaccc

SEQ ID NO: 1529 - DNA, 529 bp, Artificial
  cDNA Sequence
gaccggcgcctggacgactttcaggggagagctggaagaaagactgtcaacagctgagtgcgggcgccggcgccgtctacgcagtgcgttccaccgggtccgtatccctcccgattccgccccaccccgccctcggaactcgctgcctcaactcctgcggtgggactccggagcagcgtacaccgcccttgccttagtcctccccaaggccagggcagctgtgcggcctggcgcgggttacttggtgtggtgcaaaaagccagaaggagacacatttggtcctggccaccccggagtcacccaaaccaaaagcattgatgtgagtgtagatgaagtaaaaactttggcttccctgatgacatacaagtgtgcagtggttggtaagtgatcgcctttcttgctacctaatgagaactctggggaaatatgtttactcacatggttactgttaagatgctatagaaatataccttatcagaactgattttttttaagttgtcctctttaagacctgcatcatttttcaatt

SEQ ID NO: 1530 - DNA, 3226 bp, Artificial
  cDNA Sequence
gaaccggaagtggagcctgggagccttgacgttaggaacgaagtctaacctggatctggagccgggtgagatcaaattgggaatgctttcataatgaacgtcaaccagtcagttccacctgtgccaccatttgggcagccccagcccatctacccagggtatcatcagtccagctatggtgggcaatcagggtccacagcccccgccattccctatggagcctacaatggcccagtaccaggctatcagcaaacacctccccaaggtatgtcaagagccccaccttcctcgggggcacctccagcctcaacagcacaggctccttgtggccaggctgcatatggccagtttggccaaggagatgtacagaatgggccaagctccactgttcagatgcaaaggctgcctgggtctcagccatttgggtccccattggcccctgtgggcaaccagccacctgtgcttcagccctatggccctcccccgacaagtgcacaggtggctacgcagctgtctggaatgcagatcagcggtgctgtggccccagcccctccttcttcagggctgggctttggcccaccaacatcgctggcttcagcctcaggaagtttccctaactctggtctgtatggctcctatcctcagggccaggctcctccccttagccaggcccaaggtcatcctgggatccagactccccagcgatctgccccatcacaggcctccagcttcacacccccagcttcagggggtcctcggctgccttcgatgactggtccactcctgcctggacagagttttggagggccctcagtgagccagcccaaccatgtgtcttcacctcctcaagctctgccccctggcacccagatgactgggcccctgggaccactgccacctatgcactccccgcagcagccaggctatcagccccaacaaaatggttccttcggaccagcccggggccctcagtctaattatggaggcccctacccagcagcacccacctttggcagtcagcctgggcctcctcagccactgcctcctaagcgcctggaccctgatgccatcccaagccctattcaggtcattgaagatgacaggaacaaccggggtacagagccatttgttactggagtacggggccaggtgccacccttagtcactaccaacttcctggtgaaagaccaagggaatgcaagtccccgatacatccgatgtacatcctataatatcccttgcacatctgacatggctaagcaggctcaggtgcccctggcagcagtcatcaaaccgctggcaaggctgcccccagaggaggcttcaccgtatgttgtggaccatggggaatctggccctttgcgctgcaaccgctgcaaagcatacatgtgtcccttcatgcagttcattgaaggagggaggcgtttccagtgctgtttttgcagctgtatcaatgatgttcccccccagtattttcagcacctggatcataccggcaaacgtgtggatgcttatgaccgccctgagctatccctgggctcttatgaattcttggccactgtagattactgcaagaacaataagttccccagccctcctgcctttatcttcatgattgacgtctcctacaatgccatcaggactggtcttgttaggctcctctgtgaggagctcaagtcactgttagactttctacctagggagggtggggcagaagagtcagcaatccgcgttggctttgtcacctacaataaggtgctccacttctataatgtgaagagctcattggcccagccacagatgatggttgtgtctgatgtggctgacatgtttgtgccactgctggatggcttcctggtcaacgtcaatgagtctcgggcagttatcaccagcttattggatcagattccagaaatgtttgcagacacaagggaaacagagacagtatttgtaccagttatccaggctggaatggaggctctgaaggctgctgagtgtgcagggaagctctttctattccatacatccctgcccattgcagaggccccagggaaactgaagaacagagatgacaggaagctgatcaatacagacaaggagaagactctgttccagcctcagacaggtgcctatcagaccctggccaaagagtgtgtggcccaaggctgctgtgtagatctctttctcttccctaaccagtatgtggatgtggccacactctctgttgtgccccagctcactggtggctctgtctacaaatatgcttcctttcaggtggagaacgaccaggagcggttcctgagtgacctgcgtcgtgatgtccagaaggttgttggctttgatgctgtgatgcgggtccggacaagcactggtatccgtgctgtagatttctttggagctttctacatgagcaacacgacagatgtggagctggctgggctagatggggacaaaacagtgactgtggagttcaagcatgacgatcggctcaatgaagagagcggagctctcctgcagtgtgccctgctttacaccagctgtgcagggcagcgtcggctccgcatccataatctggccctgaactgctgcacccagctggctgatctatatcgaaactgtgagactgacacgctcatcaactacatggccaagtttgcatatcggggagtcctgaatagccctgtgaaggctgttcgtgacacgctcatcacccagtgtgcccagatcctggcctgttacagaaagaactgtgctagcccctcctctgcaggacagttgatccttcctgagtgcatgaagctactcccagtttacctgaactgtgtgttgaagagtgatgtcctgcagcctggagctgaagtcactactgatgaccgtgcctatgtccgacagctagttacctccatggatgtgactgagaccaatgtcttcttctaccctcggctcttacctttgacaaagtctcccgttgagagtactaccgaaccaccagcagttcgagcctctgaagagcgtctaagcaatggggatatatatttactggagaatgggctcaacctcttcctctgggtgggagcaagcgtccaacagggtgttgtccagagccttttcagcgtctcctccttcagtcagatcaccagtggtttgagtgttctgccagttctggataatccactgtccaagaaggttcgaggcctcattgatagcttacgggcacagagatccc

SEQ ID NO: 1531 - DNA, 1461 bp, Artificial
  cDNA Sequence
gaaccggaagtggagcctgggagccttgacgttaggaacgaagtctaacctggatctggagccgggtgagatcaaattgggaatgctttcataatgaacgtcaaccagtcagttccacctgtgccaccatttgggcagccccagcccatctacccagggtatcatcagtccagctatggtgggcaatcagggtccacagcccccgccattccctatggagcctacaatggcccagtaccaggctatcagcaaacacctccccaaggtatgtcaagagccccaccttcctcgggggcacctccagcctcaacagcacaggctccttgtggccaggctgcatatggccagtttggccaaggagatgtacagaatgggccaagctccactgttcagatgcaaaggctgcctgggtctcagccatttgggtccccattggcccctgtgggcaaccagccacctgtgcttcagccctatggccctcccccgacaagtgcacaggtggctacgcagctgtctggaatgcagatcagcggtgctgtggccccagcccctccttcttcagggctgggctttggcccaccaacatcgctggcttcagcctcaggaagtttccctaactctggtctgtatggctcctatcctcagggccaggctcctccccttagccaggcccaaggtcatcctgggatccagactccccagcgatctgccccatcacaggcctccagcttcacacccccagcttcagggggtcctcggctgccttcgatgactggtccactcctgcctggacagagttttggagggccctcagtgagccagcccaaccatgtgtcttcacctcctcaagctctgccccctggcacccagatgactgggcccctgggaccactgccacctatgcactccccgcagcagccaggctatcagccccaacaaaatggttccttcggaccagcccggggccctcagtctaattatggaggcccctacccagcagcacccacctttggcagtcagcctgggcctcctcagccactgcctcctaagcgcctggaccctgatgccatcccaagccctattcaggtcattgaagatgacaggaacaaccggggtacagagccatttgttactggagtacggggccaggtgccacccttagtcactaccaacttcctggtgaaagaccaagggaatgcaagtccccgatacatccgatgtacatcctataatatcccttgcacatctgacatggctaagcaggctcaggtgcccctggcagcagtcatcaaaccgctggcaaggctgcccccagaggaggcttcaccgtatgttgtggaccatggggaatctggccctttgcgctgcaaccgctgcaaagcatacatgtgtcccttcatgcagttcattgaaggagggaggcgtttccagtgctgtttttgcagctgtatcaatgatggt

SEQ ID NO: 1532 - DNA, 471 bp, Artificial
  cDNA Sequence
ctaacctggatctggagccgggtgagatcaaattgggaatgctttcataatgaacgtcaaccagtcagttccacctgtgccaccatttgggcagccccagcccatctacccagggtatcatcagtccagctatggtgggcaatcagggtccacagcccccgccattccctatggagcctacaatggcccagtaccaggctatcagcaaacacctccccaaggtatgtcaagagccccaccttcctcgggggcacctccagcctcaacagcacaggctccttgtggccaggctgcatatggccagtttggccaaggagatgtacagaatgggccaagctccactgttcagatgcaaaggttacaggtactgctgacgtccagccctgtggattattgacccatcttagtacctgggttcctttgcatattcttcattttctgtgaacttgagtttcttgctttactagacat

SEQ ID NO: 1533 - DNA, 1768 bp, Artificial
  cDNA Sequence
gttcccccccagtattttcagcacctggatcataccggcaaacgtgtggatgcttatgaccgccctgagctatccctgggctcttatgaattcttggccactgtagattactgcaagaacaataagttccccagccctcctgcctttatcttcatgattgacgtctcctacaatgccatcaggactggtcttgttaggctcctctgtgaggagctcaagtcactgttagactttctacctagggagggtggggcagaagagtcagcaatccgcgttggctttgtcacctacaataaggtgctccacttctataatgtgaagagctcattggcccagccacagatgatggttgtgtctgatgtggctgacatgtttgtgccactgctggatggcttcctggtcaacgtcaatgagtctcgggcagttatcaccagcttattggatcagattccagaaatgtttgcagacacaagggaaacagagacagtatttgtaccagttatccaggctggaatggaggctctgaaggctgctgagtgtgcagggaagctctttctattccatacatccctgcccattgcagaggccccagggaaactgaagaacagagatgacaggaagctgatcaatacagacaaggagaagactctgttccagcctcagacaggtgcctatcagaccctggccaaagagtgtgtggcccaaggctgctgtgtagatctctttctcttccctaaccagtatgtggatgtggccacactctctgttgtgccccagctcactggtggctctgtctacaaatatgcttcctttcaggtggagaacgaccaggagcggttcctgagtgacctgcgtcgtgatgtccagaaggttgttggctttgatgctgtgatgcgggtccggacaagcactggtatccgtgctgtagatttctttggagctttctacatgagcaacacgacagatgtggagctggctgggctagatggggacaaaacagtgactgtggagttcaagcatgacgatcggctcaatgaagagagcggagctctcctgcagtgtgccctgctttacaccagctgtgcagggcagcgtcggctccgcatccataatctggccctgaactgctgcacccagctggctgatctatatcgaaactgtgagactgacacgctcatcaactacatggccaagtttgcatatcggggagtcctgaatagccctgtgaaggctgttcgtgacacgctcatcacccagtgtgcccagatcctggcctgttacagaaagaactgtgctagcccctcctctgcaggacagttgatccttcctgagtgcatgaagctactcccagtttacctgaactgtgtgttgaagagtgatgtcctgcagcctggagctgaagtcactactgatgaccgtgcctatgtccgacagctagttacctccatggatgtgactgagaccaatgtcttcttctaccctcggctcttacctttgacaaagtctcccgttgagagtactaccgaaccaccagcagttcgagcctctgaagagcgtctaagcaatggggatatatatttactggagaatgggctcaacctcttcctctgggtgggagcaagcgtccaacagggtgttgtccagagccttttcagcgtctcctccttcagtcagatcaccagtggtttgagtgttctgccagttctggataatccactgtccaagaaggttcgaggcctcattgatagcttacgggcacagagatccc

SEQ ID NO: 1534 - DNA, 1344 bp, Artificial
  cDNA Sequence
ctgaagaagtgagcccgagaatgtggcagttaggaacatgggccttggaatcagtcctgcattgatattctggccccaccacttactagctacatgacctaggataaatttcttaagtacttcctcttttgttccttcatctgcaaaatggtgttaaaatacttaagtaggatttgtcaacagaattaaataattatatgtaaagcactctgtgtggtacctggcatgcagtctaagtgtttaaaagctattattgtcatcatcattatcatcctcactgttatgatgatgataattaggtggccttgtagagtggaaggggtacagggagattgtctgcacgatgagctatgtctagtcagtgacatgactctggacctgggggcctgcaggtggagaacgaccaggagcggttcctgagtgacctgcgtcgtgatgtccagaaggttgttggctttgatgctgtgatgcgggtccggacaagcactggtatccgtgctgtagatttctttggagctttctacatgagcaacacgacagatgtggagctggctgggctagatggggacaaaacagtgactgtggagttcaagcatgacgatcggctcaatgaagagagcggagctctcctgcagtgtgccctgctttacaccagctgtgcagggcagcgtcggctccgcatccataatctggccctgaactgctgcacccagctggctgatctatatcgaaactgtgagactgacacgctcatcaactacatggccaagtttgcatatcggggagtcctgaatagccctgtgaaggctgttcgtgacacgctcatcacccagtgtgcccagatcctggcctgttacagaaagaactgtgctagcccctcctctgcaggacagttgatccttcctgagtgcatgaagctactcccagtttacctgaactgtgtgttgaagagtgatgtcctgcagcctggagctgaagtcactactgatgaccgtgcctatgtccgacagctagttacctccatggatgtgactgagaccaatgtcttcttctaccctcggctcttacctttgacaaagtctcccgttgagagtactaccgaaccaccagcagttcgagcctctgaagagcgtctaagcaatggggatatatatttactggagaatgggctcaacctcttcctctgggtgggagcaagcgtccaacagggtgttgtccagagccttttcagcgtctcctccttcagtcagatcaccagtggtttgagtgttctgccagttctggataatccactgtccaagaaggttcgaggcctcattgatagcttacgggcacagagatccc

SEQ ID NO: 1535 - DNA, 743 bp, Artificial
  cDNA Sequence
ctcaggtatccgtgctgtagatttctttggagctttctacatgagcaacacgacagatgtggagctggctgggctagatggggacaaaacagtgactgtggagttcaagcatgacgatcggctcaatgaagagagcggagctctcctgcagtgtgccctgctttacaccagctgtgcagggcagcgtcggctccgcatccataatctggccctgaactgctgcacccagctggctgatctatatcgaaactgtgagactgacacgctcatcaactacatggccaagtttgcatatcggggagtcctgaatagccctgtgaaggctgttcgtgacacgctcatcacccagtgtgcccagatcctggcctgttacagaaagaactgtgctagcccctcctctgcaggacagttgatccttcctgagtgcatgaagctactcccagtttacctgaactgtgtgttgaagagtgatgtcctgcagcctggagctgaagtcactactgatgaccgtgcctatgtccgacagctagttacctccatggatgtgactgagaccaatgtcttcttctaccctcggctcttacctttggtgcgattgagggttggagtatgagatcttgcacggagcaaagggcctcttaggaggaggaaaggataggctagtatcagtcagacactagtggaatttgtttttatgtattttagctgatgtaattttcacactgagagagttactgagaccc

SEQ ID NO: 1536 - DNA, 803 bp, Artificial
  cDNA Sequence
caccaccgaggatccagagctcttggctttcttgtcccgctataagttccacttggccctggaaaatgccatctgtaacgactacatgacagaaaaactgtggcgtcccatgcacctgggcgctgtgcccgtgtaccgcggttctccctctgtgagggactggatgccgaacaatcactccgtcatcctgattgatgattttgagtctcctcagaagctggcagagtttattgactttctggacaagaatgatgaggagtatatgaaatacctggcatacaagcaacctgggggcatcaccaaccaatttcttctggatagtctgaagcatcgggagtggggagtgaatgatcctttgctgcctaactacctcaacggcttcgagtgtttcgtctgtgactacgaactggctcggctggatgccgagaaagcccacgcggcctctcccggggacagccccgtctttgagccccacattgcccagccctcacacatggactgcccagtgcccacacctggctttggcaatgtggaagagattcctgagaatgacagaaaagaacaagagggaagacagaccttcaggctgggtgcagtggctcatgcctgtgatcccagcactttgggaggccaaggtaggaggatcgcttgagcccagggattcaagaccagcttgggtaacatggtaaaaccccatctctacaaaaaacagaaaaaattagctgggcatggtgtgtgtgccttgtagatccagctacttgggaggctgaagtgggaggatcgccactgcactccagaaacta

SEQ ID NO: 1537 - DNA, 1169 bp, Artificial
  cDNA Sequence
caccaccgaggatccagagctcttggctttcttgtcccgctataagttccacttggccctggaaaatgccatctgtaacgactacatgacagaaaaactgtggcgtcccatgcacctgggcgctgtgcccgtgtaccgcggttctccctctgtgagggactggatgccgaacaatcactccgtcatcctgattgatgattttgagtctcctcagaagctggcagagtttattgactttctggacaagaatgatgaggagtatatgaaatacctggcatacaagcaacctgggggcatcaccaaccaatttcttctggatagtctgaagcatcgggagtggggagtgaatgatcctttgctgcctaactacctcaacggcttcgagtgtttcgtctgtgactacgaactggctcggctggatgccgagaaagcccacgcggcctctcccggggacagccccgtctttgagccccacattgcccagccctcacacatggactgcccagtgcccacacctggctttggcaatgtggaagagattcctgagaatgacagttggaaagagatgtggctgcaagattattggcaaggtctggaccagggggaagctctcactgccatgatccacaacaatgaaacagagcagacgaaattttgggattacctacatgaaatcttcatgaagaggcaacatctctaagtgcccttgcaagagcctttaacttggcggagctaaggagatcttattctaccatgggacataaggagcatccactgcacaaacccttaatgaacactgtcttttcatggattcaaggaattccagttttatctattaagattttatcttaatgatgagtagccaaggtctaacatagggcctctcctcaaggagagatggagggatacaattcttggttcagtgggaaacagaaccctaaaacatccatttgattcaaggtgctggtccaacagagtttttaaactactcacttctttatttcatcctttcgactgtacttgattaccagtgaagtaagatgggtcaggttacgacttacaacttttgttctattccccagactcctcattattcagtacatttcccaataatctctttttctcatctcttgctttataaattgttacgttggtggagaagcaaaaca

SEQ ID NO: 1538 - DNA, 850 bp, Artificial
  cDNA Sequence
aaagcctgccgggagcttggtgcgctatggcgacacccagcctgcggggtcgtctggcgcggtttgggaacccgcggaagcctgtgctgaagcccaataaacctctcattctagctaaccgcgtcggggagcggcgccgggagaagggcgaggcgacttgcatcacggagatgtcggtgatgatggcttgctggaagcagaatgaattccgcgacgatgcgtgcagaaaagagatccagggcttcctcgattgtgccgcgagggctcaggaagcccgaaagatgagatcaatacaggaaaccctgggagagtctgggagtttacttccaaataaattgaataagttgttacagaggtttcctaacaaaccttacctcagctgaaaatggacaagtattttcaatgactgaaatatagcttctgacaactatgcagaggcattttagagacattggcattgccatgccctctttggagggtagaagaggcaaaacacttttttcaccctttggaatcatagtatgggtagaagttatgatttatcttgaaataaaatcctctgaacagaacttggccttttgttgtgaattaggtactctcttcattcttgagcctcccctagaccctggaaattctttccttcctgatttgccctaggagcaggacaaataccgttgtattgtctttccctgcatttgaagtcttttacaccatttagtgcccttgcttttggatgcaataaggaagttgaagttgccttcgtctgtaaatacttagtgattgcctattttgtgcgtagtccctgcaaggtgctctctgaataataaagttaacaaactggtgacctaga

SEQ ID NO: 1539 - DNA, 701 bp, Artificial
  cDNA Sequence
gaggcgacttgcatcacggagatgtcggtgatgatggcttgctggaagcagaatgaattccgcgacgatgcgtgcagaaaagagatccagggcttcctcgattgtgccgcgagggctcaggaagcccgaaagatgagatcaatacaggaaaccctgggagagtctgggagtttacttccaaataaattgaataagttgttacagaggtttcctaacaaaccttacctcagctgaaaatggacaagtattttcaatgactgaaatatagcttctgacaactatgcagaggcattttagagacattggcattgccatgccctctttggagggtagaagaggcaaaacacttttttcaccctttggaatcatagtatgggtagaagttatgatttatcttgaaataaaatcctctgaacagaacttggccttttgttgtgaattaggtactctcttcattcttgagcctcccctagaccctggaaattctttccttcctgatttgccctaggagcaggacaaataccgttgtattgtctttccctgcatttgaagtcttttacaccatttagtgcccttgcttttggatgcaataaggaagttgaagttgccttcgtctgtaaatacttagtgattgcctattttgtgcgtagtccctgcaaggtgctctctgaataataaagttaacaaactggtgacctaga

SEQ ID NO: 1540 - DNA, 692 bp, Artificial
  cDNA Sequence
tggactggtgatcccattggtggagctgtcagcaaagcaggtggcatttcatatcccatttgaagtggtggagaaagtttacccaccagtgcctgagcagctacagctccgaattgctttttggagcttccctgagaatgaagaggacattcggctgtattcgtgcctggccaatggcagtgcggatgagtttcagcgaggggatcagctcttccgcatgcgggctgtgaaggacccattgcagatagggttccacctgagtgctacagtggtgccacctcagatggtccctcctaaaggggcctacaacgtggctgtgatgtttgaccgctgccgggtcacttcctgcagctgtacctgtggggctggggccaaatggtgcacccacgtcgtggcactctgtctcttccgcatccacaacgcttctgcagtctgcctgcgagccccagtctcagagtccctgtcccggctacagagggaccagctgcaaaagtttgctcagtacctcatcagtgagctccctcagcaggtgggtgaggtcggcaccccctcctgcaattagctccgggccaggccgcataacagccttcctgttaggcccaggcctccatgggttcacctaggccgtgttctgcctgcctccgtctctttctccctcagatcctccccacagctcagcgtctcctggacga

SEQ ID NO: 1541 - DNA, 545 bp, Artificial
  cDNA Sequence
ggctgtattcgtgcctggccaatggcagtgcggatgagtttcagcgaggggatcagctcttccgcatgcgggctgtgaaggacccattgcagatagggttccacctgagtgctacagtggtgccacctcagatggtccctcctaaaggggcctacaacgtggctgtgatgtttgaccgctgccgggtcacttcctgcagctgtacctgtggggctggggccaaatggtgcacccacgtcgtggcactctgtctcttccgcatccacaacgcttctgcagtctgcctgcgagccccagtctcagagtccctgtcccggctacagagggaccagctgcaaaagtttgctcagtacctcatcagtgagctccctcagcaggtgggtgaggtcggcaccccctcctgcaattagctccgggccaggccgcataacagccttcctgttaggcccaggcctccatgggttcacctaggccgtgttctgcctgcctccgtctctttctccctcagatcctccccacagctcagcgtctcctggacgaactcc

SEQ ID NO: 1542 - DNA, 313 bp, Artificial
  cDNA Sequence
cccacgtcgtggcactctgtctcttccgcatccacaacgcttctgcagtctgcctgcgagccccagtctcagagtccctgtcccggctacagagggaccagctgcaaaagtttgctcagtacctcatcagtgagctccctcagcagatcctccccacagctcagcgtctcctggacgaactcctgtcttcccagtcaacagccatcaatacagtgtgtggagctccggaccccacagcagggccctcagcatcggaccagagtacttggtatctggatgaatcgacactcactgacaacatcaaaaagacact

SEQ ID NO: 1543 - DNA, 606 bp, Artificial
  cDNA Sequence
aatgctgcccccttgttggaaatcctcactgaccagtgcctcacctatgaacagataacaggttggtggtatagcgtacgtacctcagcctcacacagcagtgccagtgggcacacgggccgtagcaacgggcagtcagaggtggcagcccatgcctgtgccagcatgtgtgacgagatggtcacactgtggaggctggccgtgctggaccctgcactcagcccccagcggcgccgggaactgtgtacgcagctgcggcagtggcaactgaaggtgattgagaacgtcaagcggggccaacacaagaagacgctggagcggctcttccccggcttccggccagcggtggaggcctgctacttcaactgggaagaggcctacccacttcctggtgtcacctacagcggcactgacaggaagctggcactgtgctgggcccgggccctgccctctcggccaggtgcctcccgctctgggggcctggaggaatcccgggaccggccccgaccccttcctactgagccagctgtgcggcccaaggagcctgggaccaagcgaaagggcttgggtgagggggtcccctcatcacagcggggtccccgccgc

SEQ ID NO: 1544 - DNA, 455 bp, Artificial
  cDNA Sequence
agcacgacctgtttgctgggctgaagccactggaacaggagagtcgcatggaggtactgtttgcctgtgctgaggccctgcatgcgcatggctatagcagtgaggcctcccgtctcactgtggagcttgcccaggatctgctagccaacccacccgacctcaaggtagagccgccccctgccaagggcaagaagaacaaggtatccacgagccgtcagacctgggtggctaccaacaccctgagcaaggcggccttcctgttgacagtgctaagtgagcgtccagagcaccacaacctggccttccgagttggcatgtttgccttggagctacagaggcctccagcttctaccaaggccttggaggtgaagctggcataccaggagtctgaggtggctgccctgctcaagaagatccctctgggtccaagtgagatgagtaccatgcggtgccgg

SEQ ID NO: 1545 - DNA, 1565 bp, Artificial
  cDNA Sequence
aaaaaaagaaaagtgctcttctgcccataggagatcttagacaaactcttggaccgagagagccagacacataagccacagacgctgagttctttctactcatctagccgcccaaccacagccagccagaggtctccttcaaagcacgggggcccatctgccccaggggccctgcaaccactgacctcaggctctgcagggcctgctcaaccagggagtgtggcaggggctgggccaggccccactgagggcttcacagagaagaatgtgcctgagagttccccacattccccctgtgagggtcttccatctgaggcagctttgaccccaaggccagaagggaaggttcctagccgcttggcacttggcagtcgtggaggctataatggacggggatgggggtccccaggacggcctaagaagaagcacacaggcatggccagcattgacagcagtgcccctgaaacaacatcggatagttcccccaccttaagccggagaccacttcgagggggctgggcccccacctcctggggtcgaggtcaggacagtgacagcattagcagctcttcttcggactccctgggctcctcatcctccagtggaagtcgccgggccagtgccagtggaggagcccgggcgaagactgttgaagttggcaggtacaagggccgccgccccgagagtcatgcccctcatgtacccaatcagccatcagaggcagctgcacacttctacttcgagctggcgaagacagtgctgatcaaggcagggggcaacagcagcacttccattttcacacatccatcttcctcagggggccaccagggtcctcaccgcaacctgcacctttgcgccttcgagattgggctttatgcccttggcctgcacaactttgtttctcccaactggctctcacgtacttattcttcccacgtttcctggattacaggccaggccatggagataggcagcgcagccctgactatactggtagaatgctgggatgggcacctgacaccccctgaggttgcatccctggctgacagggcatcacgggcaagagactccaatatggtgagggcggcagcagagctggccctgagctgcctgcctcacgcccatgcattgaaccctaatgagatccagcgggccctggtgcagtgcaaggaacaggacaacctgatgttggagaaggcctgcatggcagtggaagaggcagctaagggtgggggcgtgtaccctgaagtgttgtttgaggttgctcaccagtggttctggctgtatgagcaaactgcaggtggctcatccacagcccgtgaaggggctacaagctgtagtgccagtgggatcagggcaggtggggaagctgggcggggtatgcctgagggtagagggggcccagggactgagccggttacagtggcagcggcagcagtgacagcagcagccacagtggtgcccgtcatatcggtggggtctagtttatacccgggtccaggactggggcatggccactcccctggcctgcacccctacactgctctacagccccacctgccctg

SEQ ID NO: 1546 - DNA, 1792 bp, Artificial
  cDNA Sequence
ttcattcacttatttcagtatttattgactatcagtatattctgccctgtggtgttaatggaggataccaagatatgttggggttaaataagttacaaaaagacatgtaaaccaggaggtcatcctgtggttgtaagtggggaaggctccctgaggatgtagcaattggctgtttcaaggagaaaggaaggtaatagaagtcaggagctaaagggcatcctgtcactgcttctctggaggtcactgcttctgtcttccagatcttagacaaactcttggaccgagagagccagacacataagccacagacgctgagttctttctactcatctagccgcccaaccacagccagccagaggtctccttcaaagcacgggggcccatctgccccaggggccctgcaaccactgacctcaggctctgcagggcctgctcaaccagggagtgtggcaggggctgggccaggccccactgagggcttcacagagaagaatgtgcctgagagttccccacattccccctgtgagggtcttccatctgaggcagctttgaccccaaggccagaagggaaggttcctagccgcttggcacttggcagtcgtggaggctataatggacggggatgggggtccccaggacggcctaagaagaagcacacaggcatggccagcattgacagcagtgcccctgaaacaacatcggatagttcccccaccttaagccggagaccacttcgagggggctgggcccccacctcctggggtcgaggtcaggacagtgacagcattagcagctcttcttcggactccctgggctcctcatcctccagtggaagtcgccgggccagtgccagtggaggagcccgggcgaagactgttgaagttggcaggtacaagggccgccgccccgagagtcatgcccctcatgtacccaatcagccatcagaggcagctgcacacttctacttcgagctggcgaagacagtgctgatcaaggcagggggcaacagcagcacttccattttcacacatccatcttcctcagggggccaccagggtcctcaccgcaacctgcacctttgcgccttcgagattgggctttatgcccttggcctgcacaactttgtttctcccaactggctctcacgtacttattcttcccacgtttcctggattacaggccaggccatggagataggcagcgcagccctgactatactggtagaatgctgggatgggcacctgacaccccctgaggttgcatccctggctgacagggcatcacgggcaagagactccaatatggtgagggcggcagcagagctggccctgagctgcctgcctcacgcccatgcattgaaccctaatgagatccagcgggccctggtgcagtgcaaggaacaggacaacctgatgttggagaaggcctgcatggcagtggaagaggcagctaagggtgggggcgtgtaccctgaagtgttgtttgaggttgctcaccagtggttctggctgtatgagcaaactgcaggtggctcatccacagcccgtgaaggggctacaagctgtagtgccagtgggatcagggcaggtggggaagctgggcggggtatgcctgagggtagagggggcccagggactgagccggttacagtggcagcggcagcagtgacagcagcagccacagtggtgcccgtcatatcggtggggtctagtttatacccgggtccaggactggggcatggccactcccctggcctgcacccctacactgctctacagccccacctgccctg

SEQ ID NO: 1547 - DNA, 1110 bp, Artificial
  cDNA Sequence
gtgcatcctgcattcctaggggctcagtacccttattcagtgactcctccctcacttgctgccactgctgtgtctttccccgttccttccatggcacccatcacagtacatccctaccacacagagccagggcttccactgcccaccagtgtggccttgagcagtgtccatccagcatccacgtttccagccatccaaggtgcctcactgcctgccctgaccacacagcccagccctctggtgagcggaggttttccaccgcccgaggaggagacacacagtcagccagtcaatccccacagcctgcaccacctgcatgctgcctaccgtgtcggaatgctggcactggagatgctgggtcgccgggcacacaacgatcaccccaacaacttctcccgctcccccccctacactgatgatgtcaaatggttgctggggctggcagcaaagctgggagtgaactacgtgcaccagttctgtgtgggggcagccaagggggtgctgagcccgtttgtgctgcaggagatcgtcatggagacgctgcagcggctgagtcccgctcatgcccacaaccacctgcgtgccccggccttccaccaactggtgcagcgctgccagcaggcatacatgcagtacatccaccaccgcttgattcacctgactcctgcggactacgacgactttgtgaatgcgatccggagtgcccgcagcgccttctgcctgacgcccatgggcatgatgcagttcaacgacatcctacagaacctcaagcgcagcaaacagaccaaggagctgtggcagcgggtctcactcgagatggccaccttctccccctgagtctttcacccttagggtcctatacagggacccaggcctgtggctatgggggcccctcacacagggggagtgaaacttggctggacagatcatcctcactcagttccctggtagcacagactgacagctgctcttgggctatagcttggggccaagatgtctcacaccctagaagcctagggctgggggagacagccctgtctgggagggggcgttgggtggcctctggtatttatttggcatttataaatatataaactccttttttactct

SEQ ID NO: 1548 - DNA, 766 bp, Artificial
  cDNA Sequence
ctcctggggtggagggaggctctctgccaggccagagctgagatctgtaagttgggtccctagggcagaggtggccacccccgtctcatgcccctccccctgccccccaggagtgaactacgtgcaccagttctgtgtgggggcagccaagggggtgctgagcccgtttgtgctgcaggagatcgtcatggagacgctgcagcggctgagtcccgctcatgcccacaaccacctgcgtgccccggccttccaccaactggtgcagcgctgccagcaggcatacatgcagtacatccaccaccgcttgattcacctgactcctgcggactacgacgactttgtgaatgcgatccggagtgcccgcagcgccttctgcctgacgcccatgggcatgatgcagttcaacgacatcctacagaacctcaagcgcagcaaacagaccaaggagctgtggcagcgggtctcactcgagatggccaccttctccccctgagtctttcacccttagggtcctatacagggacccaggcctgtggctatgggggcccctcacacagggggagtgaaacttggctggacagatcatcctcactcagttccctggtagcacagactgacagctgctcttgggctatagcttggggccaagatgtctcacaccctagaagcctagggctgggggagacagccctgtctgggagggggcgttgggtggcctctggtatttatttggcatttataaatatataaactccttttttactct

SEQ ID NO: 1549 - DNA, 1618 bp, Artificial
  cDNA Sequence
gcggtgctgccgggctcagccccgtctcctcctcttgctccctcggccgggcggcggtgactgtgcaccgacgtcggcgcgggctgcaccgccgcgtccgcccgcccgccagcatggccaccaccgccacctgcacccgtttcaccgacgactaccagctcttcgaggagcttggcaagggtgctttctctgtggtccgcaggtgtgtgaagaaaacctccacgcaggagtacgcagcaaaaatcatcaataccaagaagttgtctgcccgggatcaccagaaactagaacgtgaggctcggatatgtcgacttctgaaacatccaaacatcgtgcgcctccatgacagtatttctgaagaagggtttcactacctcgtgtttgaccttgttaccggcggggagctgtttgaagacattgtggccagagagtactacagtgaagcagatgccagccactgtatacatcagattctggagagtgttaaccacatccaccagcatgacatcgtccacagggacctgaagcctgagaacctgctgctggcgagtaaatgcaagggtgccgccgtcaagctggctgattttggcctagccatcgaagtacagggagagcagcaggcttggtttggttttgctggcaccccaggttacttgtcccctgaggtcttgaggaaagatccctatggaaaacctgtggatatctgggcctgcggggtcatcctgtatatcctcctggtgggctatcctcccttctgggatgaggatcagcacaagctgtatcagcagatcaaggctggagcctatgatttcccatcaccagaatgggacacggtaactcctgaagccaagaacttgatcaaccagatgctgaccataaacccagcaaagcgcatcacggctgaccaggctctcaagcacccgtgggtctgtcaacgatccacggtggcatccatgatgcatcgtcaggagactgtggagtgtttgcgcaagttcaatgcccggagaaaactgaagggtgccatcctcacgaccatgcttgtctccaggaacttctcagctgccaaaagcctattgaacaagaagtcggatggcggtgtcaagccacagagcaacaacaaaaacagtctcgagccacaaaccactgtggtacacaacgctacagatgggatcaagggctccacagagagctgcaacaccaccacagaagatgaggacctcaaagtgcgaaaacaggagatcattaagattacagaacagctgattgaagccatcaacaatggggactttgaggcctacacgaagatttgtgatccaggcctcacttcctttgagcctgaggcccttggtaacctcgtggaggggatggatttccataagttttactttgagaatctcctgtccaagaacagcaagcctatccataccaccatcctaaacccacacgtccacgtgattggggaggacgcagcgtgcatcgcctacatccgcctcacccagtacatcgacgggcagggtcggcctcgcaccagccagtcagaagagacccgggtctggcaccgtcgggatggcaagtggctcaatgtccactatcactgctcaggggcccctgccgcacc

SEQ ID NO: 1550 - DNA, 1433 bp, Artificial
  cDNA Sequence
gcggtgctgccgggctcagccccgtctcctcctcttgctccctcggccgggcggcggtgactgtgcaccgacgtcggcgcgggctgcaccgccgcgtccgcccgcccgccagcatggccaccaccgccacctgcacccgtttcaccgacgactaccagctcttcgaggagcttggcaagggtgctttctctgtggtccgcaggtgtgtgaagaaaacctccacgcaggagtacgcagcaaaaatcatcaataccaagaagttgtctgcccgggatcaccagaaactagaacgtgaggctcggatatgtcgacttctgaaacatccaaacatcgtgcgcctccatgacagtatttctgaagaagggtttcactacctcgtgtttgaccttgttaccggcggggagctgtttgaagacattgtggccagagagtactacagtgaagcagatgccagccactgtatacatcagattctggagagtgttaaccacatccaccagcatgacatcgtccacagggacctgaagcctgagaacctgctgctggcgagtaaatgcaagggtgccgccgtcaagctggctgattttggcctagccatcgaagtacagggagagcagcaggcttggtttggttttgctggcaccccaggttacttgtcccctgaggtcttgaggaaagatccctatggaaaacctgtggatatctgggcctgcggggtcatcctgtatatcctcctggtgggctatcctcccttctgggatgaggatcagcacaagctgtatcagcagatcaaggctggagcctatgatttcccatcaccagaatgggacacggtaactcctgaagccaagaacttgatcaaccagatgctgaccataaacccagcaaagcgcatcacggctgaccaggctctcaagcacccgtgggtctgtcaacgatccacggtggcatccatgatgcatcgtcaggagactgtggagtgtttgcgcaagttcaatgcccggagaaaactgaagggtgccatcctcacgaccatgcttgtctccaggaacttctcagctgccaaaagcctattgaacaagaagtcggatggcggtgtcaagccacagagcaacaacaaaaacagtctcgtaagcccagcccaagagcccgcgcccttgcagacggccatggagccacaaaccactgtggtacacaacgctacagatgggatcaagggctccacagagagctgcaacaccaccacagaagatgaggacctcaaagtgcgaaaacaggagatcattaagattacagaacagctgattgaagccatcaacaatggggactttgaggcctacacgaagatttgtgatccaggcctcacttcctttgagcctgaggcccttggtaacctcgtggaggggatggatttccataagttttactttgag

SEQ ID NO: 1551 - DNA, 482 bp, Artificial
  cDNA Sequence
ggccgggcggcggtgactgtgcaccgacgtcggcgcgggctgcaccgccgcgtccgcccgcccgccagcatggccaccaccgccacctgcacccgtttcaccgacgactaccagctcttcgaggagcttggcaagggtgctttctctgtggtccgcaggtgtgtgaagaaaacctccacgcaggagtacgcagcaaaaatcatcaataccaagaagttgtctgcccgggatcaccagaaactagaacgtgaggctcggatatgtcgacttctgaaacatccaaacatcgtgcgcctccatgacagtatttctgaagaagggtttcactacctcgtgtttgacctccactgtatacatcagattctggagagtgttaaccacatccaccagcatgacatcgtccacagggacctgaagcctgagaacctgctgctggcgagtaaatgcaagggtgccgccgtcaagctggctgattttggcct

SEQ ID NO: 1552 - DNA, 1542 bp, Artificial
  cDNA Sequence
ggcggtgactgtgcaccgacgtcggcgcgggctgcaccgccgcgtccgcccgcccgccagcatggccaccaccgccacctgcacccgtttcaccgacgactaccagctcttcgaggagcttggcaagtgtgtgaagaaaacctccacgcaggagtacgcagcaaaaatcatcaataccaagaagttgtctgcccgggatcaccagaaactagaacgtgaggctcggatatgtcgacttctgaaacatccaaacatcgtgcgcctccatgacagtatttctgaagaagggtttcactacctcgtgtttgaccttgttaccggcggggagctgtttgaagacattgtggccagagagtactacagtgaagcagatgccagccactgtatacatcagattctggagagtgttaaccacatccaccagcatgacatcgtccacagggacctgaagcctgagaacctgctgctggcgagtaaatgcaagggtgccgccgtcaagctggctgattttggcctagccatcgaagtacagggagagcagcaggcttggtttggttttgctggcaccccaggttacttgtcccctgaggtcttgaggaaagatccctatggaaaacctgtggatatctgggcctgcggggtcatcctgtatatcctcctggtgggctatcctcccttctgggatgaggatcagcacaagctgtatcagcagatcaaggctggagcctatgatttcccatcaccagaatgggacacggtaactcctgaagccaagaacttgatcaaccagatgctgaccataaacccagcaaagcgcatcacggctgaccaggctctcaagcacccgtgggtctgtcaacgatccacggtggcatccatgatgcatcgtcaggagactgtggagtgtttgcgcaagttcaatgcccggagaaaactgaagggtgccatcctcacgaccatgcttgtctccaggaacttctcagctgccaaaagcctattgaacaagaagtcggatggcggtgtcaagccacagagcaacaacaaaaacagtctcgagccacaaaccactgtggtacacaacgctacagatgggatcaagggctccacagagagctgcaacaccaccacagaagatgaggacctcaaagtgcgaaaacaggagatcattaagattacagaacagctgattgaagccatcaacaatggggactttgaggcctacacgaagatttgtgatccaggcctcacttcctttgagcctgaggcccttggtaacctcgtggaggggatggatttccataagttttactttgagaatctcctgtccaagaacagcaagcctatccataccaccatcctaaacccacacgtccacgtgattggggaggacgcagcgtgcatcgcctacatccgcctcacccagtacatcgacgggcagggtcggcctcgcaccagccagtcagaagagacccgggtctggcaccgtcgggatggcaagtggctcaatgtccactatcactgctcaggggcccctgccgcacc

SEQ ID NO: 1553 - DNA, 1357 bp, Artificial
  cDNA Sequence
ggcggtgactgtgcaccgacgtcggcgcgggctgcaccgccgcgtccgcccgcccgccagcatggccaccaccgccacctgcacccgtttcaccgacgactaccagctcttcgaggagcttggcaagtgtgtgaagaaaacctccacgcaggagtacgcagcaaaaatcatcaataccaagaagttgtctgcccgggatcaccagaaactagaacgtgaggctcggatatgtcgacttctgaaacatccaaacatcgtgcgcctccatgacagtatttctgaagaagggtttcactacctcgtgtttgaccttgttaccggcggggagctgtttgaagacattgtggccagagagtactacagtgaagcagatgccagccactgtatacatcagattctggagagtgttaaccacatccaccagcatgacatcgtccacagggacctgaagcctgagaacctgctgctggcgagtaaatgcaagggtgccgccgtcaagctggctgattttggcctagccatcgaagtacagggagagcagcaggcttggtttggttttgctggcaccccaggttacttgtcccctgaggtcttgaggaaagatccctatggaaaacctgtggatatctgggcctgcggggtcatcctgtatatcctcctggtgggctatcctcccttctgggatgaggatcagcacaagctgtatcagcagatcaaggctggagcctatgatttcccatcaccagaatgggacacggtaactcctgaagccaagaacttgatcaaccagatgctgaccataaacccagcaaagcgcatcacggctgaccaggctctcaagcacccgtgggtctgtcaacgatccacggtggcatccatgatgcatcgtcaggagactgtggagtgtttgcgcaagttcaatgcccggagaaaactgaagggtgccatcctcacgaccatgcttgtctccaggaacttctcagctgccaaaagcctattgaacaagaagtcggatggcggtgtcaagccacagagcaacaacaaaaacagtctcgtaagcccagcccaagagcccgcgcccttgcagacggccatggagccacaaaccactgtggtacacaacgctacagatgggatcaagggctccacagagagctgcaacaccaccacagaagatgaggacctcaaagtgcgaaaacaggagatcattaagattacagaacagctgattgaagccatcaacaatggggactttgaggcctacacgaagatttgtgatccaggcctcacttcctttgagcctgaggcccttggtaacctcgtggaggggatggatttccataagttttactttgag

SEQ ID NO: 1554 - DNA, 1213 bp, Artificial
  cDNA Sequence
gcccgcccgccagcatggccaccaccgccacctgcacccgtttcaccgacgactaccagctcttcgaggagcttggcaagggtgctttctctgtggtccgcaggtgtgtgaagaaaacctccacgcaggagtacgcagcaaaaatcatcaataccaagaagttgtctgcccgggatcaccagaaactagaacgtgaggctcggatatgtcgacttctgaaacatccaaacatcgccactgtatacatcagattctggagagtgttaaccacatccaccagcatgacatcgtccacagggacctgaagcctgagaacctgctgctggcgagtaaatgcaagggtgccgccgtcaagctggctgattttggcctagccatcgaagtacagggagagcagcaggcttggtttggttttgctggcaccccaggttacttgtcccctgaggtcttgaggaaagatccctatggaaaacctgtggatatctgggcctgcggggtcatcctgtatatcctcctggtgggctatcctcccttctgggatgaggatcagcacaagctgtatcagcagatcaaggctggagcctatgatttcccatcaccagaatgggacacggtaactcctgaagccaagaacttgatcaaccagatgctgaccataaacccagcaaagcgcatcacggctgaccaggctctcaagcacccgtgggtctgtcaacgatccacggtggcatccatgatgcatcgtcaggagactgtggagtgtttgcgcaagttcaatgcccggagaaaactgaagggtgccatcctcacgaccatgcttgtctccaggaacttctcagctgccaaaagcctattgaacaagaagtcggatggcggtgtcaagccacagagcaacaacaaaaacagtctcgtaagcccagcccaagagcccgcgcccttgcagacggccatggagccacaaaccactgtggtacacaacgctacagatgggatcaagggctccacagagagctgcaacaccaccacagaagatgaggacctcaaagtgcgaaaacaggagatcattaagattacagaacagctgattgaagccatcaacaatggggactttgaggcctacacgaagatttgtgatccaggcctcacttcctttgagcctgaggcccttggtaacctcgtggaggggatggatttccataagttttactttgag

SEQ ID NO: 1555 - DNA, 777 bp, Artificial
  cDNA Sequence
gcctaaagaaatccctggtgtgacttggtgacgtgaagtgtgaggcatagcaggaggggctggtagcatagcattatcggctggcatccacttctgactctggggtcatcctgtatatcctcctggtgggctatcctcccttctgggatgaggatcagcacaagctgtatcagcagatcaaggctggagcctatgatttcccatcaccagaatgggacacggtaactcctgaagccaagaacttgatcaaccagatgctgaccataaacccagcaaagcgcatcacggctgaccaggctctcaagcacccgtgggtctgtcaacgatccacggtggcatccatgatgcatcgtcaggagactgtggagtgtttgcgcaagttcaatgcccggagaaaactgaagggtgccatcctcacgaccatgcttgtctccaggaacttctcagctgccaaaagcctattgaacaagaagtcggatggcggtgtcaagccacagagcaacaacaaaaacagtctcgtaagcccagcccaagagcccgcgcccttgcagacggccatggagccacaaaccactgtggtacacaacgctacagatgggatcaagggctccacagagagctgcaacaccaccacagaagatgaggacctcaaagtgcgaaaacaggagatcattaagattacagaacagctgattgaagccatcaacaatggggactttgaggcctacacgaagatttgtgatccaggcctcacttcctttgagcctgaggcccttg

SEQ ID NO: 1556 - DNA, 777 bp, Artificial
  cDNA Sequence
ttagttcccatcaccagaatgggacacggtaactcctgaagccaagaacttgatcaaccagatgctgaccataaacccagcaaagcgcatcacggctgaccaggctctcaagcacccgtgggtctgtcaacgatccacggtggcatccatgatgcatcgtcaggagactgtggagtgtttgcgcaagttcaatgcccggagaaaactgaagggtgccatcctcacgaccatgcttgtctccaggaacttctcagctgccaaaagcctattgaacaagaagtcggatggcggtgtcaagccacagagcaacaacaaaaacagtctcgtaagcccagcccaagagcccgcgcccttgcagacggccatggagccacaaaccactgtggtacacaacgctacagatgggatcaagggctccacagagagctgcaacaccaccacagaagatgaggacctcaaagctgccccgctccgcactgggaatggcagctcggtgcctgaaggacggagctcccgggacagaacagccccctctgcaggcatgcagccccagccttctctctgctcctcagccatgcgaaaacaggagatcattaagattacagaacagctgattgaagccatcaacaatggggactttgaggcctacacgaagatttgtgatccaggcctcacttcctttgagcctgaggcccttggtaacctcgtggaggggatggatttccataagttttactttgagaatctcctgtccaagaacagcaagcctatccatac

SEQ ID NO: 1557 - DNA, 138 bp, Artificial
  cDNA Sequence
tgccaatccagaggcaagcacaatattccagaggaactctcaaacagatgttgtagaaataagaagaagcaactgtacaaaccatgtatctactgagcgtttcagtcaacaatacagctcgtgttcgacaatattcct

SEQ ID NO: 1558 - DNA, 636 bp, Artificial
  cDNA Sequence
gggaaagagggtccgccatgttccccggcggcgccgccgcttggctctggtagccgccgcccccgcccccaaccccgcccggcccagagcctagccgagccccgggcccagcatggccgccccggagccggcccgggctgcaccgcccccacccccgcccccgccgccccctcccggggctgaccgcgtcgtcaaagctgtccctttccccccaacacatcgcttgacatctgaagaagtatttgatttggatgggatacccagggttgatgttctgaagaaccacttggtgaaagaaggtcgagtagatgaagaaattgcgcttagaattatcaatgagggtgctgccatccttcggagagagaaaaccatgatagaagtagaagctccaatcacagtgtgtggtgacatccatggccaattttttgatctgatgaaactttttgaagtaggaggatcacctgctaatacacgatacctttttcttggcgattatgtggacagaggttattttagtatagagtgtgtcttatatttatgggttctgaagattctatacccaagcacattatttcttctgagaggcaaccatgaatgcagacaccttactgaatattttacctttaagcaggaatg

SEQ ID NO: 1559 - DNA, 1264 bp, Artificial
  cDNA Sequence
ctttcaccagaaatacacacactggatgatattaggagattagatagattcaaagagccacctgcatttggaccaatgtgtgacttgttatggtccgatccttctgaagattttggaaatgaaaaatcacaggaacattttagtcacaatacagttcgaggatgttcttatttttataactatccagcagtgtgtgaatttttgcaaaacaataatttgttatcgattattagagctcatgaagctcaagatgcaggctatagaatgtacagaaaaagtcaaactacagggttcccttcattaataacaattttttcggcacctaattacttagatgtctacaataataaagctgctgtattaaagtatgaaaataatgtgatgaatattcgacagtttaactgttctccacatccttactggttgcctaattttatggatgtcttcacgtggtctttaccgtttgttggagaaaaagtgacagaaatgttggtaaatgttctgagtatttgctctgatgatgaactaatgactgaaggtgaagaccagtttgatggttcagctgcagcccggaaagaaatcataagaaacaaaattcgagcaattggcaagatggcaagagtcttctctgttctcagggaggagagtgaaagtgtgctgacactcaagggcctgactcccacagggatgttgcctagtggagtgttagctggaggacggcagaccctgcaaagtgccacagttgaggctattgaggctgaaaaagcaatacgaggattctctccaccacatagaatctgcagttttgaagaggcaaagggtttggataggatcaatgagagaatgccacctcggaaagatgctgtacagcaagatggtttcaattctctgaacaccgcacatgccactgagaaccacgggacgggcaaccatactgcccagtgacccactacttcccagggactctcacatctcgggccccaaatggacagatcacccgaggagctggaggggtcggccaagctgactgtaaatttcacagtctctctgaagaaaccattgtgcttctgagaccctagcccccttcctggatggaggcttgagggccctgggacatgtgctatctgataagattgggtcatcgctgccaaggtggagagcagtgagcaaggggcttggggcaatttccagtggagggcatccacacctccattttatgcttgtggttcacacatttaagtttacaaatcagatttcttttccc

SEQ ID NO: 1560 - DNA, 1267 bp, Artificial
  cDNA Sequence
ctttcaccagaaatacacacactggatgatattaggagattagatagattcaaagagccacctgcatttggaccaatgtgtgacttgttatggtccgatccttctgaagattttggaaatgaaaaatcacaggaacattttagtcacaatacagttcgaggatgttcttatttttataactatccagcagtgtgtgaatttttgcaaaacaataatttgttatcgattattagagctcatgaagctcaagatgcaggctatagaatgtacagaaaaagtcaaactacagggttcccttcattaataacaattttttcggcacctaattacttagatgtctacaataataaagctgctgtattaaagtatgaaaataatgtgatgaatattcgacagtttaactgttctccacatccttactggttgcctaattttatggatgtcttcacgtggtctttaccgtttgttggagaaaaagtgacagaaatgttggtaaatgttctgagtatttgctctgatgatgaactaatgactgaaggtgaagaccagtttgatgtaggttcagctgcagcccggaaagaaatcataagaaacaaaattcgagcaattggcaagatggcaagagtcttctctgttctcagggaggagagtgaaagtgtgctgacactcaagggcctgactcccacagggatgttgcctagtggagtgttagctggaggacggcagaccctgcaaagtgccacagttgaggctattgaggctgaaaaagcaatacgaggattctctccaccacatagaatctgcagttttgaagaggcaaagggtttggataggatcaatgagagaatgccacctcggaaagatgctgtacagcaagatggtttcaattctctgaacaccgcacatgccactgagaaccacgggacgggcaaccatactgcccagtgacccactacttcccagggactctcacatctcgggccccaaatggacagatcacccgaggagctggaggggtcggccaagctgactgtaaatttcacagtctctctgaagaaaccattgtgcttctgagaccctagcccccttcctggatggaggcttgagggccctgggacatgtgctatctgataagattgggtcatcgctgccaaggtggagagcagtgagcaaggggcttggggcaatttccagtggagggcatccacacctccattttatgcttgtggttcacacatttaagtttacaaatcagatttcttttccc

SEQ ID NO: 1561 - DNA, 969 bp, Artificial
  cDNA Sequence
ctttcaccagaaatacacacactggatgatattaggagattagatagattcaaagagccacctgcatttggaccaatgtgtgacttgttatggtccgatccttctgaagattttggaaatgaaaaatcacaggaacattttagtcacaatacagttcgaggatgttcttatttttataactatccagcagtgtgtgaatttttgcaaaacaataatttgttatcgattattagagctcatgaagctcaagatgcaggctatagaatgtacagaaaaagtcaaactacagggttcccttcattaataacaattttttcggcacctaattacttagatgtctacaataataaagctgctgtattaaagtatgaaaataatgtgatgaatattcgacagtttaactgttctccacatccttactggttgcctaattttatggatgtcttcacgtggtctttaccgtttgttggagaaaaagtgacagaaatgttggtaaatgttctgagtatttgctctgatgatgaactaatgactgaaggtgaagaccagtttgatggttcagctgcagcccggaaagaaatcataagaaacaaaattcgagcaattggcaagatggcaagagtcttctctgttctcagggaggagagtgaaagtgtgctgacactcaagggcctgactcccacagggatgttgcctagtggagtgttagctggaggacggcagaccctgcaaacaatacgaggattctctccaccacatagaatctgcagttttgaagaggcaaagggtttggataggatcaatgagagaatgccacctcggaaagatgctgtacagcaagatggtttcaattctctgaacaccgcacatgccactgagaaccacgggacgggcaaccatactgcccagtgacccactacttcccagggactctcacatctcgggccccaaatggacagatcacccgag

SEQ ID NO: 1562 - DNA, 1108 bp, Artificial
  cDNA Sequence
ctttcaccagaaatacacacactggatgatattaggagattagatagattcaaagagccacctgcatttggaccaatgtgtgacttgttatggtccgatccttctgaagattttggaaatgaaaaatcacaggaacattttagtcacaatacagttcgaggatgttcttatttttataactatccagcagtgtgtgaatttttgcaaaacaataatttgttatcgattattagagctcatgaagctcaagatgcaggctatagaatgtacagaaaaagtcaaactacagggttcccttcattaataacaattttttcggcacctaattacttagatgtctacaataataaagctgctgtattaaagtatgaaaataatgtgatgaatattcgacagtttaactgttctccacatccttactggttgcctaattttatggatgtcttcacgtggtctttaccgtttgttggagaaaaagtgacagaaatgttggtaaatgttctgagtatttgctctgatgatgaactaatgactgaaggtgaagaccagtttgatgtaggttcagctgcagcccggaaagaaatcataagaaacaaaattcgagcaattggcaagatggcaagagtcttctctgttctcagggaggagagtgaaagtgtgctgacactcaagggcctgactcccacagggatgttgcctagtggagtgttagctggaggacggcagaccctgcaaagtggtaatgatgttatgcaacttgctgtgcctcagatggactggggcacacctcactcttttgctaacaattcacataatgcatgcagggaattccttctgttttttagttcctgtctcagcagctgacctagacagggtactgtattagctagtgtctcattaatacctgatcagggcagaaaactgatagaatgggtattcctttcaattgaaaataatggtcagttcctcagcttttcatgaaatgatatgggagcagctcatatcataatgtctgaaatatttatttattcatctgtctaattcacccttttcttttaaaagccccagtttcagaatgtgaatcagggatattcctgttactaaaatg

SEQ ID NO: 1563 - DNA, 594 bp, Artificial
  cDNA Sequence
atccttactggttgcctaattttatggatgtcttcacgtggtctttaccgttttgacagaaatgttggtaaatgttctgagtatttgctctgatgatgaactaatgactgaaggtgaagaccagtttgatgaacggctcatatatggcaataaaaaagtaggttcagctgcagcccggaaagaaatcataagaaacaaaattcgagcaattggcaagatggcaagagtcttctctgttctcagggaggagagtgaaagtgtgctgacactcaagggcctgactcccacagggatgttgcctagtggagtgttagctggaggacggcagaccctgcaaagtgccacagttgaggctattgaggctgaaaaagcaatacgaggattctctccaccacatagaatctgcagttttgaagaggcaaagggtttggataggatcaatgagagaatgccacctcggaaagatgctgtacagcaagatggtttcaattctctgaacaccgcacatgccactgagaaccacgggacgggcaaccatactgcccagtgacccactacttcccagggactctcacatctcgggccccaaatgga

SEQ ID NO: 1564 - DNA, 743 bp, Artificial
  cDNA Sequence
ggcccgcccccggctccatcttgcgggagaccgggttgggctgtgacgctgctgctggggtcagaatgtcatacccaggctatcccccaacaggctacccacctttccctggatatcctcctgcaggtcaggagtcatcttttcccccttctggtcagtatccttatcctagtggctttcctccaatgggaggaggtgcctacccacaagtgccaagtagtggctacccaggagctggaggctaccctgcgcctggaggttatccagcccctggaggctatcctggtgccccacagccagggggagctccatcctatcccggagttcctccaggccaaggatttggagtcccaccaggtggagcaggcttttctgggtatccacagccaccttcacagtcttatggaggtggtccagcacaggttccactacctggtggctttcctggaggacagatgccttctcagtatcctggaggacaacctacttaccctagtcagcctgccacagtgactcaggtcactcaaggaactatccgaccagctgccaacttcgatgctataagagatgcagaaattcttcgtaaggcaatgaagggttttgggacagatgagcaggcaattgtggatgtggtggccaaccgttccaatgatcagaggcaaaaaattaaagcagcatttaagacctcctatggcaagggaaatcgtgatgagaaccagagtataaaccaccaaatggctcag

SEQ ID NO: 1565 - DNA, 743 bp, Artificial; identical to SEQ ID NO: 1564
  cDNA Sequence

SEQ ID NO: 1566 - DNA, 743 bp, Artificial; identical to SEQ ID NO: 1564
  cDNA Sequence

SEQ ID NO: 1567 - DNA, 968 bp, Artificial
  cDNA Sequence
ggcccgcccccggctccatcttgcgggagaccgggttgggctgtgacgctgctgctggggtcagaatgtcatacccaggctatcccccaacaggctacccacctttccctggatatcctcctgcaggtcaggagtcatcttttcccccttctggtcagtatccttatcctagtggctttcctccaatgggaggaggtgcctacccacaagtgccaagtagtggctacccaggagctggaggctaccctgcgcctggaggttatccagcccctggaggctatcctggtgccccacagccagggggagctccatcctatcccggagttcctccaggccaaggatttggagtcccaccaggtggagcaggcttttctgggtatccacagccaccttcacagtcttatggaggtggtccagcacaggttccactacctggtggctttcctggaggacagatgccttctcagtatcctggaggacaacctacttaccctagtcagcctgccacagtgactcaggtcactcaaggaactatccgaccagctgccaacttcgatgctataagagatgcagaaattcttcgtaaggcaatgaagggttttgggacagatgagcaggcaattgtggatgtggtggccaaccgttccaatgatcagaggcaaaaaattaaagcagcatttaagacctcctatggcaaggatttaatcaaagatctcaaatcagagttaagtggaaatatggaagaactgatcctggccctcttcatgcctcctacgtattacgatgcctggagcttacggaaagcaatgcagggagcaggaactcaggaacgtgtattgattgagattttgtgcacaagaacaaatcaggaaatccgagaaattgtcagatgttatcagtcagaatttggacgagaccttgaaaaggacattaggtcagatacatcaggacattttgaacgtttactt

SEQ ID NO: 1568 - DNA, 968 bp, Artificial; identical to SEQ ID NO: 1567
  cDNA Sequence

SEQ ID NO: 1569 - DNA, 815 bp, Artificial
  cDNA Sequence
ggcccgcccccggctccatcttgcgggagaccgggttgggctgtgacgctgctgctggggtcagaatgtcatacccaggctatcccccaacaggctacccacctttccctggatatcctcctgcaggtcaggagtcatcttttcccccttctggtcagtatccttatcctagtggctttcctccaatgggaggaggtgcctacccacaagtgccaagtagtggctacccaggagctggaggctaccctgcgcctggaggttatccagcccctggaggctatcctggtgccccacagccagggggagctccatcctatcccggagttcctccaggccaaggatttggagtcccaccaggtggagcaggcttttctgggtatccacagccaccttcacagtcttatggaggtggtccagcacaggttccactacctggtggctttcctggaggacagatgccttctcagtatcctggaggacaacctacttaccctagtcagcctgccacagtgactcaggtcactcaaggaactatccgaccagctgccaacttcgatgctataagagatgcagaaattcttcgtaaggcaatgaagggttttgggacagatgagcaggcaattgtggatgtggtggccaaccgttccaatgatcagaggcaaaaaattaaagcagcatttaagacctcctatggcaaggatttaatcaaagatctcaaatcagagttaagtggaaatatggaagaactgatcctggccctcttcatgcctcctacgtattacgatgcctggagcttacggaaagcaatgcaggta

SEQ ID NO: 1570 - DNA, 815 bp, Artificial; identical to SEQ ID NO: 1569
  cDNA Sequence

SEQ ID NO: 1571 - DNA, 815 bp, Artificial; identical to SEQ ID NO: 1569
  cDNA Sequence

SEQ ID NO: 1572 - DNA, 815 bp, Artificial; identical to SEQ ID NO: 1569
  cDNA Sequence

SEQ ID NO: 1573 - DNA, 815 bp, Artificial; identical to SEQ ID NO: 1569
  cDNA Sequence

SEQ ID NO: 1574 - DNA, 840 bp, Artificial
  cDNA Sequence
ggcccgcccccggctccatcttgcgggagaccgggttgggctgtgacgctgctgctggggtcagaatgtcatacccaggctatcccccaacaggctacccacctttccctggatatcctcctgcaggtcaggagtcatcttttcccccttctggtcagtatccttatcctagtggctttcctccaatgggaggaggtgcctacccacaagtgccaagtagtggctacccaggagctggaggctaccctgcgcctggaggttatccagcccctggaggctatcctggtgccccacagccagggggagctccatcctatcccggagttcctccaggccaaggatttggagtcccaccaggtggagcaggcttttctgggtatccacagccaccttcacagtcttatggaggtggtccagcacaggttccactacctggtggctttcctggaggacagatgccttctcagtatcctggaggacaacctacttaccctagtcagatcaatacagattctttttcttcctatcctgttttctctcctgtttctttggattatagcagtgaacctgccacagtgactcaggtcactcaaggaactatccgaccagctgccaacttcgatgctataagagatgcagaaattcttcgtaaggcaatgaagggttttgggacagatgagcaggcaattgtggatgtggtggccaaccgttccaatgatcagaggcaaaaaattaaagcagcatttaagacctcctatggcaaggatttaatcaaagatctcaaatcagagttaagtggaaatatggaagaactgatcctggccctcttcatgcctccta

SEQ ID NO: 1575 - DNA, 641 bp, Artificial
  cDNA Sequence
ggcccgcccccggctccatcttgcgggagaccgggttgggctgtgacgctgctgctggggtcagaatgtcatacccaggctatcccccaacaggctacccacctttccctggatatcctcctgcaggtcaggagtcatcttttcccccttctggtcagtatccttatcctagtggctttcctccaatgggaggaggtgcctacccacaagtgccaagtagtggctacccaggagctggaggctaccctgcgcctggaggttatccagcccctggaggctatcctggtgccccacagccagggggagctccatcctatcccggagttcctccaggccaaggatttggagtcccaccaggtggagcaggcttttctgggtatccacagccaccttcacagtcttatggaggtggtccagcacaggttccactacctggtggctttcctggaggacagatgccttctcagtatcctggaggacaacctacttaccctagtcagatcaatacagattctttttcttcctatcctgttttctctcctgtttctttggattatagcagtgaacctgccacagtgactcaggtcactcaaggaactatccgaccagctgccaacttcgatgctataagagatgcagaa

SEQ ID NO: 1576 - DNA, 908 bp, Artificial
  cDNA Sequence
gcccccggctccatcttgcgggagaccgggttgggctgtgacgctgctgctggggtcagcctgcaggtcaggagtcatcttttcccccttctggtcagtatccttatcctagtggctttcctccaatgggaggaggtgcctacccacaagtgccaagtagtggctacccaggagctggaggctaccctgcgcctggaggttatccagcccctggaggctatcctggtgccccacagccagggggagctccatcctatcccggagttcctccaggccaaggatttggagtcccaccaggtggagcaggcttttctgggtatccacagccaccttcacagtcttatggaggtggtccagcacaggttccactacctggtggctttcctggaggacagatgccttctcagtatcctggaggacaacctacttaccctagtcagcctgccacagtgactcaggtcactcaaggaactatccgaccagctgccaacttcgatgctataagagatgcagaaattcttcgtaaggcaatgaagggttttgggacagatgagcaggcaattgtggatgtggtggccaaccgttccaatgatcagaggcaaaaaattaaagcagcatttaagacctcctatggcaaggatttaatcaaagatctcaaatcagagttaagtggaaatatggaagaactgatcctggccctcttcatgcctcctacgtattacgatgcctggagcttacggaaagcaatgcagggagcaggaactcaggaacgtgtattgattgagattttgtgcacaagaacaaatcaggaaatccgagaaattgtcagatgttatcagtcagaatttggacgagaccttgaaaaggacattaggtcagatacatcaggacattttgaacgtttactt

SEQ ID NO: 1577 - DNA, 755 bp, Artificial
  cDNA Sequence
gcccccggctccatcttgcgggagaccgggttgggctgtgacgctgctgctggggtcagcctgcaggtcaggagtcatcttttcccccttctggtcagtatccttatcctagtggctttcctccaatgggaggaggtgcctacccacaagtgccaagtagtggctacccaggagctggaggctaccctgcgcctggaggttatccagcccctggaggctatcctggtgccccacagccagggggagctccatcctatcccggagttcctccaggccaaggatttggagtcccaccaggtggagcaggcttttctgggtatccacagccaccttcacagtcttatggaggtggtccagcacaggttccactacctggtggctttcctggaggacagatgccttctcagtatcctggaggacaacctacttaccctagtcagcctgccacagtgactcaggtcactcaaggaactatccgaccagctgccaacttcgatgctataagagatgcagaaattcttcgtaaggcaatgaagggttttgggacagatgagcaggcaattgtggatgtggtggccaaccgttccaatgatcagaggcaaaaaattaaagcagcatttaagacctcctatggcaaggatttaatcaaagatctcaaatcagagttaagtggaaatatggaagaactgatcctggccctcttcatgcctcctacgtattacgatgcctggagcttacggaaagcaatgcaggta

SEQ ID NO: 1578 - DNA, 500 bp, Artificial
  cDNA Sequence
atcttgcgggagaccgggttgggctgtgacgctgctgctggggtcagcctgcaggtcaggagtcatcttttcccccttctggtcagtatccttatcctaccaccttcacagtcttatggaggtggtccagcacaggttccactacctggtggctttcctggaggacagatgccttctcagtatcctggaggacaacctacttaccctagtcagcctgccacagtgactcaggtcactcaaggaactatccgaccagctgccaacttcgatgctataagagatgcagaaattcttcgtaaggcaatgaagggttttgggacagatgagcaggcaattgtggatgtggtggccaaccgttccaatgatcagaggcaaaaaattaaagcagcatttaagacctcctatggcaaggatttaatcaaagatctcaaatcagagttaagtggaaatatggaagaactgatcctggccctcttcatgcctcctacgtattacgatgc

SEQ ID NO: 1579 - DNA, 790 bp, Artificial
  cDNA Sequence
attacttggtgctggcccaaacacacattcttaagaagaactttgccaaggcagaggaataccttcaacaagcagcccagatggactacctgaaccccaatgtctggggcctgaagggccatctctattttctgagtggaaatcattctgaggccaaggcatgctatgaacgaaccattagctttgtagtggatgcttctgagatgcacttcatcttcctgagactggggctcatctatctggaagagaaagagtatgaaaaggcaaagaaaacctatatgcaagcctgtaagagatcaccttcatgccttacctggctaggactgggaatcgcctgctatcggctggaggagctcacagaggctgaggatgctctttctgaagccaatgcattgaacaactacaatgctgaagtatgggcatatctggctctggtctgcctgaaagttggacggcaattagaagctgagcaggcctacaagtacatgatcaagctgaaattgaaagatgaggctctgcttgcagagatccacacactacaggaaacagttggctttggaaatccatctttctgatacccctccagctgaacaattttctgcatgggactctgagttcctttccttcccagagagttttaccgtatgaagcctggagctggagaacgaaagaatcttcactataaacagagacccattcatttatttccattggctgtgttactggatgttttactggttgacgagaaactgggtcacaataaaaaaatggagatatgaaactcaaaatt

SEQ ID NO: 1580 - DNA, 1193 bp, Artificial
  cDNA Sequence
aaaatgctcccgccgacgcacagcagtgacgacacacaaggtttcggggactgagtgggtttcagactttctctcaggatttccgctggcttcaggttccggtcaggcgtcgggacagagcctgatccaggcttcggcggccggtggcagctctcgatcagctctcgcagtcggagaggcggctaaggaaaggtgccacagcagagacgcgaaggagaggccctagaaccgaggtgttcctgctcatatgtttggcgtgacaaagtttggggataacattgaggatgaatggtttattgtttatgtaataaagcagatcacaaaggaatttccagagttagtagcaaggattgaagacaatgatggtgaattcttgttaatagaagctgctgactttctccctaaatggctggatcctgaaaatagcaccaatagggtatttttctgccatggggaattgtgtattatccctgcaccaagaaaatctggagcagaatcttggttacccaccacacccccaacaattccacaagcattgaatataatcacagcacattcagaaaaaatacttgcttcagaatctatacgagctgctgtgaataggcgcatcagagggtcacattcactaaatgtctatatgcacaattggtgcaacaaaggtttgtgccagaccggcggagtggatacaggctgcctcctccatctgatccccagtaccgagcccatgaattgggcatgaaattggctcatggatttgagatcttatgctccaaatgtagcccacatttttctgactgcaagaaatcccttgtgactgcctcaccactctgggccagtttccttgaaagtctgaaaaagaatgattactttaagggactgatagaaggttctgctcagtaccgggaaaggctagaaatggcagagaattacttccagctctcagtagactggccagaaagttctcttgctatgagccctggtgaagaaatcttaaccttattacagacaataccatttgatatagaagaccttaagaaagaagcagctaatcttcccccagaggatgatgaccagtggttagatctctcaccagatcagctggaccagctgctgcaggaagctgttggcaaaaaagaatccgagtctgtttccaaggaggagaaggagcagaactatgacttaactgaagtctc

SEQ ID NO: 1581 - DNA, 701 bp, Artificial
  cDNA Sequence
aaaatgctcccgccgacgcacagcagtgacgacacacaaggtttcggggactgagtgggtttcagactttctctcaggatttccgctggcttcaggttccggtcaggcgtcgggacagagcctgatccaggcttcggcggccggtggcagctctcgatcagctctcgcagtcggagaggcggctaaggaaaggtgccacagcagagacgcgaaggagaggccctagaaccgaggtgttcctgctcatatgtttggcgtgacaaagtttggggataacattgaggatgaatggtttattgtttatgtaataaagcagatcacaaaggaatttccagagttagtagcaaggattgaagacaatgatggtgaattcttgttaatagaagctgctgactttctccctaaatggctggatcctgaaaatagcaccaatagggtatttttctgccatggggaattgtgtattatccctgcaccaagaaaatctggagcagaatcttggttacccaccacacccccaacaattccacaagcattgaatataatcacagcacattcagaaaaaatacttgcttcagaatctatacgagctgctgtgaataggcgcatcagagggtacccagaaaaaattcaggcctcacttcatcgagcacactgcttccttccagctggcattgtggcagtgctaaagcagcgcccca

SEQ ID NO: 1582 - DNA, 618 bp, Artificial
  cDNA Sequence
aaaatgctcccgccgacgcacagcagtgacgacacacaaggtttcggggactgagtgggtttcagactttctctcaggatttccgctggcttcaggttccggtcaggcgtcgggacagagcctgatccaggcttcggcggccggtggcagctctcgatcagctctcgcagtcggagaggcggctaaggaaaggtgccacagcagagacgcgaaggagaggccctagaaccgaggtgttcctgctcatatgtttggcgtgacaaagtttggggataacattgaggatgaatggtttattgtttatgtaataaagcagatcacaaaggaatttccagagttagtagcaaggattgaagacaatgatggtgaattcttgttaatagaagctgctgactttctccctaaatggctggatcctgaaaatagcaccaatagggtatttttctgccatggggaattgtgtattatccctgcaccaagaaaatctggagcagaatcttggttacccaccacacccccaacaattccacaagcattgaatataatcacagcacattcagaaaaaatacttgcttcagaatctatacgagctgctgtgaataggcgcatcagagggta

SEQ ID NO: 1583 - DNA, 782 bp, Artificial
  cDNA Sequence
gtgggtttcagactttctctcaggatttccgctggcttcaggttccggtcaggcgtcgggacagagcctgatccaggcttcggcggccggtggcagctctcgatcagctctcgcagtcggagaggcggctaaggaaaggtgccacagcagagacgcgaaggagaggccctagaaccttttcaaagaagaatggaagaaaccatgaagcttgctacgatggaagacacagtggagtactgcctgttcctgataccagatgagtcaagggactcagataaacataaagagattcttcagaagtacattgagagaataatcactcggtttgcacctatgctggtcccctacatctggcagaatcagcctttcaatcttaaatataaacctgggaaaggaggtgttcctgctcatatgtttggcgtgacaaagtttggggataacattgaggatgaatggtttattgtttatgtaataaagcagatcacaaaggaatttccagagttagtagcaaggattgaagacaatgatggtgaattcttgttaatagaagctgctgactttctccctaaatggctggatcctgaaaatagcaccaatagggtatttttctgccatggggaattgtgtattatccctgcaccaagaaaatctggagcagaatcttggttacccaccacacccccaacaattccacaagcattgaatataatcacagcacattcagaaaaaatacttgcttcagaatctatacgagctgctgtgaataggcgcatcagagggta

SEQ ID NO: 1584 - DNA, 765 bp, Artificial
  cDNA Sequence
gcccagtcgcgccgccagcgggctgagggtaggaagtagccgctccgagtggaggcgactgggggctgaagagcgcgccgccctctcgtcccactttccaggtgtgtgatcctgtaaaattaaatcttccaagatgatctggtatatattaattataggaattctgcttccccagtctttggctcatccaggcttttttacttcaattggtcagatgactgatttgatccatactgagaaagatctggtgacttctctgaaagattatattaaggcagaagaggacaagttagaacaaataaaaaaatgggcagagaagttagatcggctaactagtacagcgacaaaagatccagaaggatttgttgggcatccagtaaatgcattcaaattaatgaaacgtctgaatactgagtggagtgagttggagaatctggtccttaaggatatgtcagatggctttatctctaacctaaccattcagagacagtactttcctaatgatgaagatcaggttggggcagccaaagctctgttacgtctccaggatacctacaatttggatacagataccatctcaaagggtaatcttccaggagtgaaacacaaatcttttctaacggctgaggactgctttgagttgggcaaagtggcctatacagaagcagattattaccatacggaactgtggatggaacaagccctaaggcaactggatgaaggcgagatttctaccatagataaagtctctgttctagattattt

SEQ ID NO: 1585 - DNA, 637 bp, Artificial
  cDNA Sequence
cctgaacatcagagagctaatggtaacttaaaatattttgagtatataatggctaaagaaaaagatgtcaataagtctgcttcagatgaccaatctgatcagaaaactacaccaaagaaaaaaggggttgctgtggattacctgccagagagacagaagtacgaaatgctgtgccgtggggagggtatcaaaatgacccctcggagacagaaaaaactcttttgccgctaccatgatggaaaccgtaatcctaaatttattctggctccagctaaacaggaggatgaatgggacaagcctcgtattattcgcttccatgatattatttctgatgcagaaattgaaatcgtcaaagacctagcaaaaccaaggctgaggcgagccaccatttcaaacccaataacaggagacttggagacggtacattacagaattagcaaaagtgcctggctctctggctatgaaaatcctgtggtgtctcgaattaatatgagaatacaagatctaacaggactagatgtttccacagcagaggaattacaggtagcaaattatggagttggaggacagtatgaaccccattttgactttgcacggaaagatgagccagatgctttcaaagagctggggacaggaa

SEQ ID NO: 1586 - DNA, 443 bp, Artificial
  cDNA Sequence
agaagtacgaaatgctgtgccgtggggagggtatcaaaatgacccctcggagacagaaaaaactcttttgccgctaccatgatggaaaccgtaatcctaaatttattctggctccagctaaacaggaggatgaatgggacaagcctcgtattattcgcttccatgatattatttctgatgcagaaattgaaatcgtcaaagacctagcaaaaccaaggctgagccgagctacagtacatgaccctgagactggaaaattgaccacagcacagtacagagtatctaagagtgcctggctctctggctatgaaaatcctgtggtgtctcgaattaatatgagaatacaagatctaacaggactagatgtttccacagcagaggaattacaggtagcaaattatggagttggaggacagtatgaaccccattttgactttgcacgg

SEQ ID NO: 1587 - DNA, 627 bp, Artificial
  cDNA Sequence
ccctgacacggaggagtcctattcagactggggccttcggcacctccggggaagctttgaatccgtcaatagctacttcgattcttttctggagctgctgggagggaagaatggagtctgtcagtacaggtgccgatatggaaaggcaccaatgcccagacctggctacaagccccaagagcccaatggctgcggctcctatttcctgggtctcaaggtaccagaaagtatggacttgggcattccagcaatgacaaagtgctgcaaccagctggatgtctgttatgacacttgcggtgccaacaaatatcgctgtgatgcaaaattccgatggtgtctccactcgatctgctctgaccttaagcggagtctgggctttgtctccaaagtggaagcagcctgtgattccctggttgacactgtgttcaacaccgtgtggaccttgggctgccgcccctttatgaatagtcagcgggcagcttgcatctgtgcagaggaggagaaggaagagttatgaggaagaagtgattccttcctggttttgagtgacaccacagctgtcagccttcaagatgtcaagtcttcgagtcagcgtgactcattcattcttccaacagtttggacacc

SEQ ID NO: 1588 - DNA, 532 bp, Artificial
  cDNA Sequence
agcggccgccttgctcctctaggtcccaggcgctctgcggagctttcgctgcccggtgagcggcgccgggcttgaggtcgcccagacgtcggaggagccgggtcacgaggctggagcttcctgcttgcagagtgcggcggggaggcgcggcccgggaacgcgggatcctggggagatctgccttctggagactgcgccgtcctcccgggagagccagaaagaggacatggctgctgggcagcgggaagcgaggccccaggtgtcactgacattcgaggacgtggctgtgctctttacctgggatgagtggagaaagctggctccttctcagagaaacttgtaccgggatgtgatgctggagaactataggaacctggtctcactgggactctcatttaccaaaccaaaagtcatctccctgttgcagcaaggagaagatccctgggaggtggagaaagacagttctggtgtctcctctctaggatgtaagagcacacctaaaatgacaaagtcaactcaaactcaggattca

SEQ ID NO: 1589 - DNA, 429 bp, Artificial
  cDNA Sequence
gaactcagcggcgtggggcgagccctggccctggtgggctcagcgggtcgctgctgccactgcgggtccagcgtcccctccgtaagccccaagcctgtggggcctgggcctggccgggcggcccagcgctgctctggtccgcgggctcctggctcctcccgaatccctgtgagggcgcgcggggtccttctcagcgggagtcggggttttagagctgcggattccagggctggaaagcagaaggggttcttcctggctccctttttcttctcagatctgccttctggagactgcgccgtcctcccgggagagccagaaagaggacatggctgctgggcagcgggaagcgaggccccaggtgtcactgacattcgaggacgtggctgtgctctttacctgggatgagtggagaaagctggctccttctca

SEQ ID NO: 1590 - DNA, 486 bp, Artificial
  cDNA Sequence
cccttctagcctgaggagtcctgcaggtgtgaagctccacacctgcctccatagcactttgcctgtccctaagagggctcatcggagaagaaagaatggctgtcagccacctgccaaccatggtccaggaatcggtgaccttcaaggatgtggctatactgttcacccaggaagagtgggggcagctgagccccgcccagagggccctgtacagggacgtgatgctggagaactacagcaacctggtctcactgggactcttaggacccaaaccagatacgttttcccagctagaaaaaagggaagtgtggatgccagaggacacccctggaggcttctgtcttgactggatgactatgcctgccagtaagaaatctactgtcaaggcagagattcctgaagaagaattggatcaatggacaataaaggaaagattcagtagcagtagtcactggaagtgtgctagcctgctggagtggcaatgtg

SEQ ID NO: 1591 - DNA, 1153 bp, Artificial
  cDNA Sequence
gcaggctgaaggcccccatctgagaagacagtgcactctccctgagttcgcctctcatcaggcttgggttttcatgaaatcagtcctccgagatgcctgttcactcatccctgtctggaaaggcaaaaagtacgtcactggcctattagatacgcccaggctgacttgaatatattgatggtactagtacttggccaggcagtggctttactgtattacactgtaggatgacgagctcactgcacggccttctcgactaggggaggggacactgcctgagtcccaggcatacttttctcacgtggatgatactgctctctacctgggcattctcacctgccccagctcaacccctaaaagtacatttctgaggaccctgcagtaagactttttcagccacagtcttctctaccagctgatctgtgtggtgttagacatttcagtacttactgagagggagttttctgtgccccaccttcagctgggttaatccccaaagaaccagtgtttcctagaaagagcagttcattccataccttgctcttgtagtcctaatggccatgtcgacatacccagctgtgacaagatgaaggaccacgatttgggactcttcagggacagacttggccacctggtgatgtgccaccttcagcagctctgtcttcacacgtccagcctgcgcctgcttcatgtagtacacaagactgctctggtacaccacgaccatgaccttcacatgaggccagtctccccgcccctcacctgggccatagaaaaaggatgctgctgtgaagatgtaatgggtggagcctcagcagccatcttgtgactatgagaccataagcaggaagacccaaggcaaccacagggaatggtggaacaaaggaatggacagagcccagggctttgagagcgcattcactcactgccccatgcctaaagtcaccaactctcagacctcctgtcttgtgatgagatgcctttatcgctaaaactactctcagtccaggctgccacctgcacccagatgcaacgtagctgaaataaaaggcgtgatggtatatatccccctaaggctaagaggccctagcagccagggctcagcctttccagggtctgtgtttcataaaatagccctgaaggatgtcatcaa

SEQ ID NO: 1592 - DNA, 1114 bp, Artificial
  cDNA Sequence
cagttgcgcccggcagcgacgggaaacgtctctgaattaggtgttccgctcgcctcttgtgcggtgtggagctgcgcgccccccgccgaggcgggcccaggtgccttctccaagagaggcagcagggagggagaaatggcaaggaggttgctgccagcccatgtacaggagtccgtgacgttcagggatgtggccgtgttcttcagccaggacgagtggttgcacctggactctgcccagagagccttgtaccgggaggtgatgctggagaactacagcatcctggtctcactggggattctcttttccaagccaaaggtcatctcccagttagagcaaggagaagacccctggatggtggagagtggagttccccaaggcgcacatctcggatgggaaagcttgtttggaaccatagtttctaaagaagaaaatcaggaagtcatgaaaaaactcataattgatggcacatttgacttcaagttggagaagacctacataaatgaagataagttagagaagcaacaaggcaaaaagaacagacttttcagtaaagtgttagttaccatcaaaaaagtctacatgaaggagaggagctttaaaggtgttgaatttgggaaaaatcttggtctaaaatcatcgcttattagaaaaccgagaatagtttccagaggaaggagaccccgttcacagcagtattcagttctctttaaacaactgggggtcaacacagtgcgtaaatgttataaatgtaatatctgtgggaaaatcttcctccacagttcctccctgagtaaacaccagagaatccacactggagagaagctctataaatgtaaggaatgtaggaaagccttcagccaaagctcatccctaactcagcacttgagggttcatacaggagagaaaccttatatatgtagtgaatgtggaaaagccttcagtttcaccacatctcttattggacaccagagaatgcatactggagagagaccttataaatgcaaggaatgtggaaaaacatttaaaggtagttcatctcttaataatcaccagcgaattcacacaggagagaagccctataagtgtaatgaatgtgggagggccttcagtc

SEQ ID NO: 1593 - DNA, 624 bp, Artificial
  cDNA Sequence
aggcaggcagctgctctgcccgagactgtcaggagttggtggatgtgaatccatgtctgaagcccaagctctcactactctgctgtctccctgaggggtgcatgaaggccccagcccagccagtgacacagaggttgggaagaccagggcgtgaagcttctgtgcttggagaacaggagggcttgtggagctgtggttgatggcgtgtccaggaagcctggccaggctggggtctggcaacagcctcaccacgatggcatggcggtgggcccggcctctacccgctgcgccacagctcctggctcctggctccaggtcatctctgcccacagccagtgtctctggtgagcctgggcaggtgggaggccgaagctgtgccccactggtttggatgctgagctctggggtgacctgcaccctgtagtcctacagttcacacgctatggatgcctgaagggatgggtgtcccgtttctgaaacccacagagcagccttgattgggaggcgtcctgtgcccatctcgtgccccccgtccttctcctgcgtccaggttctggttctgccgcctcctccgcacgctgctcaccagcctgctaagtggatgtgaataaacaatcatgcagg

SEQ ID NO: 1594 - DNA, 616 bp, Artificial
  cDNA Sequence
gagaatgtctgccgctgggcctacctccagcagaagccagacacgggccacgatgaataccacgatcacgccatcttcctcacacggcaggactttgggccttccggcatgcaaggctatgctcctgtcaccggcatgtgccatccggtccgcagctgcaccctgaaccatgaggacggcttctcctcagcgtttgtggtggcccatgagactggccacgtgctgggcatggagcacgacgggcagggcaaccgctgtggcgacgaggtgcggctgggcagcatcatggcgcccctggtgcaggccgccttccaccgcttccactggtcccgctgcagccagcaggagctgagccgctacctgcactcctatgactgcctgctggatgaccccttcgcccacgactggccggcgctgccccagctcccgggactgcactactccatgaacgagcaatgccgctttgacttcggcctgggctacatgatgtgcacggcgttccggacctttgacccctgcaagcagctgtggtgcagccatcctgacaacccctacttttgcaagaccaagaaggggccccccttggacgggactatgtgtgcacctggcaaggtga

SEQ ID NO: 1595 - DNA, 672 bp, Artificial
  cDNA Sequence
ggcgagccgggccctggtcccagtgctcagtaacctgtggcaacggcacccaggagcggccagtgctctgccgcaccgcggacgacagcttcggcatctgccaggaggagcgtcctgagacagcgaggacctgcaggcttggcccctgtccccgaaacatctcagatccctccaagaagagctacgtagttcagtggctgtcccgcccggaccccgactcgcccatccggaagatctcgtcaaagggccactgccaaggcgacaagtcaatattctgtaggatggaagtcttgtcccgctattgctccatcccaggctacaacaagctgtgctgcaagtcctgtaacctgtacaacaacctcaccaacgtggagggcaggatagagccaccgcctgggaagcacaacgacattgacgtgttcatgcctaccctcccagtgcccactgtagccatggaggtgcggccatcaccaagcacccccctggaggtccctctcaatgcctccagcaccaatgccacagaggatcacccagaaaccaatgccgtagatgaaccctacaaaatccatggcctggaagatgaagtccagccacccaacctaatccctcgacgaccgagcccctatgaaaagaccagaaaccaaagaatccaagagctcattgatgagatgc

SEQ ID NO: 1596 - DNA, 664 bp, Artificial
  cDNA Sequence
gtaacctgtggcaacggcacccaggagcggccagtgctctgccgcaccgcggacgacagcttcggcatctgccaggaggagcgtcctgagacagcgaggacctgcaggcttggcccctgtccccgaaacatctcagatccctccaagaagagctacgtagttcagtggctgtcccgcccggaccccgactcgcccatccggaagatctcgtcaagtaaccgacccgtttataactctgcctctgccctccagtgcatgccctgcgccctgtggagcttgccttgggcccccctcctctctgtctatggaaagctcccctgactctgcgggcgcgctctggggtgaccgttttctcccgggcctctgagctcggcgtccgctccgggccgcgctgcctgctggcgggggctcgggcctctgctggggccgaacctggttggtgatggcttgtaaaggggcaaagatctgtcgtggttgcaggaggggccggtggccaaagggcgaccctccgggccgagcccgtcccggcccgggggggttcgcggtctcgcggcgtcgtgcggggaccccaccccgagtttccggcactgccaggtgcttcccggctgccaccgccgtcgctgctgccgccgaccctttgctgagcgtgtccttctgactcgtg

SEQ ID NO: 1597 - DNA, 328 bp, Artificial
  cDNA Sequence
ggcagggcaagagggatcactctgagagaacaaaaataggccccaagttgctaagcagtgattgggaaccttcctttccttggcggagatgcatgacattccctaccgatccccagacacagcctgtgggactcttaggagaaatggtgatttactgaataactgacccgttgccgagatgagtacaatgaagtggaggtgatgaactcaaatcgtcttccagggccaggcggctgaccgggccacacccacctggagctgacttggttctggctgttgctgccactgtgaaatctgtatctctctccatctctgctctactatcccc

SEQ ID NO: 1598 - DNA, 598 bp, Artificial
  cDNA Sequence
tgattttgtacatatttatttgaaaatatgctgtcaacatcatgacttttcaaaacttaaaaaaaaaacttctgcatgcatctcctaagaattagaacattatcctacgtaactcaattatcacttctagaaaaatcaaatataccacattatctactacccattccatcttcctatttccccaaatatccccccaaatgtctcttataggtttttttatgaatcagaagctaataaaggatcacactttccatttggttatgtctcttgtcttaatctagcagagaccactttttgttttactacatttgctttttgaaaagtccagaccagggccaaaatgcacaaactatggcttacaacatcacacccctgcgtagggccagtggaatgtgtgcaagatcagtttggcttcattaactatgaagtaggggatagcaagaagctctttttccatatgaaagaacgcactggcaagtgcagtgcctggaatgtttggcgagtctgtgagggccccaaggctgttgcagctcctcgacctgatcggttggtcagtcgcttgaagaacatcaccctggatgatgccagtgatcctcgc

SEQ ID NO: 1599 - DNA, 363 bp, Artificial
  cDNA Sequence
gagatggggagttaggtgcagagagcgttggcacagtgagcaccgcagctcgagtggctgcctcagacccagagcccgaggagactttatacggagccagaacgaccccgcggggttccatcctcccaagcaataggcgggagtgggagctgcgaggaaagccggcccctcccctccctccatccaaggcagtgtgggctgtttgtttcatgccattctgggtgtgaatcctgatgcccacacatgccagctgcatgcacttgggcaactcaactcactcctcgagggctgtttctcgactgcagggtgttggcctcggccgcatctgtcacagacttgtcctgaaccgacagcggctggcgc

SEQ ID NO: 1600 - DNA, 506 bp, Artificial
  cDNA Sequence
ggaagccggcgcttagatccctaattagttcacacgtcgactgaatttttcagtacacgctcagtggcaataaagtggaagttgccgtcaaacagatcatcgctcgaaaagccatggagcaacgaggtgctttctcgaaccccgaggccctgcatctgtactgggacatccctgagctgaatggcttctgagtcggactggctggcacagggaggatggaaaccttgaatggcctggcgcaggagtccctggcttgcaggcaagctgtgcttaagggctgccggtgggaactggcacctgaaagaaggcatttgaagagggaggtggtgggtgctcctgcctcacccaggctggggtggagggaactgcagttttggtaacgactcctgggtcctctctgtgcctgttgctaaggcttttgtccgctgggctgtctggtggctaaaggatatggcttctactgtgtggtctgccgagctgtccttttgcaacagggcctgagacca

SEQ ID NO: 1601 - DNA, 429 bp, Artificial
  cDNA Sequence
gaactcagcggcgtggggcgagccctggccctggtgggctcagcgggtcgctgctgccactgcggctccagcgtcccctccgtaagccccaagcctgtggggcctgggcctggccgggcggcccagcgctgctctggtccgcgggctcctggctcctcccgaatccctgtgagggcgcgcggggtccttctcagcgggagtcggggttttagagctgcggattccagggctggaaagcagaaggggttcttcctggctccctttttcttctcagatctgccttctggagactgcgccgtcctcccgggagagccagaaagaggacatggctgctgggcagcgggaagcgaggccccaggtgtcactgacgtttgaggatgtggctgtgctgtttacccgagatgagtggagaaagctggccccttctca

SEQ ID NO: 1602 - DNA, 1038 bp, Artificial
  cDNA Sequence
acagctttctgccatttcaaattgaccacatcaggcagatggcgtatcagatctgccagtcaataaattttttacatcataataaattaacccatacagatctgaagcctgaaaatattttgtttgtgaagtctgactatgtagtcaaatataattctaaaatgaaacgtgatgaacgcacactgaaaaacacagatatcaaagttgttgactttggaagtgcaacgtatgatgatgaacatcacagtactttggtgtctacccggcactacagagctcccgaggtcattttggctttaggttggtctcagccttgtgatgtttggagcataggttgcattcttattgaatattaccttggtttcacagtctttcagactcatgatagtaaagagcacctggcaatgatggaacgaatattaggacccataccacaacacatgattcagaaaacaagaaaacgcaagtattttcaccataaccagctagattgggatgaacacagttctgctggtagatatgttaggagacgctgcaaaccgttgaaggaatttatgctttgtcatgatgaagaacatgagaaactgtttgacctggttcgaagaatgttagaatatgatccaactcaaagaattaccttggatgaagcattgcagcatcctttctttgacttattaaaaaagaaatgaaatgggaatcagtggtcttactatatacttctctagaagagattacttaagactgtgtcagtcaactaaacattctaatatttttgtaaacattaaattattttgtacagttaagtgtaaatattgtatgttttgtatcaatagcataattaacttgttaagcaagtatggtcttgataatgcattagaaaaattaaaattaatttttctttttgaaattaccatttttaaatacctttgaaatatcctttgtgtccagtgataaatgtgattgatcttgccttttgtacatggaggtcacctctgaagtgattttttttgagtaaaaggaaatcttgactactttata

SEQ ID NO: 1603 - DNA, 684 bp, Artificial
  cDNA Sequence
agacacacctttgatcttgctgaaagatggactcagcatgtttgctctaatgactaagtgaaatgcggcattccaaaagaactcactgtcctgattgggatagcagagaaagctggggacatgaaagctatcgtggaagtcacaagcggaagaggagatctcatagtagcacacaagagaacaggcattgtaaaccacatcaccagtttaaagaatctgattgtcattatttagaagcaaggtccttgaatgagcgagattatcgggaccggagatacgttgacgaatacaggaatgactactgtgaaggatatgttcctagacattatcacagagacattgaaagcgggtatcgaatccactgcagtaaatcttcagtccgcagcaggagaagcagtcctaaaaggaagcgcaatagacactgttcaagtcatcagtcacgttcggtatgattggttttgttttcaatttgagtggagttttatttgtgtgtactcttaacgagctgataagtttctaattttttatatatatatatataaaatactatttggatatattataattgtatttatattacttaaatccttaaaggaaacctccaaattcttgtagctgatctgtatatttattagctagccctcatttgcccacatttcctcatattctgcagaccagataatg

SEQ ID NO: 1604 - DNA, 615 bp, Artificial
  cDNA Sequence
agcggcgggagcgcgcaaggttctgtcacgcaggcgcgttcgcgcggcgtaggtggtgctagaggcgactcgggggattctagggcgacggcgctgccgccattttgtggggtgtttgtcgcagcggccgaggagggaagacggcagtttggcgacatttctcggccgaagggccatttgcttttgcggagatgcggcattccaaaagaactcactgtcctgattgggatagcagagaaagctggggacatgaaagctatcgtggaagtcacaagcggaagaggagatctcatagtagcacacaagagaacaggcattgtaaaccacatcaccagtttaaagaatctgattgtcattatttagaagcaaggtccttgaatgagcgagattatcgggaccggagatacgttgacgaatacaggaatgactactgtgaaggatatgttcctagacattatcacagagacattgaaagcgggtatcgaatccactgcagtaaatcttcagtccgcagcaggagaagcagtcctaaaaggaagcgcaatagacactgttcaagtcatcagtcacgttcggtatgattggttttgttttcaatttgagtggagttttatt

SEQ ID NO: 1605 - DNA, 707 bp, Artificial
  cDNA Sequence
cgggggattctagggcgacggcgctgccgccattttgtggggtgtttgtcgcagcggccgaggagggaagacggcagtttggcgacatttctcggccgaagggccatttgcttttgcggagatgcggcattccaaaagaactcactgtcctgattgggatagcagagaaagctggggacatgaaagctatcgtggaagtcacaagcggaagaggagatctcatagtagcacacaagagaacaggcattgtaaaccacatcaccagtttaaagaatctgattgtcattatttagaagcaaggtccttgaatgagcgagattatcgggaccggagatacgttgacgaatacaggaatgactactgtgaaggatatgttcctagacattatcacagagacattgaaagcgggtatcgaatccactgcagtaaatcttcagtccgcagcaggagaagcagtcctaaaaggaagcgcaatagacactgttcaagtcatcagtcacgttcgaagagccaccgaaggaaaagatccaggagtatagaggatgatgaggagggtcacctgatctgtcaaagtggagacgttctaagagcaagatgtatagaatatttttcaacactttttaaactttgcagaaagaataatctttttaagaatagtttgtcagcggggggctaaagaactcttcattgcttttttattttgcttt

SEQ ID NO: 1606 - DNA, 684 bp, Artificial
  cDNA Sequence
gtggggtgtttgtcgcagcggccgaggagggaagacggcagtttggcgacatttctcggccgaagggccatttgcttttgcggagatgcggcattccaaaagaactcactgtcctgattgggatagcagagaaagctggggacatgaaagctatcgtggaagtcacaagcggaagaggagatctcatagtagcacacaagagaacaggcattgtaaaccacatcaccagtttaaagaatctgattggacctgtgtggatataaaaacgaatgcccttaccctcatccgtcttggctatttgaaaggctatagtgaaatattcactgggcattcagtggatattttaaaaaattaaatcagtctgttcatcctgtctaccctgtccatagcctgtgtaattctgtagactttgtttatataatctctcagccttggtcattggccattatctattgaagagactctcatccttttagtttgtcctcatggtgttcactccatgttttgttactctatacgttgtttatggcttagcagctctaattccatgcagtattccagctaaagattgttagtgctagttttttctaatagaaggattttggacttttatgggaaggatgcccttaagagtatggtcacgtctagcttattgtattggtgatctctccctgacagttccaa

SEQ ID NO: 1607 - DNA, 1025 bp, Artificial
  cDNA Sequence
cgaggagggaagacggcagtttggcgacatttctcggccgaagggccatttgcttttgcggagatgcggcattccaaaagaactcactgtcctgattgggatagcagagaaagctggggacatgaaagctatcgtggaagtcacaagcggaagaggagatctcatagtagcacacaagagaacaggcattgtaaaccacatcaccagtttaaagaatctgattgtcattatttagaagcaaggtccttgaatgagcgagattatcgggaccggagatacgttgacgaatacaggaatgactactgtgaaggatatgttcctagacattatcacagagacattgaaagcgggtatcgaatccactgcagtaaatcttcagtccgcagcaggagaagcagtcctaaaaggaagcgcaatagacactgttcaagtcatcagtcacgttcgatgaaatcgtggacactttgggtgaaggagcctttggcaaagttgtagagtgcattgatcatggcatggatggcatgcatgtagcagtgaaaatcgtaaaaaatgtaggccgttaccgtgaagcagctcgttcagaaatccaagtattagagcacttaaatagtactgatcccaatagtgtcttccgatgtgtccagatgctagaatggtttgatcatcatggtcatgtttgtattgtgtttgaactactgggacttagtacttacgatttcattaaagaaaacagctttctgccatttcaaattgaccacatcaggcagatggcgtatcagatctgccagtcaataaattttttacatcataataaattaacccatacagatctgaagcctgaaaatattttgtttgtgaagtctgactatgtagtcaaatataattctaaaatgaaacgtgatgaacgcacactgaaaaacacagatatcaaagttgttgactttggaagtgcaacgtatgatgatgaacatcacagtactttggtgtctacccggcactacagagctcccgaggtcattttgggt

SEQ ID NO: 1608 - DNA, 577 bp, Artificial
  cDNA Sequence
tatctccccagcctggatttgatgctagccctattgggtagtagttgtaaagatgcttctatttctgcctaaaccagccccctgggaaaaagaatgacagcatattctggggaaaggaaaggggttggtgagggcaatctagtcaacatccgtcactccattgcttgttaggcttattttagccgatgtgtctgactgggcaggtgtcccctctctccctcagtgctccatgtgcatccctcttgaagcttcgcactctgttgaagaggacactcatcccagtcattatttagaagcaaggtccttgaatgagcgagattatcgggaccggagatacgttgacgaatacaggaatgactactgtgaaggatatgttcctagacattatcacagagacattgaaagcgggtatcgaatccactgcagtaaatcttcagtccgcagcaggagaagcagtcctaaaaggaagcgcaatagacactgttcaagtcatcagtcacgttcgatgaaatcgtggacactttgggtgaaggagcctttggcaaagttgtagagtgcattgatcatggcatgtaag

SEQ ID NO: 1609 - DNA, 853 bp, Artificial
  cDNA Sequence
acattattgcagaatgaagagaataatttgaaatcttttaatgtgtttgcagtcattatttagaagcaaggtccttgaatgagcgagattatcgggaccggagatacgttgacgaatacaggaatgactactgtgaaggatatgttcctagacattatcacagagacattgaaagcgggtatcgaatccactgcagtaaatcttcagtccgcagcaggagaagcagtcctaaaaggaagcgcaatagacactgttcaagtcatcagtcacgttcgatgaaatcgtggacactttgggtgaaggagcctttggcaaagttgtagagtgcattgatcatggcatggatggcatgcatgtagcagtgaaaatcgtaaaaaatgtaggccgttaccgtgaagcagctcgttcagaaatccaagtattagagcacttaaatagtactgatcccaatagtgtcttccgatgtgtccagatgctagaatggtttgatcatcatggtcatgtttgtattgtgtttgaactactgggacttagtacttacgatttcattaaagaaaacagctttctgccatttcaaattgaccacatcaggcagatggcgtatcagatctgccagtcaataaattttttacatcataataaattaacccatacagatctgaagcctgaaaatattttgtttgtgaagtctgactatgtagtcaaatataattctaaaatgaaacgtgatgaacgcacactgaaaaacacagatatcaaagttgttgactttggaagtgcaacgtatgatgatgaacatcacagtactttggtgtctacccggcactacagagctcccgaggtcattttgggt

SEQ ID NO: 1610 - DNA, 561 bp, Artificial
  cDNA Sequence
ggaaatgctctacaggagcccggacagagtaggatggcatccagcccatgtgggaggacagcaggaataaacggggtggccgctggctggtcagcctggccaagcagcagcgccacattgagctggaccggctgtggctggagacgctgctgtgtctgatcggggagagctttgaggaacacagcagagaggtatgtggggccgtcgtcaacatccgcaccaagggggacaagatcgctgtgtggacgagggaggcggaaaaccaggcgggcgtgctgcacgttgggcgtgtatacaaagagcgcctgggcctctccccaaagaccatcattgggtaccaggcccatgcagacacagccaccaagagcaactccctagccaagaacaagtttgtggtgtgaggggggccttggcacccctcctatgtaatgggacagccgccactgagcctcattactttgggggatggggcgggactggggatcagacagcctagttcttacctgtcctcaagtgaacaggaatgcaaacactctttaacatgagttggggcctgagcct

SEQ ID NO: 1611 - DNA, 1273 bp, Artificial
  cDNA Sequence
ccgcagccgcccggctaggccccgggcggctctagcccagggcggcccgcggggcgctgggcctggctcccggctccggtttccgggccggcgggtggccgctcaccatgcccggcaagcaccagcatttccaggaacctgaggtcggctgctgcgggaaatacttcctgtttggcttcaacattgtcttctgggtgctgggagccctgttcctggctatcggcctctgggcctggggtgagaagggcgttctctcgaacatctcagcgctgacagatctgggaggccttgaccccgtgtggctgtttgtggtagttggaggcgtcatgtcggtgctgggctttgctggctgcattggggccctccgggagaacaccttcctgctcaagtttttctccgtgttcctcggtctcatcttcttcctggagctggcaacagggatcctggcctttgtcttcaaggactggattcgagaccagctcaacctcttcatcaacaacaacgtcaaggcctaccgggacgacattgacctccagaacctcattgactttgctcaggaatactggtcttgctgcggagcccgaggccccaatgactggaacctcaatatctacttcaactgcactgacttgaaccccagccgggagcgctgcggggtgcccttctcctgctgcgtcagggaccctgcggaggatgtcctcaacacccagtgtggctacgacgtccggctcaaactggagctggagcagcagggcttcatccacaccaaaggctgcgtgggccagtttgagaagtggctgcaggacaacctgattgtggtggcgggagtcttcatgggcatcgccctcctccagatctttggcatctgcctggcccagaacctcgtgagtgacatcaaggcagtgaaagccaactggagcaaatggaatgatgactttgaaaaccactggcttacgcccaccatttccgaggtcctgtccacggcggggcctcagcagaactctctgactggggcccctggcccggccccacccagccgacatgttttctttggcctgggtggtttataccctgagccaacctttaaaaattggtagatttcacataaaagtccagatccacagcttctcttgaagaatgaccacctggctacgccggctcttcggtggcaacactacctgggacactgcctccccagtcaccaagggccccagctggcccgttctactcacctaagtgccgcctgacccttgtacactaggagctggcctcc

SEQ ID NO: 1612 - DNA, 1791 bp, Artificial
  cDNA Sequence
ccgcagccgcccggctaggccccgggcggctctagcccagggcggcccgcggggcgctgggcctggctcccggctccggtttccgggccggcgggtggccgctcaccatgcccggcaagcaccagcatttccaggaacctgaggtcggctgctgcgggaaatacttcctgtttggcttcaacattgtcttctgggtgctgggagccctgttcctggctatcggcctctgggcctggggtgagaagggcgttctctcgaacatctcagcgctgacagatctgggaggccttgaccccgtgtggctgtttgtggtagttggaggcgtcatgtcggtgctgggctttgctggctgcattggggccctccgggagaacaccttcctgctcaagtttttctccgtgttcctcggtctcatcttcttcctggagctggcaacagggatcctggcctttgtcttcaaggactggattcgagaccagctcaacctcttcatcaacaacaacgtcaaggcctaccgggacgacattgacctccagaacctcattgactttgctcaggaatactggtcttgctgcggagcccgaggccccaatgactggaacctcaatatctacttcaactgcactgacttgaaccccagccgggagcgctgcggggtgcccttctcctgctgcgtcagggaccctgcggaggatgtcctcaacacccagtgtggctacgacgtccggctcaaactggagctggagcagcagggcttcatccacaccaaaggctgcgtgggccagtttgagaagtggctgcaggacaacctgattgtggtggcgggagtcttcatgggcatcgccctcctccagatctttggcatctgcctggcccagaacctcgtgagtgacatcaaggcagtgaaagccaactggtgaggccgccagaggccatggccacatgcctggcctacgcaggcctctggggggccccccaggaccctcctactatactcctgacgggcaaggctgcaggagatgttcctgctgggactgagccttgaggggttcgcctgaaccgctgtgctgtccacccacggaggaagttgctgtgcctccgcctgggcctcttgtcccatatgcgtgtgtacacacacatgcaggcacacgtgtgcacagggagccaccgtctcggctacatttggggtggtggactctccaggggactaggaagggcgcagctcagagggtgcaggccaagtggggtgggaggtgctgtgtggagggtcccccccgttccctgccccccagtgctgggacgcacctttctgtgcgtagctgtatggggcgcgttgcctgagccactgcctcacacagcttcagagcactcttttctatgagctgtaactttgagcctgccaggaacccacctcagcctcagtgtcccagactctgaaatgggtccaagaattttctttctcttgcttgcctctcaggagcaaatggaatgatgactttgaaaaccactggcttacgcccaccatttccgaggtcctgtccacggcggggcctcagcagaactctctgactggggcccctggcccggccccacccagccgacatgttttctttggcctgggtggtttataccctgagccaacctttaaaaattggtagatttcacataaaagtccagatccacagcttctcttgaagaatgaccacctggctacgccggctcttcggtggcaacactacctgggacactgcctccccagtcaccaagggccccagctggcccgttctactc

SEQ ID NO: 1613 - DNA, 740 bp, Artificial
  cDNA Sequence
ccgcagccgcccggctaggccccgggcggctctagcccagggcggcccgcggggcgctgggcctggctcccggctccggtttccgggccggcgggtggccgctcaccatgcccggcaagcaccagcatttccaggaacctgaggtcggctgctgcgggaaatacttcctgtttggcttcaacattgtcttctgggtgctgggagccctgttcctggctatcggcctctgggcctggggtgagaagggcgttctctcgaacatctcagcgctgacagatctgggaggccttgaccccgtgtggctgtttgtggtagttggaggcgtcatgtcggtgctgggctttgctggctgcattggggccctccgggagaacaccttcctgctcaagtttttctccgtgttcctcggtctcatcttcttcctggagctggcaacagggatcctggcctttgtcttcaaggactggattcgagaccagctcaacctcttcatcaacaacaacgtcaaggcctaccgggacgacattgacctccagaacctcattgactttgctcaggaatactggtcttgctgcggagcccgaggccccaatgactggaacctcaatatctacttcaactgcactgacttgaaccccagccgggagcgctgcggggtgcccttctcctgctgcgtcagggaccctgcggaggatgtcctcaacacccagtgtggctacgacgtccggctcaaactggtg

SEQ ID NO: 1614 - DNA, 1171 bp, Artificial
  cDNA Sequence
ggtttccgggccggcgggtggccgctcaccatgcccggcaagcaccagcatttccaggaacctgaggtcggctgctgcgggaaatacttcctgtgctgggagccctgttcctggctatcggcctctgggcctggggtgagaagggcgttctctcgaacatctcagcgctgacagatctgggaggccttgaccccgtgtggctgtttgtggtagttggaggcgtcatgtcggtgctgggctttgctggctgcattggggccctccgggagaacaccttcctgctcaagtttttctccgtgttcctcggtctcatcttcttcctggagctggcaacagggatcctggcctttgtcttcaaggactggattcgagaccagctcaacctcttcatcaacaacaacgtcaaggcctaccgggacgacattgacctccagaacctcattgactttgctcaggaatactggtcttgctgcggagcccgaggccccaatgactggaacctcaatatctacttcaactgcactgacttgaaccccagccgggagcgctgcggggtgcccttctcctgctgcgtcagggaccctgcggaggatgtcctcaacacccagtgtggctacgacgtccggctcaaactggagctggagcagcagggcttcatccacaccaaaggctgcgtgggccagtttgagaagtggctgcaggacaacctgattgtggtggcgggagtcttcatgggcatcgccctcctccagatctttggcatctgcctggcccagaacctcgtgagtgacatcaaggcagtgaaagccaactggagcaaatggaatgatgactttgaaaaccactggcttacgcccaccatttccgaggtcctgtccacggcggggcctcagcagaactctctgactggggcccctggcccggccccacccagccgacatgttttctttggcctgggtggtttataccctgagccaacctttaaaaattggtagatttcacataaaagtccagatccacagcttctcttgaagaatgaccacctggctacgccggctcttcggtggcaacactacctgggacactgcctccccagtcaccaagggccccagctggcccgttctactcacctaagtgccgcctgacccttgtacactaggagctggcctcc

SEQ ID NO: 1615 - DNA, 1689 bp, Artificial
  cDNA Sequence
ggtttccgggccggcgggtggccgctcaccatgcccggcaagcaccagcatttccaggaacctgaggtcggctgctgcgggaaatacttcctgtgctgggagccctgttcctggctatcggcctctgggcctggggtgagaagggcgttctctcgaacatctcagcgctgacagatctgggaggccttgaccccgtgtggctgtttgtggtagttggaggcgtcatgtcggtgctgggctttgctggctgcattggggccctccgggagaacaccttcctgctcaagtttttctccgtgttcctcggtctcatcttcttcctggagctggcaacagggatcctggcctttgtcttcaaggactggattcgagaccagctcaacctcttcatcaacaacaacgtcaaggcctaccgggacgacattgacctccagaacctcattgactttgctcaggaatactggtcttgctgcggagcccgaggccccaatgactggaacctcaatatctacttcaactgcactgacttgaaccccagccgggagcgctgcggggtgcccttctcctgctgcgtcagggaccctgcggaggatgtcctcaacacccagtgtggctacgacgtccggctcaaactggagctggagcagcagggcttcatccacaccaaaggctgcgtgggccagtttgagaagtggctgcaggacaacctgattgtggtggcgggagtcttcatgggcatcgccctcctccagatctttggcatctgcctggcccagaacctcgtgagtgacatcaaggcagtgaaagccaactggtgaggccgccagaggccatggccacatgcctggcctacgcaggcctctggggggccccccaggaccctcctactatactcctgacgggcaaggctgcaggagatgttcctgctgggactgagccttgaggggttcgcctgaaccgctgtgctgtccacccacggaggaagttgctgtgcctccgcctgggcctcttgtcccatatgcgtgtgtacacacacatgcaggcacacgtgtgcacagggagccaccgtctcggctacatttggggtggtggactctccaggggactaggaagggcgcagctcagagggtgcaggccaagtggggtgggaggtgctgtgtggagggtcccccccgttccctgccccccagtgctgggacgcacctttctgtgcgtagctgtatggggcgcgttgcctgagccactgcctcacacagcttcagagcactcttttctatgagctgtaactttgagcctgccaggaacccacctcagcctcagtgtcccagactctgaaatgggtccaagaattttctttctcttgcttgcctctcaggagcaaatggaatgatgactttgaaaaccactggcttacgcccaccatttccgaggtcctgtccacggcggggcctcagcagaactctctgactggggcccctggcccggccccacccagccgacatgttttctttggcctgggtggtttataccctgagccaacctttaaaaattggtagatttcacataaaagtccagatccacagcttctcttgaagaatgaccacctggctacgccggctcttcggtggcaacactacctgggacactgcctccccagtcaccaagggccccagctggcccgttctactc

SEQ ID NO: 1616 - DNA, 638 bp, Artificial
  cDNA Sequence
ggtttccgggccggcgggtggccgctcaccatgcccggcaagcaccagcatttccaggaacctgaggtcggctgctgcgggaaatacttcctgtgctgggagccctgttcctggctatcggcctctgggcctggggtgagaagggcgttctctcgaacatctcagcgctgacagatctgggaggccttgaccccgtgtggctgtttgtggtagttggaggcgtcatgtcggtgctgggctttgctggctgcattggggccctccgggagaacaccttcctgctcaagtttttctccgtgttcctcggtctcatcttcttcctggagctggcaacagggatcctggcctttgtcttcaaggactggattcgagaccagctcaacctcttcatcaacaacaacgtcaaggcctaccgggacgacattgacctccagaacctcattgactttgctcaggaatactggtcttgctgcggagcccgaggccccaatgactggaacctcaatatctacttcaactgcactgacttgaaccccagccgggagcgctgcggggtgcccttctcctgctgcgtcagggaccctgcggaggatgtcctcaacacccagtgtggctacgacgtccggctcaaactggtg

SEQ ID NO: 1617 - DNA, 647 bp, Artificial
  cDNA Sequence
aggcgtcatgtcggtgctgggctttgctggctgcattggggccctccgggagaacaccttcctgctcaagtttgactggattcgagaccagctcaacctcttcatcaacaacaacgtcaaggcctaccgggacgacattgacctccagaacctcattgactttgctcaggaatactggtcttgctgcggagcccgaggccccaatgactggaacctcaatatctacttcaactgcactgacttgaaccccagccgggagcgctgcggggtgcccttctcctgctgcgtcagggaccctgcggaggatgtcctcaacacccagtgtggctacgacgtccggctcaaactggagctggagcagcagggcttcatccacaccaaaggctgcgtgggccagtttgagaagtggctgcaggacaacctgattgtggtggcgggagtcttcatgggcatcgccctcctccagatctttggcatctgcctggcccagaacctcgtgagtgacatcaaggcagtgaaagccaactggagcaaatggaatgatgactttgaaaaccactggcttacgcccaccatttccgaggtcctgtccacggcggggcctcagcagaactctctgactggggcccctggcccggccccaccca

SEQ ID NO: 1618 - DNA, 471 bp, Artificial
  cDNA Sequence
tggaggtccgcattaatgtctcaaggcagcaggtcgagaaggtgttcgggctggaggaatactggtgccagtgcgtggcatggagctcctcgggcaccaccaagagtcagaaggcctacatccgcatagcctatttgcgcaagaacttcgagcaggagccgctggccaaggaggtgtccctggagcagggcatcgtgctgccctgccgtccaccggagggcatccctccagccgaggtggagtggctccggaacgaggacctggtggacccgtccctggaccccaatgtatacatcacgcgggagcacagcctggtggtgcgacaggcccgccttgctgacacggccaactacacctgcgtggccaagaacatcgtggcacgtcgccgcagcgcctccgctgctgtcatcgtctacgtggacggcagctggagcccgtggagcaagtggtcggcctgtgggctggactgca

SEQ ID NO: 1619 - DNA, 602 bp, Artificial
  cDNA Sequence
ggcctcatcgccgtggccgtctgcctggtcctgctgctgcttgtcctcatcctcgtttattgccggaagaaggaggggctggactcagatgtggctgactcgtccattctcacctcaggcttccagcccgtcagcatcaagcccagcaaagcagacaacccccatctgctcaccatccagccggacctcagcaccaccaccaccacctaccagggcagtctctgtccccggcaggatgggcccagccccaagttccagctcaccaatgggcacctgctcagccccctgggtggcggccgccacacactgcaccacagctctcccacctctgaggccgaggagttcgtctcccgcctctccacccagaactacttccgctccctgccccgaggcaccagcaacatgacctatgggaccttcaacttcctcgggggccggctgatgatccctaatacaggaatcagcctcctcatccccccagatgccataccccgagggaagatctatgagatctacctcacgctgcacaagccggaagacgtgaggttgcccctagctggctgtcagaccctgctgagtcccatcgttagctgtggaccccc

SEQ ID NO: 1620 - DNA, 459 bp, Artificial
  cDNA Sequence
ctcttcagcatcctcagcagagtctaggacagattaaatgctaataaatacttgctgaattaaactgtatcaatagattccaggggaaaaaagagctcttgttttatgaggacctattttgtgccagagactttataaacatctttatctttacaacaaccctacaaagaatatatcattatttctattttacagtaaataattttttttttttttgagacacagatgggagttatggatagaatacatatgaaacaacagtggccacgagttgatgaatgactaggtagaatatgggggttcagagtactactatcctctcaatttttaagtttgaaatttttggtaattaaaagtaaaacacacacacacaaagtccttttgcaagacaaataccaaagataaactagccactgtcttttgaagaaagtggtatgaaaatcaggtgacaaagataag

SEQ ID NO: 1621 - DNA, 1018 bp, Artificial
  cDNA Sequence
ggagtatcccgcgccggccacggtgcaggccgcggacggcggagcggccgggccttacagcagctcggagttgctggagggccaggagccggacggggtgcgctttgaccgcgagagggcgcgccgcctgtgggaagccgtgtccggtgcccagccggtgggtagagaggaagtggagcacatgatccagaagaaccaatgtctcttcaccaacacccagtgtaaggtttgctgcgccttgcttatttctgagtcccagaagctggcacattaccagagcaaaaaacatgccaacaaagtgaagagatacctagcaatccatggaatggagacattaaagggggaaacgaagaagctagactcagatcagaagagcagcagaagcaaagacaagaaccagtgctgccccatctgtaacatgaccttttcctcccctgtcgtggcccagtcgcactacctggggaagacccacgcaaagaacttaaagctgaagcagcagtccactaaggtggaagccttgcaccagaatagagagatgatagacccagacaagttctgcagcctctgccatgcaactttcaacgaccctgtcatggctcaacaacattatgtgggcaagaaacacagaaaacaggagaccaagctcaaactaatggcacgctatgggcggctggcggaccctgctgtcactgactttccaggtcaccaaaaacagtggcatcatccctgggccagattccaatgcaaaggcaacccattcagaaagactcaaccaccttggaagactagaggtgattctgcccagcatcccatattgggccagccatgagccagcttcccgtgactgctcagcccttggctccctcttgctcgttgttctcaccaggaaagtacacgggcctgaggcaggattgggccacagacagcctctcattggtccgggctaattcactcctgctgctcccctttggcaggggtcctgtaggtcatgacaggggaggcaagggtattgagagac

SEQ ID NO: 1622 - DNA, 349 bp, Artificial
  cDNA Sequence
ccattgaagattttctggtggggcagtggtatgatcagacctgtgttctttcttccaaccagaagagcagcagaagcaaagacaagaaccagtgctgccccatctgtaacatgaccttttcctcccctgtcgtggcccagtcgcactacctggggaagacccacgcaaagaacttaaagctgaagcagcagtccactaaggtggaagccttgcaccagaatagagagatgatagacccagacaagttctgcagcctctgccatgcaactttcaacgaccctgtcatggctcaacaacattatgtgggcaagaaacacagaaaacaggagaccaagctcaaactaatggc

SEQ ID NO: 1623 - DNA, 932 bp, Artificial
  cDNA Sequence
gcgctcgggctgtctgcggaccctgccgcgtgcaggggtcgcggccggctggagctgggagtgaggcggcggaggagccaggtgaggaggagccaggaaggcagttggtgggaagtccagcttgggtccctgagagctgtgagaaggagatgcggctgctgctggccctgttgggggtcctgctgagtgtgcctgggcctccagtcttgtccctggaggcctctgaggaagtggagcttgagccctgcctggctcccagcctggagcagcaagagcaggagctgacagtagcccttgggcagcctgtgcgtctgtgctgtgggcgggctgagcgtggtggccactggtacaaggagggcagtcgcctggcacctgctggccgtgtacggggctggaggggccgcctagagattgccagcttcctacctgaggatgctggccgctacctctgcctggcacgaggctccatgatcgtcctgcagaatctcaccttgattacaggtgactccttgacctccagcaacgatgatgaggaccccaagtcccatagggacccctcgaataggcacagttacccccagcaagcaccctactggacacacccccagcgcatggagaagaaactgcatgcagtacctgcggggaacaccgtcaagttccgctgtccagctgcaggcaaccccacgcccaccatccgctggcttaaggatggacaggcctttcatggggagaaccgcattggaggcattcggctgcgccatcagcactggagtctcgtgatggagagcgtggtgccctcggaccgcggcacatacacctgcctggtagagaacgctgtgggcagcatccgctataactacctgctagatgtgctggagcggtccccgcaccggcccatcctgcaggccgggctcccggccaacaccacagcc

SEQ ID NO: 1624 - DNA, 759 bp, Artificial
  cDNA Sequence
gcgctcgggctgtctgcggaccctgccgcgtgcaggggtcgcggccggctggagctgggagtgaggcggcggaggagccaggtgaggaggagccaggaaggcagttggtgggaagtccagcttgggtccctgagagctgtgagaaggagatgcggctgctgctggccctgttgggggtcctgctgagtgtgcctgggcctccagtcttgtccctggaggcctctgaggaagtggagcttgagccctgcctggctcccagcctggagcagcaagagcaggagctgacagtagcccttgggcagcctgtgcgtctgtgctgtgggcgggctgagcgtggtggccactggtacaaggagggcagtcgcctggcacctgctggccgtgtacggggctggaggggccgcctagagattgccagcttcctacctgaggatgctggccgctacctctgcctggcacgaggctccatgatcgtcctgcagaatctcaccttgattacaggtgactccttgacctccagcaacgatgatgaggaccccaagtcccatagggacccctcgaataggcacagttacccccagcaagcaccctactggacacacccccagcgcatggagaagaaactgcatgcagtacctgcggggaacaccgtcaagttccgctgtccagctgcaggcaaccccacgcccaccatccgctggcttaaggatggacaggcctttcatggggagaaccgcattggaggcattcgggtgagtc

SEQ ID NO: 1625 - DNA, 721 bp, Artificial
  cDNA Sequence
ggaggagccaggtgagcaggaccctgtgctgggcgcggagtcacgcaggctcgaggaaggcagttggtgggaagtccagcttgggtccctgagagctgtgagaaggagatgcggctgctgctggccctgttgggggtcctgctgagtgtgcctgggcctccagtcttgtccctggaggcctctgaggaagtggagcttggtggtaagagactctagcagggagtgaagggatgcctggggagacagacctgcccctcttggaccttagatgcttccctctgtccctgatgtagactccttgacctccagcaacgatgatgaggaccccaagtcccatagggacccctcgaataggcacagttacccccagcaagcaccctactggacacacccccagcgcatggagaagaaactgcatgcagtacctgcggggaacaccgtcaagttccgctgtccagctgcaggcaaccccacgcccaccatccgctggcttaaggatggacaggcctttcatggggagaaccgcattggaggcattcggctgcgccatcagcactggagtctcgtgatggagagcgtggtgccctcggaccgcggcacatacacctgcctggtagagaacgctgtgggcagcatccgctataactacctgctagatgtgctggagcggtccccgcaccggcccatcctgcaggccgggctcccggccaacaccacagcc

SEQ ID NO: 1626 - DNA, 1150 bp, Artificial
  cDNA Sequence
agactgcagacatcaatagctcagaggtggaggtcctgtacctgcggaacgtgtcagccgaggacgcaggcgagtacacctgcctcgcaggcaattccatcggcctctcctaccagtctgcctggctcacggtgctgccagaggaggaccccacatggaccgcagcagcgcccgaggccaggtatacggacatcatcctgtacgcgtcgggctccctggccttggctgtgctcctgctgctggccgggctgtatcgagggcaggcgctccacggccggcacccccgcccgcccgccactgtgcagaagctctcccgcttccctctggcccgacagttctccctggagtcaggctcttccggcaagtcaagctcatccctggtacgaggcgtgcgtctctcctccagcggccccgccttgctcgccggcctcgtgagtctagatctacctctcgacccactatgggagttcccccgggacaggctggtgcttgggaagcccctaggcgagggctgctttggccaggtagtacgtgcagaggcctttggcatggaccctgcccggcctgaccaagccagcactgtggccgtcaagatgctcaaagacaacgcctctgacaaggacctggccgacctggtctcggagatggaggtgatgaagctgatcggccgacacaagaacatcatcaacctgcttggtgtctgcacccaggaagggcccctgtacgtgatcgtggagtgcgccgccaagggaaacctgcgggagttcctgcgggcccggcgccccccaggccccgacctcagccccgacggtcctcggagcagtgaggggccgctctccttcccagtcctggtctcctgcgcctaccaggtggcccgaggcatgcagtatctggagtcccggaagtgtatccaccgggacctggctgcccgcaatgtgctggtgactgaggacaatgtgatgaagattgctgactttgggctggcccgcggcgtccaccacattgactactataagaaaaccagcaacggccgcctgcctgtgaagtggatggcgcccgaggccttgtttgaccgggtgtacacacaccagagtgacgtgtggtcttttgggatcctgctatgggagatcttcaccctcgggggctcccc

SEQ ID NO: 1627 - DNA, 960 bp, Artificial
  cDNA Sequence
caggtatacggacatcatcctgtacgcgtcgggctccctggccttggctgtgctcctgctgctggccgggctgtatcgagggcaggcgctccacggccggcacccccgcccgcccgccactgtgcagaagctctcccgcttccctctggcccgacagtcaggctcttccggcaagtcaagctcatccctggtacgaggcgtgcgtctctcctccagcggccccgccttgctcgccggcctcgtgagtctagatctacctctcgacccactatgggagttcccccgggacaggctggtgcttgggaagcccctaggcgagggctgctttggccaggtagtacgtgcagaggcctttggcatggaccctgcccggcctgaccaagccagcactgtggccgtcaagatgctcaaagacaacgcctctgacaaggacctggccgacctggtctcggagatggaggtgatgaagctgatcggccgacacaagaacatcatcaacctgcttggtgtctgcacccaggaagggcccctgtacgtgatcgtggagtgcgccgccaagggaaacctgcgggagttcctgcgggcccggcgccccccaggccccgacctcagccccgacggtcctcggagcagtgaggggccgctctccttcccagtcctggtctcctgcgcctaccaggtggcccgaggcatgcagtatctggagtcccggaagtgtatccaccgggacctggctgcccgcaatgtgctggtgactgaggacaatgtgatgaagattgctgactttgggctggcccgcggcgtccaccacattgactactataagaaaaccagcaacggccgcctgcctgtgaagtggatggcgcccgaggccttgtttgaccgggtgtacacacaccagagtgacgtgtggtcttttgggatcctgctatgggagatcttcaccctcgggggctcccc

SEQ ID NO: 1628 - DNA, 807 bp, Artificial
  cDNA Sequence
aaactccccaccaaactcctccccacccagagaacccccggtcctccccttcctcctgaaggcctgaggctccctgtgaccctccgccccacctctcgcaggtacgggctgatgcgtgagtgctggcacgcagcgccctcccagaggcctaccttcaagcagctggtggaggcgctggacaaggtcctgctggccgtctctgaggagtacctcgacctccgcctgaccttcggaccctattccccctctggtggggacgccagcagcacctgctcctccagcgattctgtcttcagccacgaccccctgccattgggatccagctccttccccttcgggtctggggtgcagacatgagcaaggctcaaggctgtgcaggcacataggctggtggccttgggccttggggctcagccacagcctgacacagtgctcgaccttgatagcatggggcccctggcccagagttgctgtgccgtgtccaagggccgtgcccttgcccttggagctgccgtgcctgtgtcctgatggcccaaatgtcagggttctgctcggcttcttggaccttggcgcttagtccccatcccgggtttggctgagcctggctggagagctgctatgctaaacctcctgcctcccaataccagcaggaggttctgggcctctgaaccccctttccccacacctccccctgctgctgctgccccagcgtcttgacgggagcattggcccctgagcccagagaagctggaagcctgccgaaaacaggagcaaatggcgttttataaattatttttttgaaataaa

SEQ ID NO: 1629 - DNA, 484 bp, Artificial
  cDNA Sequence
gcgctggacaaggtcctgctggccgtctctgaggaggcctcaggctgggacaggactgcccaaccaggacagccttcatggaggccatcgggattgcccccgtctgcccccagggagtggtggctgaaaatgcatatgcggtcagaggggtcagacagagggattggaggctggggcctccttggaagactgagcgtcagctcatgattgtttatcctcactctgggctcctcccagctctcagcatagcctctccagctgacggtatcccacacagaactcatcttacccccagaactgtacctcctccagggcaggaaccagggagtcacctgactacttccctcaagaaccctgttccaggccaggtgcggcagctcacccctgtaatcccagcactttgggaggccgaggcgggcggatcacctgaggtcaagaattcgagaccattctggacaacatggcaaaaccctgtctctactaa

SEQ ID NO: 1630 - DNA, 496 bp, Artificial
  cDNA Sequence
ggcctcgaagaccccagcccaagcccccaggttgatgccggcccaggatggatcagacctgtgaactacccagaagaaattgtctgctgcccttttccaatccagtgaatttagatgcccctgaagacaaggacagccctttcggatgatccagattccagtaccagtacattaggaaacatgctagaattacctggaacttcatcatcatctacttcacaggaattgccattttgtcaacctaagaaaaagtctacgccactgaagtatgaagttggagatctcatctgggcaaaattcaagagacgcccatggtggccctgcaggatttgttctgatccgttgattaacacacattcaaaaatgaaagtttccaaccggaggccctatcggcagtactacgtggaggcttttggagatccttctgagagagcctgggtggctggaaaagcaatcgtcatgtttgaaggcagacatcaattcgaagagctacctg

SEQ ID NO: 1631 - DNA, 656 bp, Artificial
  cDNA Sequence
agatgcccctgaagacaaggacagccctttcggatgatccagattccagtaccagtacattaggaaacatgctagaattacctggaacttcatcatcatctacttcacaggaattgccatttagactggccttgtcatgttgcccaggctggcgtcgggactcctgggctcattcgatcctcctgcatcagctagaactacagtagtttcagattttgaagtgtgtatgtgtatgtgtgatatgtatatattccgtgtgtatagaaatggagagtatcttatttgagttgttgttttcagtaatgctgtcaagtattgttagagggtgataaatgataacatttgtttttatttgagcttatgaagaatttcttgactttctagctaaatgatcagttcacttctcttagcctcaattttattgcgtctaaattccagaagttcttgattgctataagattccttcagctttaaatattaatatttgatattgattttgtttctgcccaaacacattgtttggtcaccgccggtaatgttagcaaagagaattttttttggccaacaaatgtctcataccacattcagtttttataagaaaaacttttatggtatgttgttattctgagttcattaaacattcgctttaccttata

SEQ ID NO: 1632 - DNA, 157 bp, Artificial
  cDNA Sequence
aaacagaaagaaaaaggatataggcataaggttcctcagaaaattttgagtaaatgggaagccagtgttggacttgcagaacagtatgatgttcccaaggggtcaaagaaccgaaaatgtattcctggttcaatcaagttggacagtgaagaagata

SEQ ID NO: 1633 - DNA, 1111 bp, Artificial
  cDNA Sequence
gaaaaaggactctcttttgaaaacggaaaaggcccagagctggactctgtaatgaacagtgagaatgatgaactcaatggtgtaaatcaagtggtgcctaaaaagcggtggcagcgtttaaaccaaaggcgcactaaacctcgtaagcgcatgaacagatttaaagagaaagaaaactctgagtgtgcctttagggtcttacttcctagtgaccctgtgcaggaggggcgggatgagtttccagagcatagaactccttcagcaagcatacttgaggaaccactgacagagcaaaatcatgctgactgcttagattcagctgggccacggttaaatgtttgtgataaatccagtgccagcattggtgacatggaaaaggagccaggaattcccagtttgacaccacaggctgagctccctgaaccagctgtgcggtcagagaagaaacgccttaggaagccaagcaagtggcttttggaatatacagaagaatatgatcagatatttgctcctaagaaaaaacaaaagaaggtacaggagcaggtgcacaaggtaagttcccgctgtgaagaggaaagccttctagcccgaggtcgatctagtgctcagaacaagcaggtggacgagaattctttgatttcaaccaaagaagagcctccagttcttgaaagggaggctccgtttttggagggccccttggctcagtcagaacttggaggtggacatgctgagttgccgcagctgaccttgtctgtgcctgtggctccggaagtctctccacggcctgcccttgagtctgaggaattgctagttaaaacgccaggaaattatgaaagtaaacgtcaaagaaaaccaactaagaaacttcttgaatccaatgatttagaccctggatttatgcccaagaagggggaccttggcctttctaaaaagtgctatgaagctggtcacctggagaatggcataactgaatcttgtgccacatcttattcaaaagattttggtggaggcactaccaagatatttgacaagccaaggaagcgaaaacgacagaggcatgctgcagccaagatgcagtgtaaaaaagtgaaaaatgatgactcgtcaaaag

SEQ ID NO: 1634 - DNA, 1426 bp, Artificial
  cDNA Sequence
agaatcaacccattgccacggaagaaaagtcaaagaaattcaagaagaagcaacagggaaagcgcaggacccagggtgaaatcacaaaggagcgagaagatgagtgttttagttgtggggatgctggccagctcgtctcctgcaagaaaccaggctgcccaaaagtttaccacgcagactgtctcaatctgaccaagcgaccagcagggaaatgggaatgtccgtggcatcagtgtgacatctgcgggaaggaagcagcctccttctgtgagatgtgccccagctccttttgtaagcagcatcgagaagggatgcttttcatttccaaactggatgggcgtctgtcttgtactgagcatgacccctgtgggcccaatcctctggaacctggggagatccgtgagtatgtgcctcccccagtaccgctgcctccagggccaagcactcacctggcagagcaatcaacaggaatggctgctcaggcacccaaaatgtcagataaacctcctgctgacaccaaccagatgctgtcgctctccaaaaaagctctggcagggacttgtcagaggccactgctacctgaaagacctcttgagagaactgactccaggccccagcctttagataaggtcagagacctcgctgggtcagggaccaaatcccaatccttggtttccagccagaggccactggacaggccaccagcagtggcaggaccaagaccccagctaagcgacaaaccctctccagtgaccagcccaagctcctcaccctcagtcaggtcccaaccactggaaagacctctggggacggctgacccaaggctggataaatccataggtgctgccagcccaaggccccagtcactggagaaaacctcagttcccactggcctgagacttccgccgccagacagactgctcattactagcagtcccaaaccccagacttcagacaggcctactgacaaaccccatgcctctttgtcccagagactcccacctcctgagaaagtactatcagctgtggtccagacccttgtagctaaagaaaaagcactgaggcctgtggaccagaatactcagtcaaaaaatagagctgctttggtgatggatctcatagacctaactcctcgccagaaggagcgggcagcttcacctcatcaggtcacaccacaggctgatgagaagatgccagtgttggagtcaagttcatggcctgccagcaaaggtctggggcatatgccgagagctgttgagaaaggctgtgtgtcagatcctcttcagacatctgggaaagcagcagccccttcagaggacccctggcaagctgttaaatcactcacccaggccagacttctttctcagcctcctgccaaggcctttttatatgagccaacaactcaggcctcaggaagagcttctgc

SEQ ID NO: 1635 - DNA, 306 bp, Artificial
  cDNA Sequence
tgtgattcacagtgcactgattttatttacagatcaaaagccacttaaataatctgcagacacaagtgctgtccagggcagaagcctggggtccaaatcagccttatccctcctcatgcccacagtcagcccaatgctgtctccgttccatgggccagcacaggcaggcgccactctgctgacatgaggacctggggtagctcagacatttgactacccaagcccagaaaggagctgggtccagcccttacggggaattcctttaattcccccaggccagtgacccagccctctgtgccctattca

SEQ ID NO: 1636 - DNA, 1242 bp, Artificial
  cDNA Sequence
ctgcgccggaagtggcgcgcggccggacaactcatggcggcggcggcggcggcggcagctgcttgggcgcggtgcggtggtgactgagctacgagcctggcggcgggtgtgcgccgagccccggcccggcccggccctcgcgtgcctcccaggctccgcacccctgatgctgcgcgggtgctgagcccgcttcggccgggacgatggtgaagtatttcctgggccagagcgtgctccggagttcctgggaccaagtgttcgccgccttctggcagcggtacccgaatccctatagcaaacatgtcttgacggaagacatagtacaccgggaggtgacccctgaccagaaactgctgtcccggcgactcctgaccaagaccaacaggatgccacgctgggccgagcgactatttcctgccaatgttgctcactcggtgtacgtcctggaggactctattgtggacccacagaatcagaccatgactaccttcacctggaacatcaaccacgcccggctgatggtggtggaggaacgatgtgtttactgtgtgaactctgacaacagtggctggactgaaatccgccgggaagcctgggtctcctctagcttatttggtgtctccagagctgtccaggaatttggtcttgcccggttcaaaagcaacgtgaccaagactatgaagggttttgaatatatcttggctaagctgcaaggcgaggccccttccaaaacacttgttgagacagccaaggaagccaaggagaaggcaaaggagacggcactggcagctacagagaaggccaaggacctcgccagcaaggcggccaccaagaagcagcagcagcagcaacagtttgtgtagccagtctaccaccaccacagcaccccagacagctaggcttagcccctctgccctcccttcattgtactttatcattaaaaatcaacttccagccctgtctgctgtctacgtggtgggttgtggggatgcagtttggcatctgcagtacaccaagcacatgattcatgtctgagccaggtctgcttattctcccattgggcagctgaggaccgaggcacagaggtgcggtgacttgcccggggctccaggtagcctgcaggttaactggcggtaagtgctagactgtaagcccgacaagggcagggcttttggttttgttctctgatgtgtctcagtatctagcacataatagacactcaataaatacttgttgaattca

SEQ ID NO: 1637 - DNA, 719 bp, Artificial
  cDNA Sequence
ctgcgccggaagtggcgcgcggccggacaactcatggcggcggcggcggcggcggcagctgcttgggcgcggtgcggtggtgactgagctacgagcctggcggcgggtgtgcgccgagccccggcccggcccggccctcgcgtgcctcccaggctccgcacccctgatgctgcgcgggtgctgagcccgcttcggccgggacgatggtgaagtatttcctgggccagagcgtgctccggagttcctgggaccaagtgttcgccgccttctggcagcggtacccgaatccctatagcaaacatgtcttgacggaagacatagtacaccgggaggtgacccctgaccagaaactgctgtcccggcgactcctgaccaagaccaacaggatgccacgctgggccgagcgactatttcctgccaatgttgctcactcggtgtacgtcctggaggactctattgtggacccacagaatcagaccatgactaccttcacctggaacatcaaccacgcccggctgatggtggtggaggaacgatgtgtttactgtgtgaactctgacaacagtggctggactgaaatccgccgggaagcctgggtctcctctagcttatttggtgtctccagagctgtccaggaatttggtcttgcccggttcaaaagcaacgtgaccaagactatgaagggttttgaatatatcttggctaagctgcaaggtgag

SEQ ID NO: 1638 - DNA, 1543 bp, Artificial
  cDNA Sequence
caccgtgcaagctctggccggcgctgcccacagtccccatggtgggcagcccccgcggcggggacccctgatcggcagcggcatgccagggaagcccaagcacctgggcgtccccaacgggcgcatggttctggctgtgtcagatggagagctgagcagcacgacggggccccagggccagggcgagggccgcggcagctctctcagcatccacagcctccccagtggtcccagcagccccttcccaaccgaggagcagcctgtggccagctgggccctgtccttcgagcggctgttgcaggacccgctgggcctggcttacttcactgagttcctgaagaaggagttcagcgcggaaaacgtgactttctggaaggcctgcgagcgcttccagcagatcccggccagcgatacccagcagctagctcaggaggcccgcaacatctaccaggagttcctgtccagccaggcgctgagcccagtgaacatcgaccgtcaggcctggcttggcgaggaggtgctggccgagccccggccggacatgtttcgggcacagcagcttcagatcttcaacttgatgaagttcgacagctatgcgcgcttcgtcaagtccccgctgtaccgcgagtgcctgctagccgaagccgagggacgccctctgcgggaacctggctcctcgcgcctcggcagccctgacgccacgaggaaggtgcgtgggactgggcgagggactgggcgaggcagggggtcctgcggaccgcgtgcaagaggggacgcctccgggtgcagatctgcgagtctgtgcccacggtctgcatgcgggctggggcccagcccggtgccagcgcctcccctgtacccacagaagccgaagctgaagcccgggaagtcgctgccgctgggtgtggaggagttggggcagctgccacccgttgagggtcctgggggccgccctctccgcaagtccttccgccgggagctgggcgggactgcaaacgccgccttgcgccgagagtctcagggctccctcaactcctccgccagcctggaccttggcttcctagccttcgtcagcagcaaatctgagagccaccggaagagccttgggagcacggagggtgaaagtgaaagccggccagggaagtactgctgtgtgtacctgcccgatggcacagcctccttggccctggccagacctggcctcaccatccgagacatgctggcagggatctgtgagaaacgaggcctctctctacctgacatcaaggtctacctggtgggcaatgaacagaaggccctggtcctggatcaggactgcaccgtgctggcggatcaggaagtgcggctggaaaacaggatcaccttcgagctggagctgacggcgctggagcgcgtggtacgaatctcagccaagcccaccaagcggctgcaggaggcgctgcagcccattctggagaagcacggcttgagcccgctagaggtggtgctgcaccggccaggcgagaaacagcctctggatctggggaagctagtgagctcggtg

SEQ ID NO: 1639 - DNA, 642 bp, Artificial
  cDNA Sequence
gacccggcctgggtgcaggcagcccagcgcccccaccccagccccggctcacctgttccggggtcgccccgcagatcttcaacttgatgaagttcgacagctatgcgcgcttcgtcaagtccccgctgtaccgcgagtgcctgctagccgaagccgagggacgccctctgcgggaacctggctcctcgcgcctcggcagccctgacgccacgaggaagaagccgaagctgaagcccgggaagtcgctgccgctgggtgtggaggagttggggcagctgccacccgttgagggtcctgggggccgccctctccgcaagtccttccgccgggagctgggcgggactgcaaacgccgccttgcgccgagagtctcagggctccctcaactcctccgccagcctggaccttggcttcctagccttcgtcagcagcaaatctgagagccaccggaagagccttgggagcacggagggtgaaagtgaaagccggccagggaagtactgctgtgtgtacctgcccgatggcacagcctccttggccctggccagacctggcctcaccatccgagacatgctggcagggatctgtgagaaacgaggcctctctctacctgacatcaaggtctacctggtgggcaatgaac

SEQ ID NO: 1640 - DNA, 818 bp, Artificial
  cDNA Sequence
ggccacccatccccctccagcgtcccccagttctctggtgaaggtgcccagtagtgccactggaaagcggcagacctgtgacatcgaaggcctggtggagctgctgaaccgggtgcagagcagcggggcccacgaccagaggggccttctgaggaaagaggacctggtacttccagaatttctgcagctgcccgcccaagggcccagctccgaggagaccccaccacagaccaaatcagcagcccagcccatcgggggatccttgaactccaccaccgactcagccctctgacagctacccaacagtccaggacagctgcatggcacccggcgggccgagcatgccatgggtccgctctgcatgccctgtctgtgccatgagtgtccctggccccttcctgccatgggcaggcccgcaggaagagccggtaggggtggaaaggggactcagatgagacacaccccacagctgccaccgccttgtccctcaacaagctcacccccaatcccttgcagccaggccacaatgggggaggtgagtccagccccttggaacaggcttgcccaacatggagggatggcgttggcagtgccagcctccccagcctgtgccaagcttcaacaggggcaagaggaggggccggcccctcctcaggaagctggtatgagtaaggccttgagggtgcaggcaggcagccctgtaccccacccacatagactatactgtacatacagattttgcagtaggcttggggcagctgggtttgtccttgatgtatgatactgttattataataattattattattctgccatga

SEQ ID NO: 1641 - DNA, 562 bp, Artificial
  cDNA Sequence
cttcattgagctgctgagcagaagctgaaacacagaattctaagcgttgctgagacccactgacctgcagacctcatagtgggtgcccaggatgttgtcctacggagagaggctggggtcccctgctgtctccccactcccagtccgtggggggcatgtgatgcgagggacggcctttgcctacgtgcccagccctcaggtcctacacaggatcccggggacctctgcctatgccttccccagcctgggccctgtggcccttgctgagcacacctgcccctgtggggaggtcctggagcgccatgaaccactgcctgccaagctggccctggaggaggagcagaagccagagtccaggctggtccccaagctgcgccaggctggcgccatgctgctcaaggtgccactgatgctcaccttcctctacctcttcgtctgctccctggacatgctcagctcggccttccagctggctggagggaaggtggctggtgacatcttcaaggataacgccatcctgtccaacccggtggccgggctggtggtggggatcctggtgacc

SEQ ID NO: 1642 - DNA, 525 bp, Artificial
  cDNA Sequence
gtgatcagcattgagagggcctacccgctcacactgggttccaacatcggcaccaccaccacggccatcctggctgccctggccagccccagggagaagctgtccagcgctttccagattgccctctgtcacttcttcttcaacatctcgggtatccttctgtggtacccggtgccctgcacacgcctgcccatccgcatggccaaggcgctggggaaacgcacggccaagtaccgctggtttgccgtcctctatctccttgtctgcttcctgctgctgccctcactggtgtttggcatctccatggcaggctggcaggtcatggtaggtgtgggtacgcccttcggggccctgctggccttcgtggtgctcatcaatgtcctgcagagtcggagtcccgggcacctgcccaagtggttacagacatgggacttcctgcctcgctggatgcactccctgaagcccctggaccacctcatcacccgcgccaccctatgctgtgccaggcctgagccccgctcaccc

SEQ ID NO: 1643 - DNA, 746 bp, Artificial
  cDNA Sequence
gggacctgaagcccgagaacatcttgctggatgaccacggccacatccgcatctctgacctgggactagctgtgcatgtgcccgagggccagaccatcaaagggcgtgtgggcaccgtgggttacatgggtgagtggtgaaaaatgaacggtacacgttcagccctgactggtgggcgctcggctgcctcctgtacgagatgatcgcaggccagtcgcccttccagcagaggaagaagaagatcaagcgggaggaggtggagcggctggtgaaggaggtccccgaggagtattccgagcgcttttccccgcaggcccgctcactttgctcacagctcctctgcaaggaccctgccgaacgcctggggtgtcgtgggggcagtgcccgcgaggtgaaggagcaccccctctttaagaagctgaacttcaagcggctgggagctggcatgctggagccgcccttcaagcctgacccccaggccatttactgcaaggatgttctggacattgaacagttctctacggtcaagggcgtggagctggagcctaccgaccaggacttctaccagaagtttgccacaggcagtgtgcccatcccctggcagaacgagatggtggagaccgagtgcttccaagagctgaatgtctttgggctggatggctcagttcccccagacctggactggaagggccagccacctgcacctcctaaaaagggactgctgcagagactcttcagtcgccaag

SEQ ID NO: 1644 - DNA, 631 bp, Artificial
  cDNA Sequence
gggacctgaagcccgagaacatcttgctggatgaccacggccacatccgcatctctgacctgggactagctgtgcatgtgcccgagggccagaccatcaaagggcgtgtgggcaccgtgggttacatggctccggaggtggtgaaaaatgaacggtacacgttcagccctgactggtgggcgctcggctgcctcctgtacgagatgatcgcaggccagtcgcccttccagcagaggaagaagaagatcaagcgggaggaggtggagcggctggtgaaggaggtccccgaggagtattccgagcgcttttccccgcaggcccgctcactttgctcacagctcctctgcaaggaccctgccgaacgcctggggtgtcgtgggggcagtgcccgcgaggtgaaggagcaccccctctttaagaagctgaacttcaagcggctgggagctggcatgctggagccgcccttcaagcctgacgtgagtgcagcccactcctgctgagggcggggcccagccagggctggggctcaggggctcttgtagtatcagccaggatgcttccagtgcaagtggcagaaaaaacaatctagtggcttagccacagaaataaagataattcacaaaaaggaaaa

SEQ ID NO: 1645 - DNA, 758 bp, Artificial
  cDNA Sequence
gccggggaggccggggaggccgcggcgcggtcactgcgagccgagccgagccgcgccgagccgcgccgatcgccatccggcctcggcactcgcgcgcgatcccggccggcggcgcggcccggcgggccaggcggcgccacagcccatggagctcgagaacatcgtagcgaacacggtgctactcaaggcccgggaaggtggcggtggaaatcgcaaaggcaaaagcaagaaatggcggcagatgctccagttccctcacatcagccagtgcgaagagctgcggctcagcctcgagcgtgactatcacagcctgtgcgagcggcagcccattgggcgcctgctgttccgagagttctgtgccacgaggccggagctgagccgctgcgtcgccttcctggatggggtggccgagtatgaagtgaccccggatgacaagcggaaggcatgtgggcggcagctaacgcagaattttctgagccacacgggtcctgacctcatccctgaggtcccccggcagctggtgacgaactgcacccagcggctggagcagggtccctgcaaagaccttttccaggaactcacccggctgacccacgagtacctgagcgtggccccttttgccgactacctcgacagcatctacttcaaccgtttcctgcagtggaagtggctggaaaggcagccagtgaccaaaaacaccttcaggcaataccgagtcctgggcaaaggtggctttggggaggtgagtggccaggcca

SEQ ID NO: 1646 - DNA, 2694 bp, Artificial
  cDNA Sequence
ggaggccgcggcgcggtcactgcgagccgagccgagccgcgccgagccgcgccgatcgccatccggcctcggcactcgcgcgcgatcccggccggcggcgcggcccggcgggccaggcggcgccacagcccatggagctcgagaacatcgtagcgaacacggtgctactcaaggcccgggaaggtggcggtggaaatcgcaaaggcaaaagcaagaaatggcggcagatgctccagttccctcacatcagccagtgcgaagagctgcggctcagcctcgagcgtgactatcacagcctgtgcgagcggcagcccattgggcgcctgctgttccgagagttctgtgccacgaggccggagctgagccgctgcgtcgccttcctggatggggtggccgagtatgaagtgaccccggatgacaagcggaaggcatgtgggcggcagctaacgcagaattttctgagccacacgggtcctgacctcatccctgaggtcccccggcagctggtgacgaactgcacccagcggctggagcagggtccctgcaaagaccttttccaggaactcacccggctgacccacgagtacctgagcgtggccccttttgccgactacctcgacagcatctacttcaaccgtttcctgcagtggaagtggctggaaaggcagccagtgaccaaaaacaccttcaggcaataccgagtcctgggcaaaggtggctttggggaggtgtgcgcctgccaggtgcgggccacaggtaagatgtatgcctgcaagaagctagagaaaaagcggatcaagaagcggaaaggggaggccatggcgctgaacgagaagcagatcctggagaaagtgaacagtaggtttgtagtgagcttggcctacgcctatgagaccaaggacgcgctgtgcctggtgctgacactgatgaacgggggcgacctcaagttccacatctaccacatgggccaggctggcttccccgaagcgcgggccgtcttctacgccgccgagatctgctgtggcctggaggacctgcaccgggagcgcatcgtgtacagggacctgaagcccgagaacatcttgctggatgaccacggccacatccgcatctctgacctgggactagctgtgcatgtgcccgagggccagaccatcaaagggcgtgtgggcaccgtgggttacatggctccggaggtggtgaaaaatgaacggtacacgttcagccctgactggtgggcgctcggctgcctcctgtacgagatgatcgcaggccagtcgcccttccagcagaggaagaagaagatcaagcgggaggaggtggagcggctggtgaaggaggtccccgaggagtattccgagcgcttttccccgcaggcccgctcactttgctcacagctcctctgcaaggaccctgccgaacgcctggggtgtcgtgggggcagtgcccgcgaggtgaaggagcaccccctctttaagaagctgaacttcaagcggctgggagctggcatgctggagccgcccttcaagcctgacccccaggccatttactgcaaggatgttctggacattgaacagttctctacggtcaagggcgtggagctggagcctaccgaccaggacttctaccagaagtttgccacaggcagtgtgcccatcccctggcagaacgagatggtggagaccgagtgcttccaagagctgaatgtctttgggctggatggctcagttcccccagacctggactggaagggccagccacctgcacctcctaaaaagggactgctgcagagactcttcagtcgccaagattgctgtggaaactgcagcgacagcgaggaagagctccccacccgcctctagcccccagcccgaggcccccaccagcagttggcggtagcagctactccgagcgccgtttacagttttgcacagtgatcttccccattgtccactcaagtcgtggcctggggaacacagacggagctgtccccagtgtcctccgtccctcagcccctggcctggctgagtttggcagggcctgggccatccctgggacaaaggtgcgtcccttcagctcttctccgtggagctcggggctttctgtatttatgtatttgtacgaatgtatatagcgaccagagcattcttaattcccgccgcagacctggcgcccccgccttggctcctgggggcagccagccctggctgggagagcgggagctggcagaggagccactgccaaactcaaggctcctctggcccagcttggatggctgagggtggtcacacccctgagccttcagcactgtgctggccaccccggcctctgagtaagactcgtgcctccccctgctgccctgggctcaggctgctaccctctggggcccaaagctgtcccttctcagtgcttgtcagcgctgggtctggggcctctgtatgccctaggcctgtgccaaagtggccagagattgggctgcctgtgatacccatcagcccactgccccggccggcccagataggtctgcctctgccttccagctcccacagcctggtccctgatactgggctctgtcctgcagacacctctttcagaaacgcccaagcccagcccctaggagggggtggggcatccctggtcaaccctcaaacattccggactcccctcataacaatagacacatgtgcccagcaa

SEQ ID NO: 1647 - DNA, 1809 bp, Artificial
  cDNA Sequence
ggaggccgcggcgcggtcactgcgagccgagccgagccgcgccgagccgcgccgatcgccatccggcctcggcactcgcgcgcgatcccggccggcggcgcggcccggcgggccaggcggcgccacagcccatggagctcgagaacatcgtagcgaacacggtgctactcaaggcccgggaaggtggcggtggaaatcgcaaaggcaaaagcaagaaatggcggcagatgctccagttccctcacatcagccagtgcgaagagctgcggctcagcctcgagcgtgactatcacagcctgtgcgagcggcagcccattgggcgcctgctgttccgagagttctgtgccacgaggccggagctgagccgctgcgtcgccttcctggatggggtggccgagtatgaagtgaccccggatgacaagcggaaggcatgtgggcggcagctaacgcagaattttctgagccacacgggtcctgacctcatccctgaggtcccccggcagctggtgacgaactgcacccagcggctggagcagggtccctgcaaagaccttttccaggaactcacccggctgacccacgagtacctgagcgtggccccttttgccgactacctcgacagcatctacttcaaccgtttcctgcagtggaagtggctggaaaggcagccagtgaccaaaaacaccttcaggcaataccgagtcctgggcaaaggtggctttggggaggtgtgcgcctgccaggtgcgggccacaggtaagatgtatgcctgcaagaagctagagaaaaagcggatcaagaagcggaaaggggaggccatggcgctgaacgagaagcagatcctggagaaagtgaacagtaggtttgtagtgagcttggcctacgcctatgagaccaaggacgcgctgtgcctggtgctgacactgatgaacgggggcgacctcaagttccacatctaccacatgggccaggctggcttccccgaagcgcgggccgtcttctacgccgccgagatctgctgtggcctggaggacctgcaccgggagcgcatcgtgtacagggacctgaagcccgagaacatcttgctggatgaccacggccacatccgcatctctgacctgggactagctgtgcatgtgcccgagggccagaccatcaaagggcgtgtgggcaccgtgggttacatggctccggaggtggtgaaaaatgaacggtacacgttcagccctgactggtgggcgctcggctgcctcctgtacgagatgatcgcaggccagtcgcccttccagcagaggaagaagaagatcaagcgggaggaggtggagcggctggtgaaggaggtccccgaggagtattccgagcgcttttccccgcaggcccgctcactttgctcacagctcctctgcaaggaccctgccgaacgcctggggtgtcgtgggggcagtgcccgcgaggtgaaggagcaccccctctttaagaagctgaacttcaagcggctgggagctggcatgctggagccgcccttcaagcctgacccccaggccatttactgcaaggatgttctggacattgaacagttctctacggtcaagggcgtggagctggagcctaccgaccaggacttctaccagaagtttgccacaggcagtgtgcccatcccctggcagaacgagatggtggagaccgagtgcttccaagagctgaatgtctttgggctggatggctcagttcccccagacctggactggaagggccagccacctgcacctcctaaaaagggactgctgcagagactcttcagtcgccaag

SEQ ID NO: 1648 - DNA, 1809 bp, Artificial; identical to SEQ ID NO: 1647
  cDNA Sequence

SEQ ID NO: 1649 - DNA, 1690 bp, Artificial
  cDNA Sequence
ggaggccgcggcgcggtcactgcgagccgagccgagccgcgccgagccgcgccgatcgccatccggcctcggcactcgcgcgcgatcccggccggcggcgcggcccggcgggccaggcggcgccacagcccatggagctcgagaacatcgtagcgaacacggtgctactcaaggcccgggaaggtggcggtggaaatcgcaaaggcaaaagcaagaaatggcggcagatgctccagttccctcacatcagccagtgcgaagagctgcggctcagcctcgagcgtgactatcacagcctgtgcgagcggcagcccattgggcgcctgctgttccgagagttctgtgccacgaggccggagctgagccgctgcgtcgccttcctggatggggtggccgagtatgaagtgaccccggatgacaagcggaaggcatgtgggcggcagctaacgcagaattttctgagccacacgggtcctgacctcatccctgaggtcccccggcagctggtgacgaactgcacccagcggctggagcagggtccctgcaaagaccttttccaggaactcacccggctgacccacgagtacctgagcgtggccccttttgccgactacctcgacagcatctacttcaaccgtttcctgcagtggaagtggctggaaaggcagccagtgaccaaaaacaccttcaggcaataccgagtcctgggcaaaggtggctttggggaggtgtgcgcctgccaggtgcgggccacaggtaagatgtatgcctgcaagaagctagagaaaaagcggatcaagaagcggaaaggggaggccatggcgctgaacgagaagcagatcctggagaaagtgaacagtaggtttgtagtgagcttggcctacgcctatgagaccaaggacgcgctgtgcctggtgctgacactgatgaacgggggcgacctcaagttccacatctaccacatgggccaggctggcttccccgaagcgcgggccgtcttctacgccgccgagatctgctgtggcctggaggacctgcaccgggagcgcatcgtgtacagggacctgaagcccgagaacatcttgctggatgaccacggccacatccgcatctctgacctgggactagctgtgcatgtgcccgagggccagaccatcaaagggcgtgtgggcaccgtgggttacatggctccggaggtggtgaaaaatgaacggtacacgttcagccctgactggtgggcgctcggctgcctcctgtacgagatgatcgcaggccagtcgcccttccagcagaggaagaagaagatcaagcgggaggaggtggagcggctggtgaaggaggtccccgaggagtattccgagcgcttttccccgcaggcccgctcactttgctcacagctcctctgcaaggaccctgccgaacgcctggggtgtcgtgggggcagtgcccgcgaggtgaaggagcaccccctctttaagaagctgaacttcaagcggctgggagctggcatgctggagccgcccttcaagcctgacgtgagtgcagcccactcctgctgagggcggggcccagccagggctggggctcaggggctcttgtagtatcagccaggatgcttccagtgcaagtggcagaaaaaacaatctagtggcttagccacagaaataaagataattcacaaaaaggaaaa

SEQ ID NO: 1650 - DNA, 1061 bp, Artificial
  cDNA Sequence
ggaggccgcggcgcggtcactgcgagccgagccgagccgcgccgagccgcgccgatcgccatccggcctcggcactcgcgcgcgatcccggccggcggcgcggcccggcgggccaggcggcgccacagcccatggagctcgagaacatcgtagcgaacacggtgctactcaaggcccgggaaggtggcggtggaaatcgcaaaggcaaaagcaagaaatggcggcagatgctccagttccctcacatcagccagtgcgaagagctgcggctcagcctcgagcgtgactatcacagcctgtgcgagcggcagcccattgggcgcctgctgttccgagagttctgtgccacgaggccggagctgagccgctgcgtcgccttcctggatggggtggccgagtatgaagtgaccccggatgacaagcggaaggcatgtgggcggcagctaacgcagaattttctgagccacacgggtcctgacctcatccctgaggtcccccggcagctggtgacgaactgcacccagcggctggagcagggtccctgcaaagaccttttccaggaactcacccggctgacccacgagtacctgagcgtggccccttttgccgactacctcgacagcatctacttcaaccgtttcctgcagtggaagtggctggaaaggcagccagtgaccaaaaacaccttcaggcaataccgagtcctgggcaaaggtggctttggggaggtgtgcgcctgccaggtgcgggccacaggtaagatgtatgcctgcaagaagctagagaaaaagcggatcaagaagcggaaaggggaggccatggcgctgaacgagaagcagatcctggagaaagtgaacagtaggtttgtagtgagcttggcctacgcctatgagaccaaggacgcgctgtgcctggtgctgacactgatgaacgggggcgacctcaagttccacatctaccacatgggccaggctggcttccccgaagcgcgggccgtcttctacgccgccgagatctgctgtggcctggaggacctgcaccgggagcgcatcgtgtacagg

SEQ ID NO: 1651 - DNA, 2131 bp, Artificial
  cDNA Sequence
ctcaacaggctgacccacgagtacctgagcgtggccccttttgccgactacctcgacagcatctacttcaaccgtttcctgcagtggaagtggctggaaaggcagccagtgaccaaaaacaccttcaggcaataccgagtcctgggcaaaggtggctttggggaggtgtgcgcctgccaggtgcgggccacaggtaagatgtatgcctgcaagaagctagagaaaaagcggatcaagaagcggaaaggggaggccatggcgctgaacgagaagcagatcctggagaaagtgaacagtaggtttgtagtgagcttggcctacgcctatgagaccaaggacgcgctgtgcctggtgctgacactgatgaacgggggcgacctcaagttccacatctaccacatgggccaggctggcttccccgaagcgcgggccgtcttctacgccgccgagatctgctgtggcctggaggacctgcaccgggagcgcatcgtgtacagggacctgaagcccgagaacatcttgctggatgaccacggccacatccgcatctctgacctgggactagctgtgcatgtgcccgagggccagaccatcaaagggcgtgtgggcaccgtgggttacatggctccggaggtggtgaaaaatgaacggtacacgttcagccctgactggtgggcgctcggctgcctcctgtacgagatgatcgcaggccagtcgcccttccagcagaggaagaagaagatcaagcgggaggaggtggagcggctggtgaaggaggtccccgaggagtattccgagcgcttttccccgcaggcccgctcactttgctcacagctcctctgcaaggaccctgccgaacgcctggggtgtcgtgggggcagtgcccgcgaggtgaaggagcaccccctctttaagaagctgaacttcaagcggctgggagctggcatgctggagccgcccttcaagcctgacccccaggccatttactgcaaggatgttctggacattgaacagttctctacggtcaagggcgtggagctggagcctaccgaccaggacttctaccagaagtttgccacaggcagtgtgcccatcccctggcagaacgagatggtggagaccgagtgcttccaagagctgaatgtctttgggctggatggctcagttcccccagacctggactggaagggccagccacctgcacctcctaaaaagggactgctgcagagactcttcagtcgccaagattgctgtggaaactgcagcgacagcgaggaagagctccccacccgcctctagcccccagcccgaggcccccaccagcagttggcggtagcagctactccgagcgccgtttacagttttgcacagtgatcttccccattgtccactcaagtcgtggcctggggaacacagacggagctgtccccagtgtcctccgtccctcagcccctggcctggctgagtttggcagggcctgggccatccctgggacaaaggtgcgtcccttcagctcttctccgtggagctcggggctttctgtatttatgtatttgtacgaatgtatatagcgaccagagcattcttaattcccgccgcagacctggcgcccccgccttggctcctgggggcagccagccctggctgggagagcgggagctggcagaggagccactgccaaactcaaggctcctctggcccagcttggatggctgagggtggtcacacccctgagccttcagcactgtgctggccaccccggcctctgagtaagactcgtgcctccccctgctgccctgggctcaggctgctaccctctggggcccaaagctgtcccttctcagtgcttgtcagcgctgggtctggggcctctgtatgccctaggcctgtgccaaagtggccagagattgggctgcctgtgatacccatcagcccactgccccggccggcccagataggtctgcctctgccttccagctcccacagcctggtccctgatactgggctctgtcctgcagacacctctttcagaaacgcccaagcccagcccctaggagggggtggggcatccctggtcaaccctcaaacattccggactcccctcataacaatagacacatgtgcccagcaa

SEQ ID NO: 1652 - DNA, 1246 bp, Artificial
  cDNA Sequence
ctcaacaggctgacccacgagtacctgagcgtggccccttttgccgactacctcgacagcatctacttcaaccgtttcctgcagtggaagtggctggaaaggcagccagtgaccaaaaacaccttcaggcaataccgagtcctgggcaaaggtggctttggggaggtgtgcgcctgccaggtgcgggccacaggtaagatgtatgcctgcaagaagctagagaaaaagcggatcaagaagcggaaaggggaggccatggcgctgaacgagaagcagatcctggagaaagtgaacagtaggtttgtagtgagcttggcctacgcctatgagaccaaggacgcgctgtgcctggtgctgacactgatgaacgggggcgacctcaagttccacatctaccacatgggccaggctggcttccccgaagcgcgggccgtcttctacgccgccgagatctgctgtggcctggaggacctgcaccgggagcgcatcgtgtacagggacctgaagcccgagaacatcttgctggatgaccacggccacatccgcatctctgacctgggactagctgtgcatgtgcccgagggccagaccatcaaagggcgtgtgggcaccgtgggttacatggctccggaggtggtgaaaaatgaacggtacacgttcagccctgactggtgggcgctcggctgcctcctgtacgagatgatcgcaggccagtcgcccttccagcagaggaagaagaagatcaagcgggaggaggtggagcggctggtgaaggaggtccccgaggagtattccgagcgcttttccccgcaggcccgctcactttgctcacagctcctctgcaaggaccctgccgaacgcctggggtgtcgtgggggcagtgcccgcgaggtgaaggagcaccccctctttaagaagctgaacttcaagcggctgggagctggcatgctggagccgcccttcaagcctgacccccaggccatttactgcaaggatgttctggacattgaacagttctctacggtcaagggcgtggagctggagcctaccgaccaggacttctaccagaagtttgccacaggcagtgtgcccatcccctggcagaacgagatggtggagaccgagtgcttccaagagctgaatgtctttgggctggatggctcagttcccccagacctggactggaagggccagccacctgcacctcctaaaaagggactgctgcagagactcttcagtcgccaag

SEQ ID NO: 1653 - DNA, 1246 bp, Artificial; identical to SEQ ID NO: 1652
  cDNA Sequence

SEQ ID NO: 1654 - DNA, 1127 bp, Artificial
  cDNA Sequence
ctcaacaggctgacccacgagtacctgagcgtggccccttttgccgactacctcgacagcatctacttcaaccgtttcctgcagtggaagtggctggaaaggcagccagtgaccaaaaacaccttcaggcaataccgagtcctgggcaaaggtggctttggggaggtgtgcgcctgccaggtgcgggccacaggtaagatgtatgcctgcaagaagctagagaaaaagcggatcaagaagcggaaaggggaggccatggcgctgaacgagaagcagatcctggagaaagtgaacagtaggtttgtagtgagcttggcctacgcctatgagaccaaggacgcgctgtgcctggtgctgacactgatgaacgggggcgacctcaagttccacatctaccacatgggccaggctggcttccccgaagcgcgggccgtcttctacgccgccgagatctgctgtggcctggaggacctgcaccgggagcgcatcgtgtacagggacctgaagcccgagaacatcttgctggatgaccacggccacatccgcatctctgacctgggactagctgtgcatgtgcccgagggccagaccatcaaagggcgtgtgggcaccgtgggttacatggctccggaggtggtgaaaaatgaacggtacacgttcagccctgactggtgggcgctcggctgcctcctgtacgagatgatcgcaggccagtcgcccttccagcagaggaagaagaagatcaagcgggaggaggtggagcggctggtgaaggaggtccccgaggagtattccgagcgcttttccccgcaggcccgctcactttgctcacagctcctctgcaaggaccctgccgaacgcctggggtgtcgtgggggcagtgcccgcgaggtgaaggagcaccccctctttaagaagctgaacttcaagcggctgggagctggcatgctggagccgcccttcaagcctgacgtgagtgcagcccactcctgctgagggcggggcccagccagggctggggctcaggggctcttgtagtatcagccaggatgcttccagtgcaagtggcagaaaaaacaatctagtggcttagccacagaaataaagataattcacaaaaaggaaaa

SEQ ID NO: 1655 - DNA, 498 bp, Artificial
  cDNA Sequence
ctcaacaggctgacccacgagtacctgagcgtggccccttttgccgactacctcgacagcatctacttcaaccgtttcctgcagtggaagtggctggaaaggcagccagtgaccaaaaacaccttcaggcaataccgagtcctgggcaaaggtggctttggggaggtgtgcgcctgccaggtgcgggccacaggtaagatgtatgcctgcaagaagctagagaaaaagcggatcaagaagcggaaaggggaggccatggcgctgaacgagaagcagatcctggagaaagtgaacagtaggtttgtagtgagcttggcctacgcctatgagaccaaggacgcgctgtgcctggtgctgacactgatgaacgggggcgacctcaagttccacatctaccacatgggccaggctggcttccccgaagcgcgggccgtcttctacgccgccgagatctgctgtggcctggaggacctgcaccgggagcgcatcgtgtacagg

SEQ ID NO: 1656 - DNA, 1631 bp, Artificial
  cDNA Sequence
gggacctgaagcccgagaacatcttgctggatgaccacggccacatccgcatctctgacctgggactagctgtgcatgtgcccgagggccagaccatcaaagggcgtgtgggcaccgtgggttacatgggtgagtggtgaaaaatgaacggtacacgttcagccctgactggtgggcgctcggctgcctcctgtacgagatgatcgcaggccagtcgcccttccagcagaggaagaagaagatcaagcgggaggaggtggagcggctggtgaaggaggtccccgaggagtattccgagcgcttttccccgcaggcccgctcactttgctcacagctcctctgcaaggaccctgccgaacgcctggggtgtcgtgggggcagtgcccgcgaggtgaaggagcaccccctctttaagaagctgaacttcaagcggctgggagctggcatgctggagccgcccttcaagcctgacccccaggccatttactgcaaggatgttctggacattgaacagttctctacggtcaagggcgtggagctggagcctaccgaccaggacttctaccagaagtttgccacaggcagtgtgcccatcccctggcagaacgagatggtggagaccgagtgcttccaagagctgaatgtctttgggctggatggctcagttcccccagacctggactggaagggccagccacctgcacctcctaaaaagggactgctgcagagactcttcagtcgccaagattgctgtggaaactgcagcgacagcgaggaagagctccccacccgcctctagcccccagcccgaggcccccaccagcagttggcggtagcagctactccgagcgccgtttacagttttgcacagtgatcttccccattgtccactcaagtcgtggcctggggaacacagacggagctgtccccagtgtcctccgtccctcagcccctggcctggctgagtttggcagggcctgggccatccctgggacaaaggtgcgtcccttcagctcttctccgtggagctcggggctttctgtatttatgtatttgtacgaatgtatatagcgaccagagcattcttaattcccgccgcagacctggcgcccccgccttggctcctgggggcagccagccctggctgggagagcgggagctggcagaggagccactgccaaactcaaggctcctctggcccagcttggatggctgagggtggtcacacccctgagccttcagcactgtgctggccaccccggcctctgagtaagactcgtgcctccccctgctgccctgggctcaggctgctaccctctggggcccaaagctgtcccttctcagtgcttgtcagcgctgggtctggggcctctgtatgccctaggcctgtgccaaagtggccagagattgggctgcctgtgatacccatcagcccactgccccggccggcccagataggtctgcctctgccttccagctcccacagcctggtccctgatactgggctctgtcctgcagacacctctttcagaaacgcccaagcccagcccctaggagggggtggggcatccctggtcaaccctcaaacattccggactcccctcataacaatagacacatgtgcccagcaa

SEQ ID NO: 1657 - DNA, 1249 bp, Artificial
  cDNA Sequence
cgaggaggatgcctgggcccgtcccgcgcggccccgggtgaggcacgcccgcgcgcccgccggcgccatgggaaggagcgggcgccgctgctgtcccccgccggcgcgcgcacgacttgagacctgccacgggcagcccccggccgcgggtccccgagtgacgctggcggcacctgagagtgtggcgcgggcccggggccacgcagcggagcccagtgtccagtgaagcgtctgaggacccgccgcccgtgccgccgccatggtgatgtcccagggcacctacacgttcctcacgtgcttcgccggcttctggctcatctggggtctcatcgtcctgctctgctgcttctgcagcttcctgcgccgccgcctcaaacggcgccaggaggagcgactgcgcgagcagaacctgcgcgccctagagctggagcccctcgaactcgagggcagtctggccgggagccccccgggcctggcgccgccgcagccaccaccacaccgtagccgcctggaggcgccggctcacgcgcactcgcatccgcacgtgcacgtgcacccgctgctgcaccacgggcccgcgcagccgcacgcgcacgcgcacccacacccgcaccaccacgcgctcccgcacccgccgcctacgcacctgtcggtgccgccacggccctggagctacccgcgccaagcggaatcggacatgtccaaaccaccgtgttacgaagaggcggtgctgatggcagagccgccgccgccctatagcgaggtgctcacggacacgcgcggcctctaccgcaagatcgtcacgcccttcctgagtcgccgcgacagcgcggagaagcaggagcagccgcctcccagctacaagccgctcttcctggaccggggctacacctcggcgctgcacctgcccagcgcccctcggcccgcgccgccctgcccagccctctgcctgcaggccgaccgtggccgccgggtcttccccagctggaccgactcagagctcagcagccgcgagcccctggagcacggagcttggcgtctgccggtctccatccccttgttcgggaggactacagccgtatagaggggcgcccggcgccccgggccccaccggcggactcctggcctgactgcggggctttttaaatgcttccctggactgcggggaggggcggggggagggagggatttcttatcccgtttgttacattttgaggataataaaggtgtgtgatctggtttggtacaa

SEQ ID NO: 1658 - DNA, 363 bp, Artificial
  cDNA Sequence
ctgtgtccaaatgttgctttatctttcggcacgaaagatcttcacagtatcaaaagtaaagaattggaaaaaaacaaaataaaaacaaaaacaaaaaaaccaaacacaaagagagcagtgttgggccagcagtaccatcagccctggcccttaggccagcccagtccacgggctctgagtgtggaggctgcgtagcaccaggaagcggctctgctgaggtcaaggggccccagcacagtgtggcatccgttcagcttttggttggtccaggatggtggggagcacagaggccaaaggagctggggtgagacgggattagagatgctggctgcgggtggtggccggtggggctgttagggggag

SEQ ID NO: 1659 - DNA, 840 bp, Artificial
  cDNA Sequence
aggcaggtggagcaagatggctgtggagctgggcgtgctgctcgtccggccccggcccggaaccgggctgggtagagtgatgcggaccctcctgctggtgctgtggctggcgacgcgcggaagcgcgctctactttcacatcggagagacggagaagaagtgctttattgaggagatcccggacgagaccatggtcataggaaactaccggacgcagctgtatgacaagcagcgggaggagtaccagccggccaccccggggcttggcatgtttgtggaggtgaaggacccagaggacaaggtcatcctggcccggcagtatggctccgagggcaggttcactttcacttcccatacccctggtgagcaccagatctgtcttcactccaattccaccaagttctccctctttgctggaggcatgctgagagttcacctggacatccaggtaggtgaacatgccaatgactatgcagaaattgctgctaaagacaagttgagtgagttgcagctacgagtgcgacagctggtggaacaagtggagcagatccagaaagagcagaactaccagcggtggcgagaggagcgcttccggcagaccagtgagagcaccaaccagcgggtgctgtggtggtccattctgcagaccctcatcctcgtggccatcggtgtctggcagatgcggcacctcaagagcttctttgaagccaagaagcttgtgtagctgtcccaggcgtcacaacccatcctcccaggctgggggagaaaggacctcctggaactgacttcttctgtcaggaggactggtttccagccatacctgttctggaagggagaggg

SEQ ID NO: 1660 - DNA, 792 bp, Artificial
  cDNA Sequence
aggtggagcaagatggctgtggagctgggcgtgctgctcgtccggccccggcccggaaccgggctgggtagagtgatgcggaccctcctgctggtgctgtggctggcgacgcgcggaagcgcgctctactttcacatcggagagacggagaagaagtgctttattgaggagatcccggacgagaccatggtcataggaaactaccggacgcagctgtatgacaagcagcgggaggagtaccagccggccaccccggggcttggcatgtttgtggaggtgaaggacccagaggacaaggtcatcctggcccggcagtatggctccgagggcaggttcactttcacttcccatacccctggtgagcaccagatctgtcttcactccaattccaccaagttctccctctttgctggaggcatgctgagagttcacctggacatccaggtaggtgaacatgccaatgactatgcagaaattgctgctaaagacaagttgagtgagttgcagctacgagtgcgacagctggtggaacaagtggagcagatccagaaagagcagaactaccagcggtggcgagaggagcgcttccggcagaccagtgagagcaccaaccagcgggtgctgtggtggtccattctgcagaccctcatcctcgtggccatcggtgtctggcagatgcggcacctcaagagcttctttgaagccaagaagcttgtgtagctgtcccaggcgtcacaacccatcctcccaggctgggggagaaaggacctcctggaactgacttcttctgtc

SEQ ID NO: 1661 - DNA, 304 bp, Artificial
  cDNA Sequence
aggtggagcaagatggctgtggagctgggcgtgctgctcgtccggccccggcccggaaccgggctgggtagagtgatgcggaccctcctgctggtgctgtggctggcgacgcgcggaagcgcgctctactttcacatcggagagacggagaagaagtgctttattgaggagatcccggacgagaccatggtcataggaaactaccggacgcagctgtatgacaagcagcgggaggagtaccagccggccaccccggggcttggcatgtttgtggaggtgaaggacccagaggacaaggtgagcc

SEQ ID NO: 1662 - DNA, 770 bp, Artificial
  cDNA Sequence
tggctgtggagctgggcgtgctgctcgtccggccccggcccggaaccgggctgggtagagtgatgcggaccctcctgctggtgctgtggctggcgacgcgcggaagcgcgctctactttcacatcggagagacggagaagaagtgctttattgaggagatcccggacgagaccatggtcataggaaactaccggacgcagctgtatgacaagcagcgggaggagtaccagccggccaccccggggcttggcatgtttgtggaggtgaaggacccagaggacaaggtcatcctggcccggcagtatggctccgagggcaggttcactttcacttcccatacccctggtgagcaccagatctgtcttcactccaattccaccaagttctccctctttgctggaggcatgctgagagttcacctggacatccaggtaggtgaacatgccaatgactatgcagaaattgctgctaaagacaagttgagtgagttgcagctacgagtgcgacagctggtggaacaagtggagcagatccagaaagagcagaactaccagcggtggcgagaggagcgcttccggcagaccagtgagagcaccaaccagcgggtgctgtggtggtccattctgcagaccctcatcctcgtggccatcggtgtctggcagatgcggcacctcaagagcttctttgaagccaagaagcttgtgtagctgtcccaggcgtcacaacccatcctcccaggctgggggagaaaggacctcctggaactgact

SEQ ID NO: 1663 - DNA, 680 bp, Artificial
  cDNA Sequence
gtgacatgggccacggttgctctgggagggttgtggcactcggggctgggtggctctccctaagcttgctctgacaaaagagttttgagttggtcttttggctgagcctgcccaggaaggcaggctcctgcaggagtcttggagggtcggatgcggcgccggatgaggatgaggcgtggcggaagatgcgtttggctctgcagacactgcatcgggcagcaggggactctgggaggctggtgcagccagaaggcatggctcttgacagccttctagtagaatctctggaattgtgcatgtcccccccgcctccagccagcctgtgcagacttgctgcctgctgtgtcaccgggaacgcaaaggctgggaagaaggcccttctcaaaatggactggtgttgcagggtgagaagctgccccctgacttcatgccaaagctcgtcaagaatctcctaggcgagatgcctctgtgggtctgccagagttgccgaaagagcatggaggaagatgaaaggcagacaggtcgagaacatgcagtggcgatctccttgtcacacacatcctgcaaatcacagtcttgtggagatgactctcattcgtcctcgtcttcctcctcatcatcctcatcctcgtcctcctcttcctgccctgggaactcgggagactgggatcctagctcgt

SEQ ID NO: 1664 - DNA, 771 bp, Artificial
  cDNA Sequence
agaacactggcggccgatcccaacgaggctccctggagcccgacgcagagcagcgccctggccgggccaagcaggagccggcatcatggattccttcaaagtagtgctggaggggccagcaccttggggcttccggctgcaagggggcaaggacttcaatgtgcccctctccatttcccggctcactcctgggggcaaagcggcgcaggccggagtggccgtgggtgactgggtgctgagcatcgatggcgagaatgcgggtagcctcacacacatcgaagctcagaacaagatccgggcctgcggggagcgcctcagcctgggcctcagcagggcccagccggttcagagcaaaccgcagaaggcctccgcccccgccgcggaccctccgcggtacacctttgcacccagcgtctccctcaacaagacggcccggccctttggggcgcccccgcccgctgacagcgccccgcagcagaatggacagccgctccgaccgctggtcccagatgccagcaagcagcggctgatggagaacacagaggactggcggccgcggccggggacaggccagtcgcgttccttccgcatccttgcccacctcacaggcaccgagttcatgcaagacccggatgaggagcacctgaagaaatcaagctagagaccgcacaccagctaactggacattgctaggagaagctgcccttcccatccctaccccagtgggacctggaatccaactcggcagtttccacgcccccagtcatctcc

SEQ ID NO: 1665 - DNA, 702 bp, Artificial
  cDNA Sequence
gacgcagagcagcgccctggccgggccaagcaggagccggcatcatggattccttcaaagtagtgctggaggggccagcaccttggggcttccggctgcaagggggcaaggacttcaatgtgcccctctccatttcccggctcactcctgggggcaaagcggcgcaggccggagtggccgtgggtgactgggtgctgagcatcgatggcgagaatgcgggtagcctcacacacatcgaagctcagaacaagatccgggcctgcggggagcgcctcagcctgggcctcagcagggcccagccggttcagagcaaaccgcagaagacagccgctccgaccgctggtcccagatgccagcaagcagcggctgatggagaacacagaggactggcggccgcggccggggacaggccagtcgcgttccttccgcatccttgcccacctcacaggcaccgagttcatgcaagacccggatgaggagcacctgaagaaatcaaggccctaccgcccccagccctaccagccgcccgccctgggctgtggaccctgcgtttgccgagcgctatgccccggacaaaacgagcacagtgctgacccggcacagccagccggccacgcccacgccgctgcagagccgcacctccattgtgcaggcagctgccggaggggtgccaggagggggcagcaacaacggcaagactcc

SEQ ID NO: 1666 - DNA, 634 bp, Artificial
  cDNA Sequence
gccggggacaggccagtcgcgttccttccgcatccttgcccacctcacaggcaccgagttcatgcaagacccggatgaggagcacctgaagaaatcaagccaggtgcccaggacagaagccccagccccagcctcatctacaccccaggagccctggcctggccctaccgcccccagccctaccagccgcccgccctgggctgtggaccctgcgtttgccgagcgctatgccccggacaaaacgagcacagtgctgacccggcacagccagccggccacgcccacgccgctgcagagccgcacctccattgtgcaggcagctgccggaggggtgccaggagggggcagcaacaacggcaagactcccgtgtgtcaccagtgccacaaggtcatccggggccgctacctggtggcgctgggccacgcgtaccacccggaggagtttgtgtgtagccagtgtgggaaggtcctggaagagggtggcttctttgaggagaagggcgccatcttctgcccaccatgctatgacgtgcgctatgcacccagctgtgccaagtgcaagaagaagattacaggcgagatcatgcacgccctgaagatgacctggcacgtgcactgctttacctgtgctgcc

SEQ ID NO: 1667 - DNA, 877 bp, Artificial
  cDNA Sequence
ccggcgcgggcgcgggaccgaggcgaaccgggtgcggagccaatacccgcggcagcagcaccagctcctgccctccactgactccagagagggagatccccagtacttgactccatcacgcagatgggagcaggcaccagctatggagagggatacagctgcgtctccacatgacccatcctgcatgacaccaaagccaccgccagacagtgcctcggattctatgcaaaacctgggaagcggagacctaccccagccccgggaggaagctagctcttcaggggaccgtctgaggactggagtttgatccatgaacctggcttcgaggccttgcttttctctcttcttcattcatattcattcccaacaccttagaaggtgttgcttaatttatttctagaaaagcagcccagagtcagtcattgaagccttccccaccccctggccaaaaaaaaaaaaaaaaaaaaactggacacattttggatctgttgggagcttggagtccagtggttggcatagttgtcacattgggagcagagaagaagcaaccaggggccctgatcaggggactgagccgtagagtcccaggatggcacccaatggcacagcctcttccttttgcctggactctaccgcatgcaagatcaccatcaccgtggtccttgcggtcctcatcctcatcaccgttgctggcaatgtggtcgtctgtctggccgtgggcttgaaccgccggctccgcaacctgaccaattgtttcatcgtgtccttggctatcactgacctgctcctcggcctcctggtgctgcccttctctgccatctaccagctgtcctgcaagtggagctttggcaaggtcttctgcaatatctacaccagc

SEQ ID NO: 1668 - DNA, 521 bp, Artificial
  cDNA Sequence
gatgatataggtcttgcctttcattttaactgccattctggcaactgaacgttggcagtaaacgcagcttagttgtctcagaggactcacaatgggatgtgcttatagttgttgcctcgaagtgtgttgtggcgaggatgaaatagtgtatcctaggatgccaggggaatccaccgtctgccaccgcgagcgtgagaagccaatcacctatcactggtatcactggcatcccggccatatataccctagagttgcatcaatggaagattacgatgaggacctggtgcaggaagcttcatctgaagatgtcctgggcgttcatatggtggacaaagacacagagagagacattgagatgaaacggcaactacggcgactacgggagctccacctatacagcacatggaagaagtaccaagaggcgatgaagacatccttgggagttccacaatgtgagcgtgacgaaggctccttgggcaagccattgtgtccacccgagatactctcggagacgttgccag

SEQ ID NO: 1669 - DNA, 1308 bp, Artificial
  cDNA Sequence
cagtctctgaggaagccacaggggttcacatgatgcaggtggacccagccacgccggcaaagaaattggaagactccaccattacaggcagccaccagcagatgtcagcaagtccttcctctgcacctgcagaagaagcaacagaaaagaccaaagtggaagaggaagtgaaaaccagaaagcccaagaagaaaaccaggaagcccagcaagaaaagccggtggaatgtcctgaaatgttgggacatttttaatatattttagagacctctgaagattcctcgaccaccaggaagggccccgacgtggggatgtcaacatggctcagacttgatgtggatcgtgatcatttcgggaaatgtgttactccaaaaacttttataatctttgcttaatttgtttttaaatactttcctggctgggcgtggtggcttatgcctgtaatcccagcactttgggaggccgaggcgggtggatcacctgaggtcaggagttaaagaccagcctggccaacaaggtgaaaccccgtctctactaaaaatacaaaaattagctaggcgtggtggcgcactcttgtagtcccagctatttgggaggctgaggcaggagaatcacttgacctcaggaggcggaggttgcagtgagccgagatcatgccactgcaccccagcacctggctacagagtgagactttgtctcaaaaaaaaaaaaaaaagaacaaaaaaattctgactttaacctctgtttttcagagggcacaaattgttcttgtattgtttccattttacatttttttcttgaagttattttccaattgttttcattctttctgaagttttgtttactcggttttaagtttttgtaattttgatagacttttgtgctttcattttcttaatgacttttacctcatttttaaaacaaatccatagtatggatgatattgatgatgaaatgtcttacgatgatcatttagaggtttattttgaacaactggcaattccaggaatgatggaataaagcatacgaagtagaaggactggaacctccagaaaaagtactttaagttacctacaggtgatcctagtcaggtatgaattgataagaaatgcctgcaccttccctccttcctatctttcccttgcctacagaaaattaaaaggcaaaacaatagacatctgcatattcttcattcagatcaaccagtggctagcatttgccaccttttgcagtttctttctctttccataagtactttcttctctgaatcatttgaaagcaaatgaaaacagtagcctaaagtgtcagt

SEQ ID NO: 1670 - DNA, 371 bp, Artificial
  cDNA Sequence
ttgattttggtgactagagttgtagatgctggaagctttgccactaacattgatgaaccagatgcatgtcaccagcccatcacggtgattcttaatgccggcaccatgggcccggcactgccacgttttccaaggaacctgccggagctcctgcggaagctgctcctcaggcgatggagtcccttcgctggtaggcccttcttcagtcaccacaggatgcctgccattcatgaacaagaaggagaggacgggctttgaataaaaaacaggatccaggaaatatttgtgaggccatttggacttcagtgtgaaatggtgttaaaagatgaagtcatttattcaagaagtaaacctctgccacctggactgtg

SEQ ID NO: 1671 - DNA, 647 bp, Artificial
  cDNA Sequence
atgaacaagaaggagaggacgggctttgaataaaaaacaggtggagtctcactctgttgcctgggctggagtgcaatggtgtgatcactgctcactgcaacctccgcctcctgggttcaagcagttctcctgcctcagcctcccaagtagctgcaattacaggtgcatgccaccactcccagcaaatttttatatttttagtggagacagggtttcaccatgttgaccaggctggtctcaaactcctgacctcaggtgatctgcccaccttggcctcccaaagttctgggattaaaggtacgagccaccgcaactggctgagaatctttttatttgctgatttgtctcttgtgtattttctttgttcagatgtctcttcagatctttttctcacttttaaattgttttttaattgttaagaattttctgtctagtttagatataagccctttatcagacatgtgttttgcaaatattttctcctagtctgtggcttgtattctgtctcttaacactcattttatttttacttttggaactaaagaagaagaatggtcagctttccattattcttgtaacagtaatggcagaaccaagtctgctaatgctacactgagcaaagaaagtcacctggtgaagtccaacat

SEQ ID NO: 1672 - DNA, 476 bp, Artificial
  cDNA Sequence
gccgccacctcagaagcaggaaccgaagtcgtcgccgccgccgccactgcctgggtcttcggtcggggcccgcagccatggaggatttcatcgtgatctcggacgacagcggctctgagagctccgggggcgcccgcccgggccggtcgcggaggccgcgccgggccctgtcgcgaacctccggcgcgctgccccgccggaccgtggacttcattgacttaactagagagaccagaccaaggacaaaagatcgcagtggactgtatgtgattgacctgacaagagctgagggagaaaatagacctattgccactcttgacttaactttagaacctgtcactccttcccagaaggagccaaccagtcttcagacatgtgccagcctctctggcaaagcggtgatggaagggcacgtggacagaagctctcagcctacagcacggagaatcattaacagtgatcctgtagatttggac

SEQ ID NO: 1673 - DNA, 701 bp, Artificial
  cDNA Sequence
gtttgggggcgcgcgtcttcgcgaccctcggctgggcccgccgcccgcttcccgcccctggcgcctcacagctgcagccacttcccgccttgcctccttccgggcctctcgggccccggggagcgcggcgggccggggcaggggccagggcagggaccggggaggccgggcctcccaggctcagcgctgaagcccgagaggactgcggctggaaagcggccgagcacatggacgagctcctggcgcgcctgctgcaggggctggggtctcaggccggggccgcgggcgtcctcggagcctcggcgggacgtgggggctcgggtgtactggccgggccgatgcaggaaagcgggagcgcgtaattcttcggcctgtggtggacacagatgtgtgcagggaggacttcattgacttaactagagagaccagaccaaggacaaaagatcgcagtggactgtatgtgattgacctgacaagagctgagggagaaaatagacctattgccactcttgacttaactttagaacctgtcactccttcccagaaggagccaaccagtcttcagacatgtgccagcctctctggcaaagcggtgatggaagggcacgtggacagaagctctcagcctacagcacggagaatcattaacagtgatcctgtagatttggacctagtggaagaaaacacctttgtaggtcccc

SEQ ID NO: 1674 - DNA, 1784 bp, Artificial
  cDNA Sequence
aaaattagaacccatccctcatcgaagactaagaatggtaacaaataccattgaagagaattttcctctggggactgtgcagtttttgatggactttgtgtcaccccagcattacccaccaagagaaatcgtggctcacatcatccagaaaatcttgctcagtggctctgagactgtggatgtcctaaaggaggcctacatgcttctcatgaaaattcaacagctacatccagccaatgccaagacagtggagtgggactggaaactgctcacctatgtcatggaggaagagggacaaactctgcctgggcgagtccttttcctgcgttatgtcgttcagaccctagaagatgactttcagcagaccctgaggaggcaacggcagcacctgcagcaatccattgcaaacatggtgctttcctgtgacaagcagccccacaatgtcagggatgttatcaagtggctggtcaaagcagtaactgaagatggattgactcagcccccaaatggaaatcaaacgtcttcaggaacaggaatcttgaaagccagcagtagccacccttcttcccagcccaacctgacaaagaacaccaatcagctgattgtgtgccagcttcagaggatgctctccatagccgtagaggtggacaggacccccacctgcagctccaataaaattgccgagatgatgtttgggtttgtgctggacattcctgagaggagccagagagaaatgttctttactaccatggaaagccaccttctgcgctgcaaagtgttagaaatcatattcctccacagctgtgagacacccacccgcctgcctctgtctctggcccaggccctctactttctgaataattctacgtcactgctcaagtgtcagtcagataaaagccagtggcagacttgggacgaattggttgagcatctgcagtttctgctgtccagttatcaacatgttttaagagaacacttaaggagttccgtgatcgaccgaaaggacttaataatcaaaaggattaagcccaaaccccagcaaggagatgacatcacagtggtagacgtagagaagcagattgaggccttccgcagccgcctgatccagatgctgggggagcctcttgtcccccaactccaagacaaagtgcacttgttgaagctcctgctcttctatgctgcggacttgaaccctgatgcagagccctttcaaaagggctggagcggctcctgagggcctgccaagcactgaatgccaagaatacctcctgaactctctctccaactgctcagaagctctaaaagcatgaaaagtggttaaaatcttacaggaccaaacctgcattatttaatcagtaggttgtaatttctaactctagtaaatatctttttttaaataatcctatcctagcctgttctcaaatatggcttaaatatacaaggtatatatattttttaataaattatttatctatacttttttgaaacaggttaatactctgtgcatcacatgtttaacattttcattcaagatgtggaaaaaatccctctgctgaacctagtctatacaccaatattatgtcattcaaggtaccgacaacctgtttcaggagagagacgttcatttttccctaatgaaatgcaagcattctgttagacctattatattgcctgttaatttgactgtaatgaatagggggtagaaacaaaaggatcaagtgtgttataaaacatttgatgttaaaaggagacaataaaaaggcaatggtttttcaaaataccaa

SEQ ID NO: 1675 - DNA, 1008 bp, Artificial
  cDNA Sequence
gatctcggtccaaagaggctccacttatctgacaagtttctgtccttatccccacttccagagtccatggtgctaggatttgggccaggcctgccacgccactgcttaacccaagctgcacaccaaacaatgatcacgtttgaattttctcaaacgctcaacagatccattcatgtgttactgatgctgccggtcccaagaccacaccttgaggaccactgctcccaaggttcaagtaatggtcttttgaaacaaacaaaaaaaatctacttagctcctcattttcaacctgcaagagctggcagcctccaccttctgcaatcgaaacacctgataccttgctcaggcctagcagggaggagagaacaagacttattctttattctgtgcttgtctggaagaactgagaagaaagtaagatggttgaaaaggggggacagataaaaagtaatgaaaaatgttgtatccttactacaaaacagaatttatacctttaagctgtgaccttgagtaaaacttgagcctgtttccttactgggaagacggttgattcctaacatggggagagttagggcaaatgaataggatcgcatgcaatgagtcaagcggagctctcctttggagcagctgttccaagccatcagctgttccagctgaggcccagaagaaatctggaagcccgctcatcccttgccttgtggagccatcagcagggtgtgtggcctggcaagcaccaccagaagccctgctcacctcctgctctggaccctaaagcccattgctctgacatcacaggcaagctgcagcaggccttttctccctgcacttttgctacttgttacatggaatactctccctgaacaactgactgggtcatatttcagtagataattgatagagggaatatcccccagagctgtaggggcactttcttagaaaggagctgtctgccctgaaagtctgttggaggcggggggaaaaacactccttagaaattatcaaatatgg

SEQ ID NO: 1676 - DNA, 372 bp, Artificial
  cDNA Sequence
acttggtctcctcggtggtgaggcccttgtggggtgtgtagccagcatctctcagccctgcctgtcgctcaaaatgctgaatgctttcctgggtctgttctgggaacagaggagatgacaagaattcatgatgacatgggtagctttagccttcaccactgggaccttgtccacactgtcaatggctgatgacagggtcatggcaggggagggtagactggcctctccttcctccacctataccttggcgaggtgctgatacttgcgctctggaatcactggcttccaagggacgctgcccatgtccgatggaggaggagtcatgggcgcagggtcctcgagggtatcatcatagctgactgcccggcggta

SEQ ID NO: 1677 - DNA, 541 bp, Artificial
  cDNA Sequence
gcggccgctgggccccttggtgctggcgctgggcggcgccgcggcggtgctgggctcggtgctcttcatcctctggaagacctacttcggccgcggccgagagcggcgctgggaccggggagaggcctggtggggcgcggaggctgcccgcctccccgagtgggacgagtgggaccccgaggacgaggaggacgaggagccggcgctggaggagctggaacagcgcgaggtgctggtgctggggctggatggcgcaggcaagagcacgttcctgcgcgtgttgtcggggaagccaccgctggaaggccacatccccacctggggcttcaactccgtgcgtctgcccaccaaggactttgaggtggacctgctagaaattgggggcagccagaacctgcgcttctactggaaggagtttgtgagcgaggtggatgtgctggtgtttgtggtggactcggctgaccgactgcggctgccctgggcccgacaggagctgcacaagctgctggacaaggaccctgacctgcctgtcgtcgtggtg

SEQ ID NO: 1678 - DNA, 1406 bp, Artificial
  cDNA Sequence
ttcagagaaaaaagactgagtagagggggtatggggaatgtgtgctggggagggagtgtgacgaaggtcgtaaagagacccttgctcaacgtcagttgagcgttctgactgtggggaggtcgaaaactcggaagggcctgagggaaggaatgggcagtaccacgttctgacacctaggtcagtatggcgggggaagagtaaagaagacaaggaccgagaccctgccatgtcagtacctttctcttacggaggggcaccgccctgttggggtccacagccaaccccatctcggccaggttctgccgtaccgatttagcgtggtcccaggcatgtcggatgtgggagctaccggcaaagagagacatcgcggatccgtcatctcgcggaccgtcccggccgaggcccacggccacccggaaccccagccccctcaccattcgatccgcggcgctgccttccgtcgagcattccggttcagacgctttcggttgacactgtaaccaaacttctgcctccgggttttgcccttggccttgggcatcgcgctgaccaccgcaccagcagctcaaacacgctgcctctgtctctcagacctcgtgtaacaaactccttccggaaggcgtgcacaaggctttgcgggcatttggggaaatgtagtccttttgtagcactaccgtgctgagcactacgactcccaggatgcaacgagcatttgcgcctgcgtacaaggctcaatttattcgtttccccgcccctttcatgaccttcaccgggaggctgaggtcggagtcccgattttctcctgctgctgtggcccggacatggcgactcccggccctgtgattccggaggtcccctttgaaccatcgaagcctccagtcattgaggggctgagccccactgtttacaggaatccagagagtttcaaggaaaagttcgttcgcaagacccgcgagaacccggtggtacccataggttgcctggccacggcggccgccctcacctacggcctctactccttccaccggggcaacagccagcgctctcagctcatgatgcgcacccggatcgccgcccagggtttcacggtcgcagccatcttgctgggtctggctgtcactgctatgaagtctcgaccctaagcccagggtctggccttgaaagctccgcagaaatgattccaaaacccagggagcaaccactggccctaccgtgggacttactccctcctctcctttgagaggcccatgtgtcgctggggaggaagtgaccctttgtgtaactgtaaccgaaagttttttcaaaaatcctagatgctgttgtttgaatgttacatacttctatttgtgccacatctcccctccactcccctgcttaataaactctaaaaatccacttgtatttaa

SEQ ID NO: 1679 - DNA, 2082 bp, Artificial
  cDNA Sequence
agttccggcgggtgacggtgcggacgggtcaggagcgtagaggcggcggcaaaatggcggcgcctgaggagcgggatctaacccaggagcagacagagaagctgctgcagtttcaggatctcactggcatcgaatctatggatcagtgtcgccataccttggaacagcataactggaacatagaggctgctgtacaggacagattgaatgagcaagagggcgtacctagtgttttcaacccacctccatcacgacccctgcaggttaatacagctgaccacaggatctacagctatgttgtctcaagacctcaaccaagggcaagggctgcttggatggggttattacttgataatgcttccattccggtttacctattacacgatacttgatatatttaggtttgctcttcgttttatacggcctgaccctcgcagccgggtcactgaccccgttggggacattgtttcatttatgcactcttttgaagagaaatatgggagggcacaccctgtcttctaccagggaacgtacagccaggcacttaacgatgccaaaagggagcttcgctttcttttggtttatcttcatggagatgatcaccaggactctgatgagttttgtcgcaacacactctgtgcacctgaagttatttcactaataaacactaggatgctcttctgggcatgctctacaaacaaacctgagggatacagggtctcacaggctttacgagagaacacctatccattcctggccatgattatgctgaaggatcgaaggatgactgtggtgggacggctagaaggcctcattcaacctgatgacctcattaaccaactgacatttatcatggatgctaaccagacttacctggtgtcagaacgcctagaaagggaagaaagaaaccagacccaagtgctgagacaacagcaggatgaggcctacctggcctctctcagagctgaccaggagaaagaaagaaagaaacgggaggagcgggagcgtaagcggcggaaggaggaggaggtgcaacagcaaaagttggcagaggagagacggcggcagaatttacaggaggaaaaggaaaggaagttggaatgcctgccccctgaaccttcccctgatgaccctgaaagtgtcaagatcatcttcaaattacctaatgattctcgagtagagagacgattccacttttcacagtctctaacagtaatccacgacttcttattctccttgaaggaaagcccagaaaagtttcagattgaagccaattttcccaggcgagtgctgccctgcatcccttcagaggagtggcccaatccccctacgctacaggaggccggactcagccacacagaagttctttttgttcaggacctaactgacgaatgacatttttttcttcctgtcccctcctaccccagtccctaaaagaaatggggaaaaaagaaaacaacagcaagtcagaaaaaaaaaacaagagagagaaattcatattattattattattataatacaatattttttttaaaagactgctgcatccttaggaaggatcagaaaccatgctgcccgtaagagtcacaacctgtgtgtgcgcgcaaggttagcaacaaacgtacccgcttggcaagcccacccttcctgtggcctctgtgcacgcaccttccagtgaacagagactcttcaccttcgacccatccattgtcccagctgggaaggggacattcccactagttctcattcattcttgcttttatgaaaaataaaagtgaaaaacctccatcaaccagctacttgcagcatctcctgaggacttgcttctcctgcctctggggaagagagggaagagaaagcacagagcagagaagcagagatgttccttgaactgcccacaagttttcaataacttttatttctgttttgtaatgaccaaaggaatgaggctgacataggtatatatatatatttttttcctttatttgataaagagccaattctttaaacccatgagtttatgccctgggctccttagcccacaatagtgtaataaaagtgccccgggctggtttgtgctta

SEQ ID NO: 1680 - DNA, 1229 bp, Artificial
  cDNA Sequence
agttccggcgggtgacggtgcggacgggtcaggagcgtagaggcggcggcaaaatggcggcgcctgaggagcgggatctaacccaggagcagacagagaagctgctgcagtttcaggatctcactggcatcgaatctatggatcagtgtcgccataccttggaacagcataactggaacatagaggctgctgtacaggacagattgaatgagcaagagggcgtacctagtgttttcaacccacctccatcacgacccctgcaggttaatacagctgaccacaggatctacagctatgttgtctcaagacctcaaccaagggcaagggctgcttggatggggttattacttgataatgcttccattccggtttacctattacacgatacttgatatatttaggtttgctcttcgttttatacggcctgaccctcgcagccgggtcactgaccccgttggggacattgtttcatttatgcactcttttgaagagaaatatgggagggcacaccctgtcttctaccagggaacgtacagccaggcacttaacgatgccaaaagggagcttcgctttcttttggtttatcttcatggagatgatcaccaggactctgatgagttttgtcgcaacacactctgtgcacctgaagttatttcactaataaacactaggatgctcttctgggcatgctctacaaacaaacctgagggatacagggtctcacaggctttacgagagaacacctatccattcctggccatgattatgctgaaggatcgaaggatgactgtggtgggacggctagaaggcctcattcaacctgatgacctcattaaccaactgacatttatcatggatgctaaccagacttacctggtgtcagaacgcctagaaaggtacaagggagttcccttctggaacagagagagaccagttgtaaatttggagggctgacctctggggctctaccaatcctgacttcttctgtgcatcaggccgctattagcttttagctttgcccatttattgtcaaaatatttacatactttgacctaaattactctatatcaggtaatctgttcttagagatgttcaaaataaagacaagggctgggtgcagtggctaacacctgaaatcctagcacgttaggaggctgaggcaggaggattacttgaatccagactgggcagcaaagcgagaccccatctctacaaaaaataagaaaaaa

SEQ ID NO: 1681 - DNA, 337 bp, Artificial
  cDNA Sequence
gatctaacccaggagcagacagagaagctgctgcagtttcagctatttcagatgggaaagaataaggacataggttttaaggagagctaatgcaggttgctgtttgaacaactggagaaggatgacatggacagagagaagggggaattaaaggagttatgcaggccagcagaggaagaaatgatcccttttctgcttgcacaggaggaagaaatttatgaccctcatccttttaaatgatagcctgaacgctgggctgtagaatcaaatttataagtcattttgaaaatctttcttttggcttcacctgactatattacctaaaggaaaaaaaaac

SEQ ID NO: 1682 - DNA, 408 bp, Artificial
  cDNA Sequence
cagaatttacaggaggaaaaggaaaggaagttggaatgcctgccccctgaaccttcccctgatgaccctgaaagtgtcaagatcatcttcaaattacctaatgattctcgagtagagagacgattccacttttcacagtctctaacagtaatccacgacttcttattctccttgaaggaaagcccagaaaagtttcagattgaagccaattttcccaggcgagtgctgccctgcatcccttcagaggagtggcccaatccccctacgctacaggaggccggactcagccacacagaagttctttttgttcaggacctaactgacgaatgacatttttttcttcctgtcccctcctaccccagtccctaaaagaaatggggaaaaaagaaaacaacagcaagtcagaaa

SEQ ID NO: 1683 - DNA, 629 bp, Artificial
  cDNA Sequence
tgtgtgccagcgcctgtccggcgcctgcctgccgcctccgtggcgaaggggacacaggtccctgcggatgtgatggcccagctatggctgtcctgcttcctccttcctgccctcgtggtgtctgtggcagccaacgtggccccgaagttcctagccaacatgacgtcagtgatcctgcctgaggacctgcctgtgggtgcccaggccttctggttggtagcggaagaccaggacaatgaccctctgacctatgggatgagcggccccaatgcctacttcttcgctgtcactccgaaaactggggaagtgaagctggccagcgctctggactacgagacactctacacattcaaagtcaccatctccgtgagcgacccctacatccaggtgcagagggagatgctggtgattgtggaagatagaaacgacaacgcacccgttttccagaacaccgctttctccaccagcatcaacgagaccctgcccgtgggcagtgtggtgttctccgtgctggccgtggataaagacatggggtctgcaggcatggtcgtgtactccatagagaaggtcatccctagcactggggacagcgagcatctcttccggatcctggccaatggctccatagt

SEQ ID NO: 1684 - DNA, 507 bp, Artificial
  cDNA Sequence
ggttagcggctcctacaacatcttcgtccaggaggaggagggcaatgtctccgtgaccatccaggcccacgacaatgatgagccgggcaccaacaacagccgtctgctcttcaacctgctgcctggcccctacagccacaacttctccttggaccctgacacagggctcctcagaaacctggggcccctggacagagaggccatcgaccccgccctggagggccgcattgtgctgacagtgcttgtgtctgactgcggcgagcctgtcctcggcaccaaagtcaatgtcaccatcactgtggaggacatcaatgataacctgcccatcttcaatcagtccagctacaactttacggtgaaggaggaggatccaggagtgctagtgggcgtggtgaaggcctgggacgcggaccagacggaagccaacaaccgcatcagcttcagcctgtcggggagtggtgccaactacttcatgatccgaggcttggtgctgggggctgggtgggc

SEQ ID NO: 1685 - DNA, 1117 bp, Artificial
  cDNA Sequence
gtggctgtaataggggtctcttttggtagagaggttgagggcaggtttagggggatgagccctgagctgggctcgtgaccagccttggtccaggtgggcagtgtcccgaccccgctgaccccgttcccgttcacacctgcagtgatcatccctgaactcgtgctgcccaaccgggaggtggcttctgtccgggccagagacgatgattcagggaacaatggcgtcatcctgttctccatcctccgagtagacttcatctctaaggacggggccaccatccctttccagggtgtcttctcgatcttcacctcctccgaggccgacgtgttcgctgggagcattcagccggtgaccagcctcgactccactctccaaggcacctaccaagtgacagtccaggccagggacagaccttccttgggtcctttcctggaagccaccaccaccctgaatctcttcaccgtggaccagagttaccgctcgcggctgcagttctccacaccgaaggaggaggtgggcgccaacagacaggcgattaatgcggctcttacccaggcaaccaggactacagtatacattgtggacattcaggacatagattctgcagctcgggcccgacctcactcctacctcgatgcctactttgtcttccccaatgggtcagccctgacccttgatgagctgagtgtgatgatccggaatgatcaggactcgctgacgcagctgctgcagctggggctggtggtgctgggctcccaggagagccaggagtcagacctgtcgaaacagctcatcagtgtcatcataggattgggagtggctttgctgctggtccttgtgatcatgaccatggccttcgtgtgtgtgcggaagagctacaaccggaagcttcaagctatgaaggctgccaaggaggccaggaagacagcagcaggggtgatgccctcagcccctgccatcccagggactaacatgtacaacactgagcgagccaaccccatgctgaacctccccaacaaagacctgggcttggagtacctctctccctccaatgacctggactctgtcagcgtcaactccctggacgacaactctgtggatgtggacaagaacagtc

SEQ ID NO: 1686 - DNA, 1056 bp, Artificial
  cDNA Sequence
ggttgagggcaggtttagggggatgagccctgagctgggctcgtgaccagccttggtccaggtgggcagtgtcccgaccccgctgaccccgttcccgttcacacctgcagtgatcatccctgaactcgtgctgcccaaccgggaggtggcttctgtccgggccagagacgatgattcagggaacaatggcgtcatcctgttctccatcctccgagtagacttcatctctaaggacggggccaccatccctttccagggtgtcttctcgatcttcacctcctccgaggccgacgtgttcgctgggagcattcagccggtgaccagcctcgactccactctccaaggcacctaccaagtgacagtccaggccagggacagaccttccttgggtcctttcctggaagccaccaccaccctgaatctcttcaccgtggaccagagttaccgctcgcggctgcagttctccacaccgaaggaggagggctcttacccaggcaaccaggactacagtatacattgtggacattcaggacatagattctgcagctcgggcccgacctcactcctacctcgatgcctactttgtcttccccaatgggtcagccctgacccttgatgagctgagtgtgatgatccggaatgatcaggactcgctgacgcagctgctgcagctggggctggtggtgctgggctcccaggagagccaggagtcagacctgtcgaaacagctcatcagtgtcatcataggattgggagtggctttgctgctggtccttgtgatcatgaccatggccttcgtgtgtgtgcggaagagctacaaccggaagcttcaagctatgaaggctgccaaggaggccaggaagacagcagcaggggtgatgccctcagcccctgccatcccagggactaacatgtacaacactgagcgagccaaccccatgctgaacctccccaacaaagacctgggcttggagtacctctctccctccaatgacctggactctgtcagcgtcaactccctggacgacaactctgtggatgtggacaagaacagtc

SEQ ID NO: 1687 - DNA, 1047 bp, Artificial
  cDNA Sequence
ccgcagtgacagccagccgggcccggtggcggagaggaagtgcggtccgcgccaagcccgtccccgccgacgccggctcccccgcggctcgggtgacagcgtcgcggccgccggacgcagcgcggggcaggcgcgggcagagccgagcgcagcggaggctccggcggaggcgcggggaaaatggctgatgactttggcttcttctcgtcgtcggagagcggtgccccggaggcggcggaggaggacccggcggccgccttcctggcccagcaggagagcgagattgcaggcatagagaacgacgagggcttcggggcacctgccggcagccatgcggcccccgcgcagccgggccccacgagtgggggtgactggttctgaggacatggggaccacagtcaatggagatgtgtttcaggaggccaacggtcctgctgatggctacgcagccattgcccaggctgacaggctgacccaggagcctgagagcatccgcaagtggcgagaggagcagaggaaacggctgcaagagctggatgctgcatctaaggtcacggaacaggaatggcgggagaaggccaagaaggacctggaggagtggaaccagcgccagagtgaacaagtagagaagaacaagatcaacaaccgggcatccgaggaggctttcgtgaaggaatccaaggaggagaccccaggcacagagtgggagaaggtggcccagctatgtgacttcaaccccaagagcagcaagcagtgcaaagatgtgtcccgcctgcgctcggtgctcatgtccctgaagcagacgccactgtcccgctaggtgcctgctaggtgcatggccacagagcatgggctgggcctgggcacaggaggagcagctgctttggtcggggtggagactcgcagcagctgctacccacagcctattccactcctccccatctccaggcgctgggaggggggccctcaccccatcacgcctcgctccctcctggccctctggtccagcccctcacgcctcctctcagtctactcaattgtgactgt

SEQ ID NO: 1688 - DNA, 557 bp, Artificial
  cDNA Sequence
gtgacagccagccgggcccggtggcggagaggaagtgcggtccgcgccaagcccgtccccgccgacgccggctcccccgcggctcgggtgacagcgtcgcggccgccggacgcagcgcggggcaggcgcgggcagagccgagcgcagcggaggctccggcggaggcgcggggaaaatggctgatgactttggcttcttctcgtcgtcggagagcggtgccccggaggcggcggaggaggacccggcggccgccttcctggcccagcaggagagcgagattgcaggcatagagaacgacgagggcttcggggcacctgccggcagccatgcggcccccgcgcagccgggccccacgagtgggggtgactggttctgaggacatggggaccacagtcaatggagatgtgtttcaggaggctttcgtgaaggaatccaaggaggagaccccaggcacagagtgggagaaggtggcccagctatgtgacttcaaccccaagagcagcaagcagtgcaaagatgtgtcccgcctgcgctcggtgctcatgtccctgaagcag

SEQ ID NO: 1689 - DNA, 804 bp, Artificial
  cDNA Sequence
ctctcacggaagaagaattccattctcccatcccaggaaggagagtgccctgcgtgccacgaaagagcccaggacccacaggacaaatacgtcactggcagacctgccttcgccagcgccagcccatctctgaaacctccagcatttgtgccccggtccggcccctcccaggcctgactctttccgtgaacggtcactgcgcaggatcaagctacaatgaagaggagggaggcagtctgcgcgcaccgccattttctaggaactgggaagcccccccaccccttaggaagatccatccctgtggaaccttgcccaggcttaccagcctttgctgaggttgatctattgtccctccttgtccccatcaaaatatccagcactccaccttcagggagtagacttgaccctcaaatagcaagttcagccttcccaggtctaggttccctgggaggtcaagattcgtctggttccttagtacagagggctagctgtgagttggaatccccctatgagctttagaatcagtcaagaggaattgggccccttcccttcatccctcttcttttccctttttgtcccagagctcagctctgactcaaaagtttttccatttaccatcaacatggaaacttggctcctcacgtaggtatattatcccccttttgtacatggtcttgttgatccaaactccctttctgtgaaagaggcctgtggggctcaagaagcctggtcagccagccaggctagtcccacatacctcagaaccagtttaataaaggctctatgtcattcttttttgcttgg

SEQ ID NO: 1690 - DNA, 1015 bp, Artificial
  cDNA Sequence
ccttcatctgttcctggaagatacccgtagcctgccttccttcttgacaggctgatttaggggtgctccccaagaagatcaggactgctgaaagaatgaagaagaacttacttggcctaggatgtggctagagaacggagcgcactttcacttacctggcaaggtggttttggaagtttccacggaagccttcccagggccgctgctgcccgtcctcgcctagaagaattccattctcccatcccaggaaggagagtgccctgcgtgccacgaaagagcccaggacccacaggacaaatacgtcactggcagacctgccttcgccagcgccagcccatctctgaaacctccagcatttgtgccccggtccggcccctcccaggcctgactctttccgtgaacggtcactgcgcaggatcaagctacaatgaagaggagggaggcagtctgcgcgcaccgccattttctaggaactgggaagcccccccaccccttaggaagatccatccctgtggaaccttgcccaggcttaccagcctttgctgaggttgatctattgtccctccttgtccccatcaaaatatccagcactccaccttcagggagtagacttgaccctcaaatagcaagttcagccttcccaggtctaggttccctgggaggtcaagattcgtctggttccttagtacagagggctagctgtgagttggaatccccctatgagctttagaatcagtcaagaggaattgggccccttcccttcatccctcttcttttccctttttgtcccagagctcagctctgactcaaaagtttttccatttaccatcaacatggaaacttggctcctcacgtaggtatattatcccccttttgtacatggtcttgttgatccaaactccctttctgtgaaagaggcctgtggggctcaagaagcctggtcagccagccaggctagtcccacatacctcagaaccagtttaataaaggctctatgtcattcttttttgcttgg

SEQ ID NO: 1691 - DNA, 613 bp, Artificial; identical to SEQ ID NO: 927
  cDNA Sequence

SEQ ID NO: 1692 - DNA, 456 bp, Artificial
  cDNA Sequence
acttgaagacaccccacattccaagatgcccgaggttcctgggaatgcctggggttcttcgatccggaaaatcctaccggcatcctcctagggagggattattattattatttttctttaatctggaagagaagagaacaagttgtgcttttccccccttcttcttgctaaatgccatggatataactgaataagcggctcagggctttccccgcgtggacgtccgaggccaccatctgcctgcattcgccggagccgccggagggtttagctcgagtctgtctcgggcggggaaggatgcgtggccgagccggggagcccgggcgccccgcggagccggcctcggtgccacccagccgggggtagatgctgcctcgcccaggcgctgagtgaccagaccatggagaccctgcttggtggcctgctagcgtttggcatggcgtttgccgtggtcga

SEQ ID NO: 1693 - DNA, 421 bp, Artificial; identical to SEQ ID NO: 926
  cDNA Sequence

SEQ ID NO: 1694 - DNA, 292 bp, Artificial; identical to SEQ ID NO: 924
  cDNA Sequence

SEQ ID NO: 1695 - DNA, 438 bp, Artificial
  cDNA Sequence
gggaacaggcagggaaaacaatgggtctagcaggacaaaagtgacatttcccagagtttcttgctgtttggatctggctgcagtttcagttttgccaagaagaggcatttccatgagctctggacagtggcagagaggcagaggtgctccactgcagtgtgctggatggtccacgggctcctgccaatgtgaggatttgcagcaactggtatatccatggtcttgtcaccagcttcctgaattcggggcagctggagccacactagtggtccttccttgcaggggcagcagctgtctcctggtctcagaatcacagctgtggggatgcaaccttaagccaaaagcctagcggtgggtggtcctaaacttcttttgtctaggccctctgatccctctgtaagtcgctatttcccttattaaatctctttctgctggata

SEQ ID NO: 1696 - DNA, 1843 bp, Artificial
  cDNA Sequence
ccagccagcagccgcttccgacagaactgaatgtaacttcaccgagtaaagaggagtgtgggccatgcacagacacagctcatgtctcattaatcacaccaacaaaaagatcctgtggtacagattcacagtctgagaatgaggcttcaccagtaaaacggccacgactacttgagaatacggaacggtccgaggaaaccagtcgatctaaacagaagagtcgacgtcggtgcttccagtgccaaaccaaactggagctggtgcagcaggaattgggatcgtgtcgctgcggttatgtgttctgtatgttacatcgcctccccgagcagcacgactgcacattcgaccacatgggccgtggccgggaggaagccatcatgaaaatggtgaagctggaccggaaagtggggcgctcctgccagcgcatcggggaggggtgctcctgaaggccaggcatggccaccacgtgacgctgttcttagttcactaatgttagccttatttaggacaaagtcagccagacaccttgtactgggcacgcgtcagactgcagccagtccgtttcctttctttagccagccatcctggtactgtagtttaggggttgatggtggttgaaattgatttctggctggttactaaggtgcctgctagccattgtataaaattaaaacatgaagaatattttttttttgagcatggctagtggatttaaaacaacacatacctgtcactgctggagtcaaacttataaaaagccttaagtggaaagtgttccagacggagactctgagttaatagaggagtagaagctggtgttaaagttcccacgacgcacatggctttgccagaaactctgtttaatgatcggcctttcacctcttcacttatccttagtcccagtagccaggatacctgatggccacgtgtgccttggccacgggaggctgctgagattggccacgtggctgggctgggtggtggcctcactctcccacagagctggaaatggggggtgggggacagattcttacggaaatttttttacctgacttgctatgaaaaaactcatcacacaagaagagaaacagtaacctcactttgaaaattagctccactcaagactagtccacgaacgagacccgccttttctacacaggatccaaggtcacgagaagcagccagagtgccccgcctccgccggctctggtctgccattcgccagtgcagggatctggcacggaccagatgtggcgaatggcagcacagcgcggtggctgggtctgcacactggcctctgcagccagatttctatattgggagttttttaaaaagacatttcatagccaacaagaatcagtagaagtgctgggagcagcagctggggaagctgccgcccacgggctctgccccttccagctggagccgcccgtgcctccaggggccaagaggatgatgtcgtggcctccattctcgtttctatgcagccccatagtccaaggacacccagtccacatctaccatatagcaagtttagtaagggaaggcagcatacgtcccagggacagtgggtttggatctgtctagaacagcggtttgtggctgtggcccagctccgagagtgatatttgctctggtaggtgagggcctgagggtacatttctccacctgtgccccctcatgttcacagaggatttcagcagctgcaactgcgcacgccaggtggggaagggtgggggtgggcctggttgccccatgttaggaaatcactaccagtcaggtggggctggggctgggtggacaggatcaggattcccttgaaagcccaggcagggtgagcagt

SEQ ID NO: 1697 - DNA, 1235 bp, Artificial
  cDNA Sequence
cctgcctccacactaccccctctcccctaatgaggctggcagcaccatttgctagcacctggcagatgagagagaaagaaaacctggtgtggagacccccatccattaaaggcaagagagtgaaaagtgggagagaaagctcccaagttcaacagcagtgacctagggtcatgcagtgaggacttacaaagtccaagaagaaagcatttggagaagtgctacacatgctcaactgaacttcctgtcaaattgttctcactcgtttgggcacaagtctgcttaagccatctctcattaacatttactcttgcccgaagccctctacgcccccaacccctgctaatcttccacaagcaagctgatcacactgggatctccttttcccagacacgtttgattctcactttctcctgaacctagaaatgtgcttcccaccaaagcatgccaggcactaactcgtccctactgaaaggggctgttaaaagctcatcttctttccagatggtagtgaggtgtgaggtgatcctttctctttcttttttttttttttttacttttagctacccctcaattctggtgttcagtaacaatgtattccacttaaaagagagaaatcatattaattattctaagatataaacacttaattttattcatgctcttgaattactttcctttctaccgcatgtttgtgtagctgttatatgagtcctttctactgatgtagctgtcattccttcaactcagttcttgccaaacactgagctatgtctggagatacaaagataactactcttgttgaagagatgccagtttagtgggggagacagacatgtaaacagatctgtatctgagatagatggcctgggtaggaaaagaatatatatagcacaaataactcagtggacctgcaaaaacagagcttgaggccatgatataccacaaagacccaccaaggcacaagcactgtcaacatgaaggtaaggcttccatttttgcctctttcaatctgggtacatctattctacatactctgcctttcctcctgttacaggaaaagaaggaacctcaattctacctaaagtcaatcttctccttgagctagagatccagcccctctcccataatgaggtacacggcccctacaaagatccactctcctgcattatcaaatcctccctccctgtggtatcattccagtccacacacacacataccttaacatcatcctccct

SEQ ID NO: 1698 - DNA, 518 bp, Artificial
  cDNA Sequence
attaccatccatgtgcatcagagagatatttttgatgacttggtaaaaatgcatatcaaatcacctactgactttgaatggctaaaacagagtagattttattttaaggaagatttggatcaaactgtggtgtctattacagatgttgattttatttaccaaaatgaatttctgggatgtactgatcgtcttgttatcactccattaacagatagatgctatatcacgttagctcaggccttgggcatgaacatgggaggtgctcccgcaggacctgctggcactggcaaaacagaaaccacaaaagacatgggaaggtgtttgggaaaatatgtggtcgtgttcaattgctcagatcaaatggatttcagaggcctaggaaggattttcaaaggcaagtcttgcacagtcgggttcctggggctgttttgatgagtttaacagaattgaattgcctgtattatcagtggcagcacaacaaatttatattgttttgacagcaagaaaagaaagaaaga

SEQ ID NO: 1699 - DNA, 466 bp, Artificial
  cDNA Sequence
ctgacgttagctaatggagatcgcattcccatggcccctagttgtaagcttctgtttgaagtccacaatatcgagaacgcctctcctgccacggtttctaggatgggcatggtctatatcagcagctctgctctcagctggaggccaatcttacaggcatggttgaagaaacgcactgcacaggaagctgctgtattcctgacactgtatgagaaagtctttgaagatacatacacatatatgaagctaaatctcaatcccaaaatgcagctcttggagtgcaactatattgtgcaagtaagatttttttttgtacatttactacttcgattttgatttttttttcactcagttgcagtttacagccatctgaaatagaaagttcagacagtccataaaaatcatttgatgatgtggctgtaaaagctctgataattttgatttctattaaagatcttcttaatga

SEQ ID NO: 1700 - DNA, 220 bp, Artificial
  cDNA Sequence
gatctctcaattcagaatggcattattgtgacaaaggccaccagatacccactcctcatagacccacaaactcaaggcaaaacttggattaaatcaaaggaaaaagaaaatgatttacaggtgacatctctgaaccataaatattttcgcacacacttggaggacagcctttccttgggccgaccccttctcattgaggacattcatgaagagctggatc

SEQ ID NO: 1701 - DNA, 255 bp, Artificial
  cDNA Sequence
gatctgaccccaccaatcaaattgatgcattggccaagaaactgaaactggaatgtagaactatctcaatggggcaaggacaagaagtacatgctcgaaagctgattcagatgtcaatgcagcagggtggttgggtattactacaaaattgccaccttggcctggaattcatggaagaattactagagacgctaattaccactgaagccagtgatgattctttccgagtatggataactacggagccccatgatc

SEQ ID NO: 1702 - DNA, 567 bp, Artificial
  cDNA Sequence
ggaggcagagtgacagatgactttgacaaacgtctacttaattgctttgccagagtctggttcagtgagaagatgtttgaaccgtcattctgcttttatactggatataaaatccccttatgcaaaaccttagaccagtattttgaatacatccagtcactgccatccctagataaccctgaagtctttgggcttcaccctaatgctgatatcacgtatcagagtaacactgcttctgctgttcttgaaacaattaccaacattcaacccaaagagagtggaggtggtgtgggagagacccgggaggctattgtttatagattatctgaagatatgctgagtaaactccctcctgattacattcctcatgaggtgaaatctcgtttgataaagatgggccatcttaattcaatgaacatatttcttagacaagaaattgacagaatgcaaagagtcatttcaatactccgcagtagcctgagtgatctaaaattggccattgaaggaacaatcattatgagtgagaatctgagagatgctctggacaacatgtatgatgctcgtata

SEQ ID NO: 1703 - DNA, 436 bp, Artificial
  cDNA Sequence
gagccactagaagccacatgttctgccatgtggagaagaatggggacttgggaatctgtggctctgagtgcaacaacacctttagaacaatgtgtaaaccttcttcttactgtcggcccctctgcaacctggagacagagcaggtctcactggagcaacagtattgctaatgtaggagtcactggtgcgagaagcagccactagagagagccacctgcaggcctggcacagagacaaactcaccccttttcttcttggttgtttccaaagaaatgttttcatgtaatcctgagctttagagacaccaggagaagaaatctaagctacctttgtgtttcctaaactaacccagaacaatgacagcccttcctattcccccaaaatatcctggctctgccgcttgttagctgcataaacttgaacaaaaaaacatgaa

SEQ ID NO: 1704 - DNA, 447 bp, Artificial
  cDNA Sequence
gtaaaaatatgggtataatagtaggattgttaggagggttaaatataatgtttagaataccctcctgcatattaaatgtgcatttttttctccagcaaggttgctatgagcatcttagcacatctcttgaagaggaagctagggaataagaagagtgggtgtggggagccctggggacctttagacagtggagttgcttgacttctggaggttagtgcagcctgcatgggggatctagaccagcgaggaatcatctcaaaataaacccacagcaccaattagaccacaagggactaactgtcaacagttaacagcatgtgatcctgagaggcgatggaaacagtgaattgccgggccagggccatctccgcctggctgtggaagaggaacgggatcccttcctggactgcataagccccaggaaacagcaactggagagcagatttg

SEQ ID NO: 1705 - DNA, 383 bp, Artificial; identical to SEQ ID NO: 880
  cDNA Sequence

SEQ ID NO: 1706 - DNA, 400 bp, Artificial
  cDNA Sequence
gcagcccccgcgctccccaataaaggatgcacccaccgagcccgaggactgaaacattgtttaggggaccccaggcactgaagggcgggttcctggagatggacatttggagtgcggtgccaggggcttgggaggattcccgcgtatacgtggtgtgaaagtcagtctttgaatgtagagcagatcaatgtggaatgaggactgaaaggtctgtcaactgaaaaaaaaaacaagaatgaatataaaaaatcacaaattaaataaaccatggtccatccatattaatagacattactcagtgattatacaatataagcttatgggagcaagggagttcctgaatatccttgctgactgtgccgaaatgcaagacctacctaccctctaactctgagccact

SEQ ID NO: 1707 - DNA, 1368 bp, Artificial
  cDNA Sequence
atcgcgccattcctagttaaggcggcacagggccgaggcgtagtgtgggtgactcctccgttccttgggtcccgtcgtctgtgatactgcagcgcagccatggcagaaccgcagcccccgtccggcggcctcacggacgaggccgccctcagttgctgctccgacgcggaccccagtaccaaggattttctattgcagcagaccatgctacgagtgaaggatcctaagaagtcactggatttttatactagagttcttggaatgacgctaatccaaaaatgtgattttcccattatgaagttttcactctacttcttggcttatgaggataaaaatgacatccctaaagaaaaagatgaaaaaatagcctgggcgctctccagaaaagctacacttgagctgacacacaattggggcactgaagatgatgagacccagagttaccacaatggcaattcagaccctcgaggattcggtcatattggaattgctgttcctgatgtatacagtgcttgtaaaaggtttgaagaactgggagtcaaatttgtgaagaaacctgatgatggtaaaatgaaaggcctggcatttattcaagatcctgatggctactggattgaaattttgaatcctaacaaaatggcaaccttaatgtagtgctgtgagaattctcctttgagatttcagaagaaaggaaacaatgtgattcaagatatttacataccagaagcatctaggactgatggatcactgtcccgattcaaattattcttcagtccatttccccttcctatttcagctgttccttttcacctaactgttcagtcattctggttttcaagcagtgctttatctcatgtccttgaatatagttgtgtaactttattttttaggtaataattagaacagttcccttcagaggctgcatttgccttcttctgccacctaaatattacttcccttcaaatctgcctttgaatcatcatttttaaaaaaaaattaacatgtttttgttgtagttatcttctggggtttcaattcctcagaaacaacttttttcacaacggaaaggaaagaacactagtgttctttcagtaaagtacaaagtgtttattttacaaaagagtaggtactcttgagagcaattcaaatcatgctgacaaggatactgatagaaaaagtgatttcttcttattataaagtacatttaaagttcaaggactaaccttatttatttgggaaaggggaggaggaaggaaatgatatggtacccagacactgggctaggctgcaactttatctcatttaatactcccagctgtcatgtgagaaagaaagcaggctaggcatgtgaaatcactttcatggatt

SEQ ID NO: 1708 - DNA, 569 bp, Artificial
  cDNA Sequence
atcgcgccattcctagttaaggcggcacagggccgaggcgtagtgtgggtgactcctccgttccttgggtcccgtcgtctgtgatactgcagcgcagccatggcagaaccgcagcccccgtccggcggcctcacggacgaggccgccctcagttgctgctccgacgcggaccccagtaccaaggattttctattgcagcagaccatgctacgagtgaaggatcctaagaagtcactggatttttatactagagttcttggaatgacgctaatccaaaaatgtgattttcccattatgaagttttcactctacttcttggcttatgaggataaaaatgacatccctaaagaaaaagatgaaaaaatagcctgggcgctctccagaaaagctacacttgagctgacacacaattggggcactgaagatgatgagacccagagttaccacaatggcaattcagaccctcgaggattcggtcatattggaattgctgttcctgatgtatacagtgcttgtaaaaggtttgaagaactgggagtcaaatttgtgaagaaacctgatgatggtga

SEQ ID NO: 1709 - DNA, 567 bp, Artificial
  cDNA Sequence
atcgcgccattcctagttaaggcggcacagggccgaggcgtagtgtgggtgactcctccgttccttgggtcccgtcgtctgtgatactgcagcgcagccatggcagaaccgcagcccccgtccggcggcctcacggacgaggccgccctcagttgctgctccgacgcggaccccagtaccaaggattttctattgcagcagaccatgctacgagtgaaggatcctaagaagtcactggatttttatactagagttcttggaatgacgctaatccaaaaatgtgattttcccattatgaagttttcactctacttcttggcttatgaggataaaaatgacatccctaaagaaaaagatgaaaaaatagcctgggcgctctccagaaaagctacacttgagctgacacacaattggggcactgaagatgatgagacccagagttaccacaatggcaattcagaccctcgaggattcggtcatattggaattgctgttcctgatgtatacagtgcttgtaaaaggtttgaagaactgggagtcaaatttgtgaagaaacctgatgatggt

SEQ ID NO: 1710 - DNA, 480 bp, Artificial
  cDNA Sequence
atcgcgccattcctagttaaggcggcacagggccgaggcgtagtgtgggtgactcctccgttccttgggtcccgtcgtctgtgatactgcagcgcagccatggcagaaccgcagcccccgtccggcggcctcacggacgaggccgccctcagttgctgctccgacgcggaccccagtaccaaggattttctattgcagcagaccatgctacgagtgaaggatcctaagaagtcactggatttttatactagagttcttggaatgacgctaatccaaaaatgtgattttcccattatgaagttttcactctacttcttggcttatgaggataaaaatgacatccctaaagaaaaagatgaaaaaatagcctgggcgctctccagaaaagctacacttgagctgacacacaattggggcactgaagatgatgagacccagagttaccacaatggcaattcagaccctcgaggattcggtaag

SEQ ID NO: 1711 - DNA, 1104 bp, Artificial
  cDNA Sequence
aggctaatccaaaaatgtgattttcccattatgaagttttcactctacttcttggcttatgaggataaaaatgacatccctaaagaaaaagatgaaaaaatagcctgggcgctctccagaaaagctacacttgagctgacacacaattggggcactgaagatgatgagacccagagttaccacaatggcaattcagaccctcgaggattcggtcatattggaattgctgttcctgatgtatacagtgcttgtaaaaggtttgaagaactgggagtcaaatttgtgaagaaacctgatgatggtaaaatgaaaggcctggcatttattcaagatcctgatggctactggattgaaattttgaatcctaacaaaatggcaaccttaatgtagtgctgtgagaattctcctttgagatttcagaagaaaggaaacaatgtgattcaagatatttacataccagaagcatctaggactgatggatcactgtcccgattcaaattattcttcagtccatttccccttcctatttcagctgttccttttcacctaactgttcagtcattctggttttcaagcagtgctttatctcatgtccttgaatatagttgtgtaactttattttttaggtaataattagaacagttcccttcagaggctgcatttgccttcttctgccacctaaatattacttcccttcaaatctgcctttgaatcatcatttttaaaaaaaaattaacatgtttttgttgtagttatcttctggggtttcaattcctcagaaacaacttttttcacaacggaaaggaaagaacactagtgttctttcagtaaagtacaaagtgtttattttacaaaagagtaggtactcttgagagcaattcaaatcatgctgacaaggatactgatagaaaaagtgatttcttcttattataaagtacatttaaagttcaaggactaaccttatttatttgggaaaggggaggaggaaggaaatgatatggtacccagacactgggctaggctgcaactttatctcatttaatactcccagctgtcatgtgagaaagaaagcaggctaggcatgtgaaatcactttcatggatt

SEQ ID NO: 1712 - DNA, 741 bp, Artificial
  cDNA Sequence
ggtcatattggaattgctgttcctgatgtatacagtgcttgtaaaaggtttgaagaactgggagtcaaatttgtgaagaaacctgatgatggtaaaatgaaaggcctggcatttattcaagatcctgatggctactggattgaaattttgaatcctaacaaaatggcaaccttaatgtagtgctgtgagaattctcctttgagatttcagaagaaaggaaacaatgtgattcaagatatttacataccagaagcatctaggactgatggatcactgtcccgattcaaattattcttcagtccatttccccttcctatttcagctgttccttttcacctaactgttcagtcattctggttttcaagcagtgctttatctcatgtccttgaatatagttgtgtaactttattttttaggtaataattagaacagttcccttcagaggctgcatttgccttcttctgccacctaaatattacttcccttcaaatctgcctttgaatcatcatttttaaaaaaaaattaacatgtttttgttgtagttatcttctggggtttcaattcctcagaaacaacttttttcacaacggaaaggaaagaacactagtgttctttcagtaaagtacaaagtgtttattttacaaaagagtaggtactcttgagagcaattcaaatcatgctgacaaggatactgatagaaaaagtgatttcttcttattataaagtacatttaaagttcaa

SEQ ID NO: 1713 - DNA, 647 bp, Artificial
  cDNA Sequence
atcgcgccattcctagttaaggcggcacagggccgaggcgtagtgtgggtgactcctccgttccttgggtcccgtcgtctgtgatactgcagcgcagccatggcagaaccgcagcccccgtccggcggcctcacggacgaggccgccctcagttgctgctccgacgcggaccccagtaccaaggattttctattgcagcagaccatgctacgagtgaaggatcctaagaagtcactggatttttatactagagttcttggaatgacgctaatccaaaaatgtgattttcccattatgaagttttcactctacttcttggcttatgaggataaaaatgacatccctaaagaaaaagatgaaaaaatagcctgggcgctctccagaaaagctacacttgagctgacacacaattggggcactgaagatgatgagacccagagttaccacaatggcaattcagaccctcgaggattcggtcatattggaattgctgttcctgatgtatacagtgcttgtaaaaggccatgccaaccgtgcttgtactgctagaagcactttatgtttcctttttgggtgaaatggatttatgtgagtgctttaaacaaatagcaatacttatagactgaaataaaatgaaacttcaaata

SEQ ID NO: 1714 - DNA, 1368 bp, Artificial; identical to SEQ ID NO: 1707
  cDNA Sequence

SEQ ID NO: 1715 - DNA, 246 bp, Artificial
  cDNA Sequence
accatggttgctgacagaactaaagtctcctgcaagtcctggcagtcagtaacttttgaaaggcagcctgcctccttcatccgtatcgttgggacacacaacacagcaaatgaggtgttccactgtgtccactttgagtgtccagagcagcagagcagccagaaggaggaaaatagtgaggaatcggggacaggggacaccagcctggccggtcagcagctcgactcccatgcgctgcgggcgcct

SEQ ID NO: 1716 - DNA, 334 bp, Artificial
  cDNA Sequence
acagaaggtgatggcagcaggttagagcaaactcacagtaataagcagtgattgaggggttccctgaaggcagaaggaaaaagatatacaaatagcaatgttaagattctggactagccaggcactgtagctctcgcctgtaatcccagcactttgggaggctgaggcagcgctgtgattacaggtgtgagccaacataactggcctagaatatcgtgttgtaaccacatattttcccaaaactgtatgcactgtgcaaaaagtaaacctgggaaacatttgatgttaaactgttttctttaaaaaaaaaaaaaaaagaaaagaaaatacagta

SEQ ID NO: 1717 - DNA, 733 bp, Artificial
  cDNA Sequence
tgagagatgctctggacaacatgtatgatgctcgtatacctcagctctggaaaagagtgtcttgggattcgtccacactgggcttctggttcactgaacttttggaaagaaatgctcagttttctacgtggatatttgaagggaggcctaatgtgttttggatgactggtttctttaatccccaaggcttcctcacagcaatgaggcaagaagtgacccgtgcccacaaaggctgggcactggacactgtgaccatccacaatgaagttctgagacagaccaaggaggagatcacgtcaccccctggggaaggtgtgtatatttatgggctctacatggatggagcagcctgggacagacggaatgggaagctcatggaatccacccccaaggtactcttcacgcagttacccgtgctccacatctttgccattaactccacggcacccaaggaccccaagctgtatgtgtgtcctatttacaagaaacccaggcgaactgatttgaccttcatcactgtggtatatttacgaacagtgttgtccccggatcactggatcctgagaggagtggcccttttgtgtgacatcaagtaagttcatttccatctgctcagggcaccagaacccacatagacagcctgtgctattgagggactcagtgatgtgtgtgtcttttctccccagtaattccttaattactctttctacattaaaaagttgatgttctaaaa

SEQ ID NO: 1718 - DNA, 779 bp, Artificial
  cDNA Sequence
gggatagcgcggagcacgcagcagcgagcggagcgcgggcggcggcgccgtacctcgggctgcgggagcgcgggcgccctggggtcctcggaatcacaatgaggacctagggcatctgtctgctgacgccccctggcctgcagtgaccatggccccccgcaagaggagccaccatggcctgggcttcctgtgctgcttcgggggcagtgacatccccgaaatcaacctccgggacaaccaccctctgcagttcatggagttctccagccccatcccgaacgcagaggagctcaacatccgctttgcagagctggtggatgaattggatctcactgacaaaaaccgagaggctatgtttgcactgccccctgagaagaaatggcagatctactgcagcaagaagaagccctgttctaggtgttggaggaacaacagtgaataaaatagaaaaaggaaattctgctgtcctggagcttacactcaaagaaataggattctctttttcaaaaacgcttaaagcaggacctgctgcatcccaggactggggcttgctgggagacagacaaagaagcagagtctggactctctcgtgcctgctcccaggcatggagggagcaggaggaccccaacaagctggcaaccagctggcctgactattacatcgaccgcatcaattccatggctgcgatgcagagtctgtacgcgtttgatgaggaggagacggagatgaggaaccaagtcgtggaagacctgaagacagccctccggacacagcctat

SEQ ID NO: 1719 - DNA, 568 bp, Artificial
  cDNA Sequence
agagctggagtgagaaggaatgggaggagaagtctatgcagcagggggatgggctcagccagcatccccaccctctgcagagcaaatgcccccgtcccatttcctgtggcatggacacagatcacaatgaggacctagggcatctgtctgctgacgccccctggcctgcagtgaccatggccccccgcaagaggagccaccatggcctgggcttcctgtgctgcttcgggggcagtgacatccccgaaatcaacctccgggacaaccaccctctgcagttcatggagttctccagccccatcccgaacgcagaggagctcaacatccgctttgcagagctggtggatgaattggatctcactgacaaaaaccgagaggctatgtttgcactgccccctgagaagaaatggcagatctactgcagcaagaagaaggagcaggaggaccccaacaagctggcaaccagctggcctgactattacatcgaccgcatcaattccatggctgcgatgcagagtctgtacgcgtttgatgaggaggagacggagatgaggaaccaagtcgtgga

SEQ ID NO: 1720 - DNA, 631 bp, Artificial
  cDNA Sequence
ccctgcctgaggctcacagtacaagtcagtcaaattgttcagggcagcagtggtgtctggagacctggtttgagttcctaggttcatacctagcgtccttctgagcctcaagtttcttcgtctgtaaaaagagaagatgaaagtttgagataaacctcgaacatgatcacaatgaggacctagggcatctgtctgctgacgccccctggcctgcagtgaccatggccccccgcaagaggagccaccatggcctgggcttcctgtgctgcttcgggggcagtgacatccccgaaatcaacctccgggacaaccaccctctgcagttcatggagttctccagccccatcccgaacgcagaggagctcaacatccgctttgcagagctggtggatgaattggatctcactgacaaaaaccgagaggctatgtttgcactgccccctgagaagaaatggcagatctactgcagcaagaagaaggtgccctctctgacccctctggccacatctcagggttcatggcatggggtggctcttgctgccttggcatgctcatgcattcacctgatgtttattacatgccagccctgttctaggtgttggaggaacaacagtgaataaaatagaaaaag

SEQ ID NO: 1721 - DNA, 550 bp, Artificial
  cDNA Sequence
caggataatctggagttccgcctacatctacggtatgaattcctgatgctgggtatacagcctgtgattgacaagctccggcaacatgaaaatgccatcctggacaaacatttagacttcttcgagatggtgcggaatgaggatgacctggagctagccaggaggtttgacatggtccacatcgacaccaagagtgcttcccagatgtttgagttgatccacaagaagctgaagtacacggaggcctacccctgcctgctctctgtgctgcaccactgcctgcagatgccctacaaacggaacggtggctacttccagcagtggcagctcctggaccgcatcctccagcagattgtcctccaggatgagcggggtgtggaccctgacctggctcccttggagaacttcaatgtcaagaacatcgtcaacatgctcatcaacgagaatgaagtgaaacagtggcgagaccaggcagagaagttccggaaagaacacatggagcttgtgagccgtctggagaggaaggagcgggaatgcgagacaaagacat

SEQ ID NO: 1722 - DNA, 277 bp, Artificial
  cDNA Sequence
cctagccataggcaacttcatgaacaaagggcagcgtgggggcgcctacgggttccgggtggccagcctcaacaagatcgctgacaccaagtccagcatcgacagaaacatctctctgctccattacctgatcatgatcctggagaagcattttcctgatattctaaacatgccttcagagctgcaacatcttccagaagctgccaaagtcaacctagcagaactggagaaggaggtgggcaacctcaggaggggcctgagagcggtggaggtggtg

SEQ ID NO: 1723 - DNA, 3794 bp, Artificial
  cDNA Sequence
acagaaacatctctctgctccattacctgatcatgatcctggagaagcattttcctgatattctaaacatgccttcagagctgcaacatcttccagaagctgccaaagtcaacctagcagaactggagaaggaggtgggcaacctcaggaggggcctgagagcggtggaggtggagctggagtatcagaggcgccaggtacgggagcccagtgacaagtttgtccctgtcatgagcgacttcatcacggtgtccagcttcagcttctccgagctggaggaccagctaaatgaggccagggacaagttcgccaaggccttgatgcacttcggggagcatgacagcaagatgcagccagacgaattctttggcatctttgataccttcttgcaggccttctcagaggcccggcaggatctagaggccatgaggaggaggaaggaggaggaggagcggcgggcgcgcatggaagccatgctgaaggagcagagggaacgtgagcggtggcagcggcagcggaaggtcctggctgcaggcagctcgctggaggagggaggagagttcgatgacctggtgtcggccctgcgctctggggaggtcttcgacaaggacttatgcaagctcaagcgcagccgcaagcgatcagggagccaggccctggaagttacccgggagcgggcaataaaccggctaaattattgacctggggaactagccacacaggaggccgggagacagggactggtgagaatggggctgagtggaggaggtggtgatatttaaaccatttggtgcttggtttagagccttgggctgggtcctgggatggggggctgtgtgtggctggaccaggtgtctccccacgcttaccttaaggggctcctcttatctccccttcacatgattccttctgtgccctggccccaggtattattctgaggctgccttggatggcctcaggccaggtaaccccaggctgaaggggccctgctccccatcccctaccatgggcacccatgtgctggcacagaacagttccagatctagactggagaggtccacagccttgtccagagttcctgtgtagcacggggagcaatgatggagggagcccctgagagggaatctggtgagggaatccagactcccttctctcaaggggaggctcaacagaacattgacctgggggcaaactttcctcttgaatgggaacagaggaggcattatatattctagttagatcagctctggtaggttccagagaacagtcaatgttggaaggatgatgcagggaccaaagccatcaggacagagtagcagtgtctgtttcccatgtcacaagtcctctggcctctccctgcatgtcttaagtatctttcccttccttctctaccctcacctccatcctgtctactaatccacagtcctagaagactcaccttgggtttccacagctatggctcactaccaggtgcttgatgaatctggcgaggggctcaagacagacctcatgcatcaccacacctcatgccttttgggcatctcccatgtccccatctcctggacacctggccattgttgtgaagccagacagtgacctcaaatgttgccttggagtcccctacagcccctcagcagagggcagcacttgaatgcttagctccatcccatagttctctacttcatataaattgctcaggccctcccaccccttctctaacactagcttcaaggcagaagccacagcagcctctgtccagcctgcaggtggccacttggaaccatgtgtccactggcgttggggagttggttcctgagaggtctgagggccagagctgccctctacattaacatgctgtctctaagggtggcccctcctctcaggcgttcagatggtgcgaacagcagagcaggcaagggaaactggggagatggggatggaggaggaaggctgatatcctctggggagcacatcacctgaaggtgccaaggaggaaggctgagaggggggccaccccatttctggtacccaatttggttcttcagcccaacttgcaaggggttccttctggtcctcccatccactgccaccttccattttgtccatctcatgctggccttggtggatgggatggctgtatctagacaaaatttttctaaaactccatcaaggctcttattcaataccacgttccgagttggcctttcatcttctttgagactggccctgcctaacctctaccatcaatgagctcttggcccttctgcccttccctgtgtttctcactttccaacctaatccctggctcagggttattgccagtggagactggtgagctgggcctactctcagctgcctatcttctgcctttcacttgcatccaactcctggggctgggaccgtagtagctgcgggggggaagaaacacagggtcggtgagcccagcatgtgcgttggtttgagggggcgggcggtgtgtgtgtgttctggtgggagggatctgagcaagtgcaagcctggctgacacaggtgtgaagaggccatcctggaacccaggtgagggcaagatgaaggcttccaggcagaacagctgcagagagtttggctatatgcatctgcagccccaagagctcccactgcaagacaagtgttggggaagatgggaggttgtgggtgaggcctctaaaggtcctctcccaaactgaccaggctgatgtcaacctaaccccctcaggggcagggaacaggggagggctccacaagcgtgtctggcattcccacccaccatggaagactggatacgcacctggaaacaaaaggactatggaagctgttcaagatacatttgatcttcagaaaagcagaatttggttcaactgttgacagaggacacaaatacgttgttccagagctcagccttctcactctaaaagaaagatatttttctatttattttctacatctggccagtggctctggtgctagatgccactgtagccagatctccaacagtgccttggaccatggactcatactcaactgagtaagaaggggctggtgcccagtcggggtggctgagctggtccttaataggttgtttcttggtcttgctttcttcatgccctccccactgctcctgccacctttagataagtttctctagctaattttgtggccaatgtaaaattcgtcatcaacctaacaaacacaaccttctcagcagcatttctcccctgtgatggaaataaagtgtttagggcagtgggaggagaaaattctccaggtgaatggggaagggtctgttccagcctctccctactcccatcccatttccaccaactggggaactgtgactatctatctcccccgacttctaccagggatgccttcacgccaaggctgttctcaccagctgcctcagatgacaaatgaggctaatggacataatctacagtgtcctttttcacttgcaccttttttataagaatatattgtaatactaaaaaatattaaattcataccatccctacccagtctgcctttaaacttgtgccttcttcctatgaggggatctggggtgggctgagagtgtgctggagccagcttgtaccagctctgtgagaaccaattgtttacattttcagaaattttgcaagccatttgacatactggtagcttgaaattattcaacatgggagtatttatatcacaaattgtcttttccagagagctggttgtttaatatttgccagcacaccttggcatagggcagaggggaggcaggcagggggcac

SEQ ID NO: 1724 - DNA, 451 bp, Artificial
  cDNA Sequence
ttcttgcatctgcaaagttggcatcgtagctttatttgtgcgctgtgagggtgaaggcaatctatcatcaacttttctttccctgatatgctccagaataaagaggggtgggtggaacagccgtgaacagggccaggtgtgggctgtgtggtctggcaggagtccttagggctatggcccatgtgtgcacatcctgtttcagaagaggggggccagaggaaaaggggccagcaggaccgggcaactgttaagctgaaaggctgcaagtctgatgggacacagacttgggcagaaggagagatgaacagctcctgctcagaggccccagctcgcaggtgatcccgcagggatacctcagagtttccaaagaggcagacctacatgggatgctcaccttgaggttcccatcagctgtgattcgcaggcggttgcaggtcccacagaaatgctc

SEQ ID NO: 1725 - DNA, 1198 bp, Artificial
  cDNA Sequence
ctgcccctccccgcccttgctgggatgaccccgggggcgagtgcccggccagtgtgctcccgaagcgggctgcggttccgctcgtatcaggcttcatggcggcgcggccactgtcccggatgctgcggcggcttctgaggtccagcgcccggagctgcagctcaggggctccggtgacccagccctgccccggggagtccgcgcgagctgcctcggaggaggtgtccaggcggaggcagttcctgcgggagcatgcggcccccttctccgccttcctcacagacagcttcggccggcagcacagctacctgcggatctccctcacagagaagtgcaacctcagatgtcagtactgcatgcccgaggagggggtcccgctgacccccaaagccaacctgctgaccacagaggagatcctgaccctcgcccggctctttgtgaaggaaggcatcgacaagatccggctcacaggtggagagccgcttatccggccggacgtggtggacattgtggcccagctccagcggctggaagggctgagaaccataggtgttaccaccaatggcatcaacctggcccggctactgccccagcttcagaaggctggtctcagtgccatcaacatcagcctggacaccctggtgcctgccaagtttgagttcattgtccgcaggaaaggcttccacaaggtcatggagggcatccacaaggccatcgagctgggctacaaccctgtgaaggtgaactgtgtggtgatgcgaggccttaacgaggatgaactcctggactttgcggccttgactgagggcctccccctggatgtgcgcttcatagagtatatgccctttgatggcaacaagtggaacttcaagaagatggtcagctataaggagatgctagacactgtccggcagcagtggccagagctggagaaggtgccagaggaggaatccagcacagccaaggcctttaaaatccctggcttccaaggccagatcagcttcatcacatccatgtctgagcatttctgtgggacctgcaaccgcctgcgaatcacagctgatgggaacctcaaggtctgcctctttggaaactctgaggtatccctgcgggatcacctgcgagctggggcctctgagcaggagctgctgagaatcattggggctgctgtgggcaggaagaagcggcagcatgcagg

SEQ ID NO: 1726 - DNA, 300 bp, Artificial
  cDNA Sequence
agtgtgctcccgaagcgggctgcggttccgctcgtatcaggcttcatggcggcgcggccactgtcccggatgctgcggcggcttctgaggtccagcgcccggagctgcagctcaggggctccggtgacccagccctgccccggggagtccgcgcgagctgcctcggaggaggtgtccaggcggaggcagttcctgcgggagcatgcggcccccttctccgccttcctcacagacagcttcggccggcagcacagctacctgcggatctccctcacagagaagtgcaacctcagatgtgag

SEQ ID NO: 1727 - DNA, 903 bp, Artificial
  cDNA Sequence
aggtgaactgtgtggtgatgcgaggccttaacgaggatgaactcctggactttgcggccttgactgagggcctccccctggatgtgcgcttcatagagtatatgccctttgatggcaacaagtggaacttcaagaagatggtcagctataaggagatgctagacactgtccggcagcagtggccagagctggagaaggtgccagaggaggaatccagcacagccaaggcctttaaaatccctggcttccaaggccagatcagcttcatcacatccatgtctgagcatttctgtgggacctgcaaccgcctgcgaatcacagctgatgggaacctcaaggtctgcctctttggaaactctgaggtatccctgcgggatcacctgcgagctggggcctctgagcaggagctgctgagaatcattggggctgctgtgggcaggaagaagcggcagcatgcaggcatgttcagtatttcccagatgaagaaccggcccatgatcctcatcggtgggtgacccatcaagttatttttgatgttccccaattccccaccagccaatccaagcattttctcctgggacccgctccatgttcagggtctaagacccagaatgagtttctccagccaggtggccactttatggaaaggatgcagggtcccccagacccctcctctagcccagcagcggctggggtctggctcctttcagagacactacacttcccgtgcagactcagatgccaactcaaagtgccttagcccaggttcctgggcttctgctgccccctcaggaccccagctaacctcagaacaactaactcatgtggactcggaaggacgggcagctatggtagatgtgggcaggaagccagacacagagcgggtggctgtggcttcagccg

SEQ ID NO: 1728 - DNA, 490 bp, Artificial
  cDNA Sequence
tagggatggtatgaatttaatattttttagtattacaatatattcttataaaaaaggtgcaagtgaaaaaggacactgtagattatgtccattagcctcatttgtcatctgaggcagctggtgagaacagccttggcgtgaaggcatccctggtagaatagagaactatgggatggagctaagcattcaagtgctgccctctgctgaggggctgtaggggactccaaggcaacatttgaggtcactgtctggcttcacaacaatggccaggtgtccaggagatggggacatgggagatgcccaaaaggcatgaggtgtggtgatgcatgaggtctgtcttgagcccctcgccagattcatcaagcacctggtagtgagccatagctgtggaaacccaaggtgagtcttctaggactgtggattagtagacaggatggaggtgagggtagagaaggaagggaaagatacttaagacatgcagggagaggcc

SEQ ID NO: 1729 - DNA, 346 bp, Artificial
  cDNA Sequence
aaccccttgcaagttgggctgaagaaccaaattgggtaccagaaatggggtggcccccctctcagccttcctccttggcaccttcaggtgatgtgctccccagaggatatcagccttcctcctccatccccatctccccagtttcccttgcctgctctgctgttcgcaccatctgaacgcctgagaggaggggccacccttagagacagcatgttaattagagaactatgggatggagctaagcattcaagtgctgccctctgctgaggggctgtaggggactccaaggcaacatttgaggtcactgtctggcttcacaacaatggccaggtgtccaggagatggg

SEQ ID NO: 1730 - DNA, 440 bp, Artificial; identical to SEQ ID NO: 900
  cDNA Sequence

SEQ ID NO: 1731 - DNA, 466 bp, Artificial
  cDNA Sequence
ctatccagatattcgcgagggtgaagccccctgtccggaagcaccaacaagggatttattccatagatgaagatgaaaaattaatacctagcttggaaatcatcttaccacgtgatttggcagatgggtttgtgaataataagcgagaaagctacaaatttaaatttcaaagaatttttgatcaggatgcaaaccaagagaccgtttttgaaaacattgccaaaccagttgctgggagtcctacaggaactggatcaacccagcaagtctgcagttcccaaggtcttcaggatgaggcaccagtgcagttatgtagtatttttccgccaaagtgatatgttttaaactgacagattttcattgttccatttgatgctaatattttcttctaacaatagcttttctcttaatgatgccttttacttatgtaaacatgtttttctcataaaaacttaaatagtcattt

SEQ ID NO: 1732 - DNA, 486 bp, Artificial
  cDNA Sequence
ggtatgcatctgagatataaagaagaaaaagccacagctccttccttcgtgatgctcatagtctggtagaggaagaattcagtgtcctggcaggttacaatggtaccatctttgcatatgggcaaacaggcagcgggaagacattcactatcacagggggtgcagagcgttacagtgacagaggcattatcccaaggacactgtcatacatttttgaacagttacaaaaggacagcagcaaaatatatacaacacacatttcctatttggaaatctacaatgaatgtggttatgatcttttggatccaagacatgaagcctccagtttggaagatttgccactcctatgaaccaagcttcaacccgttcccactgcattttcaccattcatttgtcaagcaaggaaccaggatctgcaactgtacgacatgccaaactccatctggttgacctggctggttcagagcgagttgcaaagactggagt

SEQ ID NO: 1733 - DNA, 594 bp, Artificial
  cDNA Sequence
tgccctttcagaaaagcaccgttcgcacattccttatagaaactccatgatgaccagtgtcctaagagacagtttgggagggaactgcatgacaactatgattgcaacactctccttggagaaaaggaatcttgatgagtctatatcaacctgcagatttgcacagcgagtggcactcataaagaatgaagctgttcttaatgaagaaattaaccccagattagtgattaaacgcctacaaaaggaaatccaggaactgaaggatgaactggccatggtcactggggagcagaggacagaggcactcacagaagcagagctccttcagctggaaaaactaataacatcctttttggaagaccaggattcagacagtagattagaggttggcgcggatatgcgtaaagttcatcactgttttcatcatttaaagaaactattgaatgacaagaagatccttgaaaacaatacagtctcctctgaaagcaaagaccaagattgtcaagaaccattaaaagaagaagaatatagaaagctacgagatattctgaaacagagagataacgaaatcaatatcctggtcaacatgttaaa

SEQ ID NO: 1734 - DNA, 523 bp, Artificial
  cDNA Sequence
gtgtcctaagagacagtttgggagggaactgcatgacaactatgattgcaacactctccttggagaaaaggaatcttgatgagtctatatcaacctgcagatttgcacagcgagtggcactcataaagaatgaagctgttcttaatgaagaaattaaccccagattagtgattaaacgcctacaaaaggaaatccaggaactgaaggatgaactggccatggtcactggggagcagaggacagaggcactcacagaagcagagctccttcagctggaaaaactaataacatcctttttggaagaccaggattcagacagtagattagaggttggcgcggatatgcgtaaagttcatcactgttttcatcatttaaagaaactattgaatgacaagaagatccttgaaaacaatacagtctcctctgaaagcaaagaccaagattgtcaagaaccattaaaagaagaagaatatagaaagctacgagatattctgaaacagagagataacgaaatcagtatcct

SEQ ID NO: 1735 - DNA, 427 bp, Artificial
  cDNA Sequence
caacctgcagatttgcacagcgagtggcactcataaagaatgaagctgttcttaatgaagaaattaaccccagattagaaatccaggaactgaaggatgaactggccatggtcactggggagcagaggacagaggcactcacagaagcagagctccttcagctggaaaaactaataacatcctttttggaagaccaggattcagacagtagattagaggttggcgcggatatgcgtaaagttcatcactgttttcatcatttaaagaaactattgaatgacaagaagatccttgaaaacaatacagtctcctctgaaagcaaagaccaagattgtcaagaaccattaaaagaagaagaatatagaaagctacgagatattctgaaacagagagataacgaaatcaatatcctggtcaacatgttaaa

SEQ ID NO: 1736 - DNA, 365 bp, Artificial
  cDNA Sequence
gcgagtggcactcataaagaatgaagctgttcttaatgaagaaattaaccccagattaaaagcaccaagctcctctgatggagttctcttctgcagaaaccaatgagtgaggcaggatctgtttcagcaaaggccctggtcaggtatcagcatcacacagtgttcctgctggagagaggagacagcatgcaaagtcaagattcaggtggaactgaactgctagggtggattttgttgctgtccctacccttccagaagccctatagcattacagtgctgaatgagaaagagagttaacaaagttattagccccaagacaaaaactagttcagaatttaaggaaaataaacatattagacattgga

SEQ ID NO: 1737 - DNA, 473 bp, Artificial
  cDNA Sequence
cattacccatttttgtgtccataaaattgtccataattttaagagctgtatgttctctgtcaccaagttcaccttaatgagaagttgacattttctctgcctctttgccatttgtaggtgattaaacgcctacaaaaggaaatccaggaactgaaggatgaactggccatggtcactggggagcagaggacagaggcactcacagaagcagagctccttcagctggaaaaactaataacatcctttttggaagaccaggattcagacagtagattagaggttggcgcggatatgcgtaaagttcatcactgttttcatcatttaaagaaactattgaatgacaagaagatccttgaaaacaatacagtctcctctgaaagcaaagaccaagattgtcaagaaccattaaaagaagaagaatatagaaagctacgagatattctgaaacagagagataacgaaatcagtatcct

SEQ ID NO: 1738 - DNA, 422 bp, Artificial
  cDNA Sequence
acagagcattctgcagaagcaatgtaagtttgggaagcaattgaatttccaggaaatatccatccatgaattatgccagcaagaatgaagcacagatgaaggcagcgcccctcacttgctctggcttcagaagtgaactatgggctgctgggagcaactagtgactttgattcccatggaggggactgtgtttctttaaggatgctgacctggaggccaccgagaggctggggctggggctgaccacaacatccttcctgtggttgctggagctgctggcagggccaggcaaggccagagtgctaggggcagggtgaaggcttcagctcactgttgtagtgacgttttgtgtagatctttataagcttttgagaatgtgaaatagcaccatcaaaatataatgtcagaggatgctcacacca

SEQ ID NO: 1739 - DNA, 889 bp, Artificial
  cDNA Sequence
cagccttcaagggtgaagacgctgggggcggccgagagagcccactggggcctggacagagtgagcacacctatccgatttagcccagaaacatctatccaacttggagacagagagagagacatgaagcactcaggagaacctgctgctagagaggcaggcggaggctcagtccagggaccagtttcagttggagaagctgcgcttcctggagaactacacctgcctggaccagtgggccatggagcagtttgtgcaggtcatcatggaagcctgggtgaaaggtgtgaaccccaaaggcaactctaccaaccccagcaactgggactttggcagcagtttcttctttgcaggcacagtcgtcactaccataggatatgggaacctggcacccagcacagaggcaggtcaggtcttctgtgtcttctatgccctgttgggcatcccgcttaacgtgatcttcctcaaccacctgggcacagggctgcgtgcccatctggccgccattgaaagatgggaggaccgtcccaggcgctcccaggtactgcaagtcctgggcctggctctgttcctgaccctggggacgctggtcattctcatcttcccacccatggtcttcagccatgtggagggctggagcttcagcgagggcttctactttgctttcatcactctcagcaccattggctttggggactatgttgttggtctgaggcaaggctgtggagccaaggcggctccaggcaggagacccaggagaggctctacagcagcaagaggagtccaagtcacaccccaggacttccccatatccaagaaaggactgggaagctgaggacccacggactcttcacacagcctagacgcttcctccactccaggtagaggg

SEQ ID NO: 1740 - DNA, 419 bp, Artificial
  cDNA Sequence
gtcctggccacagcatgcccagtgctgggctctgcagctgctggggtggccgggtgctgcccctgctgctggcctatgtctgctacctgctgctcggtgccactatcttccagctgctagagaggcaggcggaggctcagtccagggaccagtttcagttggagaagctgcgcttcctggagaactacacctgcctggaccagtgggccatggagcagtttgtgcaggtcatcatggaagcctgggtgaaaggtgtgaaccccaaaggcaactctaccaaccccagcaactgggactttggcagcagtttcttctttgcaggcacagtcgtcactaccataggatatgggaacctggcacccagcacagaggcaggtcaggtcttctgtgtcttctatgccctgttgggcatcccgctt

SEQ ID NO: 1741 - DNA, 570 bp, Artificial
  cDNA Sequence
aacctcgtggtgctcaaccgactggggcatctcatgcagcagggagtaaaccactgggccagcaggctggggggcacctggcaggatcctgacaaggcgcggtggctggcgggctctggcgccctcctctcgggcctcctgctcttcctgctgctgccaccgctgctcttctcccacatggagggctggagctacacagagggcttctacttcgccttcatcaccctcagcaccgtgggcttcggcgactacgtgattggaatgaacccctcccagaggtacccactgtggtacaagaacatggtgtccctgtggatcctctttgggatggcatggctggccttgatcatcaaactcatcctctcccagctggagacgccagggagggtatgttcctgctgccaccacagctctaaggaagacttcaagtcccaaagctggagacagggacctgaccgggagccagagtcccactccccacagcaaggatgctatccagagggacccatgggaatcatacagcatctggaaccttctgctcacgctgcaggctgtggcaaggacagctag

SEQ ID NO: 1742 - DNA, 473 bp, Artificial
  cDNA Sequence
gatacgagaaaaccaaacagagactggcaaacactagagcggacatcgaaatcctctgggggcttgttaaaatacagatttctggccgggcacggtggctcacacctgtaattctaacactttgggaggccgaggaatgaacccctcccagaggtacccactgtggtacaagaacatggtgtccctgtggatcctctttgggatggcatggctggccttgatcatcaaactcatcctctcccagctggagacgccagggagggtatgttcctgctgccaccacagctctaaggaagacttcaagtcccaaagctggagacagggacctgaccgggagccagagtcccactccccacagcaaggatgctatccagagggacccatgggaatcatacagcatctggaaccttctgctcacgctgcaggctgtggcaaggacagctagttatactccattctttggtcgtcgtcct

SEQ ID NO: 1743 - DNA, 1095 bp, Artificial
  cDNA Sequence
gcggccgctcgggagccatggtggaccggggccctctgctcacctcggccatcatcttctacctggccatcggggcggcgatcttcgaagtgctggaggagccacactggaaggaggccaagaaaaactactacacacagaagctgcatctgctcaaggagttcccgtgcctgggtcaggagggcctggacaagatcctagaggtggtatctgatgctgcaggacagggtgtggccatcacagggaaccagaccttcaacaactggaactggcccaatgcaatgatttttgcagcgaccgtcattaccaccattggatatggcaatgtggctcccaagacccccgccggtcgcctcttctgtgttttctatggtctcttcggggtgccgctctgcctgacgtggatcagtgccctgggcaagttcttcgggggacgtgccaagagactagggcagttccttaccaagagaggtgtgagtctgcggaaggcgcagatcacgtgcacagtcatcttcatcgtgtggggcgtcctagtccacctggtgatcccacccttcgtattcatggtgactgaggggtggaactacatcgagggcctctactactccttcatcaccatctccaccatcggcttcggtgactttgtggccggtgtgaaccccagcgccaactaccacgccctgtaccgctacttcgtggagctctggatctacttggggctggcctggctgtccctttttgtcaactggaaggtgagcatgtttgtggaagtccacaaagccattaagaagcggcggcggcgacggaaggagtcctttgagagctccccacactcccggaaggccctgcaggtgaaggggagcacagcctccaaggacgtcaacatcttcagctttctttccaagaaggaagagacctacaacgacctcatcaagcagatcgggaagaaggccatgaagacaagcgggggtggggagacgggcccgggcccagggctggggcctcaaggcggtgggctcccagcactgcccccttccctggtgcccctggtagtctactccaagaaccgggtgcccaccttggaagaggtgtcac

SEQ ID NO: 1744 - DNA, 679 bp, Artificial
  cDNA Sequence
gcggccgctcgggagccatggtggaccggggccctctgctcacctcggccatcatcttctacctggccatcggggcggcgatcttcgaagtgctggaggagccacactggaaggaggccaagaaaaactactacacacagaagctgcatctgctcaaggagttcccgtgcctgggtcaggagggcctggacaagatcctagaggtggtatctgatgctgcaggacagggtgtggccatcacagggaaccagaccttcaacaactggaactggcccaatgcaatgatttttgcagcgaccgtcattaccaccattggatatggcaatgtggctcccaagacccccgccggtcgcctcttctgtgttttctatggtctcttcggggtgccgctctgcctgacgtggatcagtgccctgggcaagttcttcgggggacgtgccaagagactagggcagttccttaccaagagaggtgtgagtctgcggaaggcgcagatcacgtgcacagtcatcttcatcgtgtggggcgtcctagtccacctggtgatcccacccttcgtattcatggtgactgaggggtggaactacatcgagggcctctactactccttcatcaccatctccaccatcggcttcggtgactttgtggccggtgagtccctgcctctgcctcccacctc

SEQ ID NO: 1745 - DNA, 1877 bp, Artificial
  cDNA Sequence
cgcaggcgcacggcggccggcgcgggccgagcggaggcaactgctgtgcggcctgcgggcgcgcgctcccttatcggccaacggacgcgaggcgcgcgccatggaacagcggttagctgagtttcgggcggcgcggaaacgggcgggtctggcggcccaaccccctgctgccagtcagggcgcacaaaccccaggagagaaggcggaagcagcagcgactctaaaggcagccccaggctggctaaagcggttcctggtatggaaacctaggcccgcgagtgcccgggcccagcccggcctagttcaggaagcggctcagccccagggcagcacatcagagacaccatggaacacagccattcctctgccgtcgtgctgggaccagtctttcctgaccaatatcaccttcttgaaggttcttctctggttggtcctgctgggactgtttgtggaactggaatttggcctggcatattttgtcctgtccttgttctattggatgtacgtcgggacacgaggccctgaagagaagaaagagggagagaagagcgcctactctgtgttcaatccaggctgtgaagccatccagggcaccctgactgcagagcagttggagcgcgagttacagttgagacccctggcagggagataggacccagctgtgctgtcatgcagctaacctctgatgtggtcttcctcaccattggctatggatttgatttcaggtgtataggactaagggcagcttgcgggttagctctgtgactgcatagtttttctaccttctttccctgatcttttgctgccatttgatctttgatagttttggtgaaactctctaaaatacattcactgtgggtccgacgcaatttataaaaattatgtactcaagaagggagacctgtttgtttcatttctcatctgtttgggagatgattttagagcactagaaaggcactggggagattctcagcttaaaacatccagcagtttgaagtatgattaggtacatcagggctgcattgtcaatgttctctttaagtcttttaacatttatagcaattttttttttcccggagagtttaggttgcaagttttgggtttcttgtttgtttttgttttgcttcctgctttaattctttaattttcagtcattactggtattgaaaaataaaatatctttaaaacatctcctcttcagaaataggtccctcttcattgcccatcaccatcttccactctcctattattttgccactactcagtaaaggaaggtaggaagagacaaacgcctaagtgcaggtgtggggagggatttcacaagtggttattaacggccagttcagcaagaagtgttgagtgtgtacaaaggggagggctggaagtgttaactccagacccgttggctgcttgagttgtttcttatattctaaagcagcagtccctaacctttttggcaccagggaccagttttgtggaacacagtttttccatggacggggtggtggtggaggatgaaacttccacctcagatcatcaggcattagagtctcataaggagcacgcaacctagatccctcgcatgcgcagttcacaatacggttctaagggctttagagtaagcagctttttcacctgtgggcctctggtgagaaattctgtaaattgtgataatcaggctggattttaatgctgcttttccagtacaatgttagatttggctgtccctcagagccatccggtcaagcagatggtctgttctatctcacagaaaagtcttttcttccatgagttctgtctgaactgaacatgtaaaaagtatgggaaacagatgaatccctattaaacatgaagttttgattgtatttaagatacaa

SEQ ID NO: 1746 - DNA, 656 bp, Artificial
  cDNA Sequence
gagtttcgggcggcgcggaaacgggcgggtctggcggcccaaccccctgctgccagtcagggcgcacaaaccccaggagagaaggcggaagcagcagcgactctaaaggcagccccaggctggctaaagcggttcctggtatggaaacctaggcccgcgagtgcccgggcccagcccggcctagttcagttaaaaaacaatgtctaacccatgcaatgaacttttgactgtatgtctcatttccaaaggaatgagatcattgaggtggacccagagaaactgaattcagagaaaaacttccattattgagaacccaaacgctgattgccagacaaaaggatgagaggaaatgctggacctccagtttcttgttaattgctctgtttttccataagggactctgccttaagctcattttcattgacttatcatttctgggtttgctctggtgtgaaaattctcatttaattttttttcttcagattctgcctctagtttagaaaagaaaaagtctaatttacaattcatgtcagacaattttgatggcacactgtggcctgtcagagatttctttagcattctatttttttaaattatttttaatttttgtttttttaattgaaacagctttattgaaataaggtttacatactaca

SEQ ID NO: 1747 - DNA, 1666 bp, Artificial
  cDNA Sequence
acatcctccttcccactaccagattttgcttggagaaaagcagtttcctgaaataattctgtgacgagcttcttccacattaggacaaaaatgctggaagcggctcagccccagggcagcacatcagagacaccatggaacacagccattcctctgccgtcgtgctgggaccagtctttcctgaccaatatcaccttcttgaaggttcttctctggttggtcctgctgggactgtttgtggaactggaatttggcctggcatattttgtcctgtccttgttctattggatgtacgtcgggacacgaggccctgaagagaagaaagagggagagaagagcgcctactctgtgttcaatccaggctgtgaagccatccagggcaccctgactgcagagcagttggagcgcgagttacagttgagacccctggcagggagataggacccagctgtgctgtcatgcagctaacctctgatgtggtcttcctcaccattggctatggatttgatttcaggtgtataggactaagggcagcttgcgggttagctctgtgactgcatagtttttctaccttctttccctgatcttttgctgccatttgatctttgatagttttggtgaaactctctaaaatacattcactgtgggtccgacgcaatttataaaaattatgtactcaagaagggagacctgtttgtttcatttctcatctgtttgggagatgattttagagcactagaaaggcactggggagattctcagcttaaaacatccagcagtttgaagtatgattaggtacatcagggctgcattgtcaatgttctctttaagtcttttaacatttatagcaattttttttttcccggagagtttaggttgcaagttttgggtttcttgtttgtttttgttttgcttcctgctttaattctttaattttcagtcattactggtattgaaaaataaaatatctttaaaacatctcctcttcagaaataggtccctcttcattgcccatcaccatcttccactctcctattattttgccactactcagtaaaggaaggtaggaagagacaaacgcctaagtgcaggtgtggggagggatttcacaagtggttattaacggccagttcagcaagaagtgttgagtgtgtacaaaggggagggctggaagtgttaactccagacccgttggctgcttgagttgtttcttatattctaaagcagcagtccctaacctttttggcaccagggaccagttttgtggaacacagtttttccatggacggggtggtggtggaggatgaaacttccacctcagatcatcaggcattagagtctcataaggagcacgcaacctagatccctcgcatgcgcagttcacaatacggttctaagggctttagagtaagcagctttttcacctgtgggcctctggtgagaaattctgtaaattgtgataatcaggctggattttaatgctgcttttccagtacaatgttagatttggctgtccctcagagccatccggtcaagcagatggtctgttctatctcacagaaaagtcttttcttccatgagttctgtctgaactgaacatgtaaaaagtatgggaaacagatgaatccctattaaacatgaagttttgattgtatttaagatacaa

SEQ ID NO: 1748 - DNA, 1568 bp, Artificial
  cDNA Sequence
ggggacgctatctagtctaaaattacagagtcgaaaagatagtgatgatggtcccatcatgtgggttcgtccaggagaacaaatgatccctgtggctgatatgccaaagtcacctttcaaaaggaaaagaactaccaatgaaataaaaaatcttcagtacctacctcgaacaagtgagccccgtgagatgctctttgaagacaggacaagagctcatgcagatcatataggacaaggttttgaacgacagactacagctgctgttggagtgctgaaggctgtgcactgtggagagtggcctgatcaaccccgtataaccaaagatgtaatttgttttcatgctgaagatttcttagaagtagttcaacgaatgcagttagatttacatgaacctccactgtcccagtgtgtccaatgggttgatgatgcaaaactgaatcaactgaggagggaaggcattcgctatgccaggattcagctatatgataatgacatttattttattccaaggaatgttgttcatcagttcaagacagtttcagctgtatgcagtttagcatggcatattcggctcaaattatatcactcagaggaggacacttctcagaatacagctactcatgaaacaggcacatcatcagattccacatcatctgttcttggacctcacactgacaacatgatttgtgctgtaagcaaagcctccttggattctgttttttcagataaacttcattctaaatatgaattacagcagattaaacatgaacctattgcatctgtaagaatcaaggaagaacctgtgaatgttaatattcctgaaaagactacagcactgaataatatggatggcaagaatgttaaagcaaaattggatcatgttcaatttgcagaatttaagattgacatggattctaaatttgaaaatagcaacaaagatttaaaggaagaattgtgccctggaaatctaagtctagttgatacaaggcaacacagttcagcacattcaaatcaagataaaaaagacgatgacattttgtgctaaatttgcatataccatctaaaatccttttttaaaaaaatttaatgtaataaagattcatgaattctgaaagcaagccaaggacttgctcctatgtctgttacaaaacatagtttatgtagctttgtaacattcctcagtgcctgtccataactgtgaagtattaagcacttagggccagatgcactgtaaacattgcaggtttaaacataaaggagtctttaaaaaaaaatcatttacgttggaattttaggttttagaatagagctgacattaacatatatatatatatataaatatatatatatattttgtaatatgagccagaattctttttcaacaatttaaagcttttccatagagcttatttatatccttttttttcattttaaatgtgtcagcactgtagtgtaaatagcttttaaatatctttttagtgtgatttatactgaaatgtgagccacttaataaaggttcatatgttcatattaataaatatgttttctgttgagtctgtaaagacaaa

SEQ ID NO: 1749 - DNA, 1021 bp, Artificial
  cDNA Sequence
aggtcggttggtttgcactggcggacaaatggtccaattaccgcggaaaagggacctctgaatccagattggcgtcctctctacctatagggtaggctcaggggcggtgagaaccagccccggatgtgggcgcggcactgaggtagaactgagagatcctctaccgcagtcgtttgaggaggcggaactgaagttttttcttaattatcatgtgacgggttctggatttaatggggggaaaagggcggaaaaggacaaggatccaaactggcgaatttgctgatcttcgcgtccctctccgctttccggccggcagcgctgccagggtatatttccttttttccgatcctgcaacagcctctttaaactgtttaaatgagaatgtccttggctcagagagtactactcacctggcttttcacactactcttcttgatcatgttggtgttgaaactggatgagaaagcaccttggaactggttcctcatattcattccagtctggatatttgatactatccttcttgtcctgctgattgtgaaaatggctgggcggtgtaagtctggctttgaccctcgacatggatcacacaatattaaaaaaaaagcctggtacctcattgcaatgttacttaaattagccttctgcctcgcactctgtgctaaactggaacagtttactaccatgaatctatcctatgtcttcattcctttatgggccttgctggctggggctttaacagaactcggatataatgtcttttttgtgagagactgacttctaagtacatcatctcctttctattgctgttcaacaagttaccattaaagtgttctgaatctgtcaagcttcaagaataccagagaactgagggaaaataccaaatgtagttttatactacttccataaaacaggattggtgaatcacggacttctagtcaacctacagcttaattattcagcatttgagttattgagatccttattatctctatgtaaataaagtttgttttggacctca

SEQ ID NO: 1750 - DNA, 647 bp, Artificial
  cDNA Sequence
tgagagatcctctaccgcagtcgtttgaggaggcggaactgaagttttttcttaattatcatgtgacgggttctggatttaatggggggaaaagggcggaaaaggacaaggatccaaactggcgaatttgctgatcttcgcgtccctctccgctttccggccggcagcgctgccagggtatatttccttttttccgatcctgcaacagcctctttaaactgtttaaatgagaatgtccttggctcagagagtactactcacctggcttttcacactactcttcttgatcatgttggtgttgaaactggatgagaaagcaccttggaactggttcctcatattcattccatctggctttgaccctcgacatggatcacacaatattaaaaaaaaagcctggtacctcattgcaatgttacttaaattagccttctgcctcgcactctgtgctaaactggaacagtttactaccatgaatctatcctatgtcttcattcctttatgggccttgctggctggggctttaacagaactcggatataatgtcttttttgtgagagactgacttctaagtacatcatctcctttctattgctgttcaacaagttaccattaaagtgttctgaatctgtcaagcttcaagaata

SEQ ID NO: 1751 - DNA, 607 bp, Artificial
  cDNA Sequence
cttggaaccgcgaccactggagccttagcgggcgcagcagctggaacgggagtactgcgacgcagcccggagtcggccttgtaggggcgaaggtgcagggagatcgcggcgggcgcagtcttgagcgccggagcgcgtccctgcccttagcggggcttgccccagtcgcaggggcacatccagccgctgcggctgacagcagccgcgcgcgcgggagtctgcggggtcgcggcagccgcacctgcgcgggcgaccagcgcaaggtccccgcccggctgggcgggcagcaagggccggggagagggtgcgggtgcaggcgggggccccacagggccaccttcttgcccggcggctgccgctggaaaatgtctcaggagaggcccacgttctaccggcaggagctgaacaagacaatctgggaggtgcccgagcgttaccagaacctgtctccagtgggctctggcgcctatggctctgtgtgtgctgcttttgacacaaaaacggggttacgtgtggcagtgaagaagctctccagaccatttcagtccatcattcatgcgaaaagaacctacagagaactgcggttacttaaacatatgaaacatga

SEQ ID NO: 1752 - DNA, 1968 bp, Artificial
  cDNA Sequence
cgtggccactaggtggtacagggctcctgagatcatgctgaactggatgcattacaaccagacagttgatatttggtcagtgggatgcataatggccgagctgttgactggaagaacattgtttcctggtacagaccatattgatcagttgaagctcattttaagactcgttggaaccccaggggctgagcttttgaagaaaatctcctcagagtctgcaagaaactatattcagtctttgactcagatgccgaagatgaactttgcgaatgtatttattggtgccaatcccctggctgtcgacttgctggagaagatgcttgtattggactcagataagagaattacagcggcccaagcccttgcacatgcctactttgctcagtaccacgatcctgatgatgaaccagtggccgatccttatgatcagtcctttgaaagcagggacctccttatagatgagtggaaaagcctgacctatgatgaagtcatcagctttgtgccaccaccccttgaccaagaagagatggagtcctgagcacctggtttctgttctgttgatcccacttcactgtgaggggaaggccttttcacgggaactctccaaatattattcaagtgcctcttgttgcagagatttcctccatggtggaagggggtgtgcgtgcgtgtgcgtgcgtgttagtgtgtgtgcatgtgtgtgtctgtctttgtgggagggtaagacaatatgaacaaactatgatcacagtgactttacaggaggttgtggatgctccagggcagcctccaccttgctcttctttctgagagttggctcaggcagacaagagctgctgtccttttaggaatatgttcaatgcaaagtaaaaaaatatgaattgtccccaatcccggtcatgcttttgccactttggcttctcctgtgaccccaccttgacggtggggcgtagacttgacaacatcccacagtggcacggagagaaggcccataccttctggttgcttcagacctgacaccgtccctcagtgatacgtacagccaaaaaggaccaactggcttctgtgcactagcctgtgattaacttgcttagtatggttctcagatcttgacagtatatttgaaactgtaaatatgtttgtgccttaaaaggagagaagaaagtgtagatagttaaaagactgcagctgctgaagttctgagccgggcaagtcgagagggctgttggacagctgcttgtgggcccggagtaatcaggcagccttcataggcggtcatgtgtgcatgtgagcacatgcgtatatgtgcgtctctctttctccctcacccccaggtgttgccatttctctgcttacccttcacctttggtgcagaggtttcttgaatatctgccccagtagtcagaagcaggttcttgatgtcatgtacttcctgtgtactctttatttctagcagagtgaggatgtgttttgcacgtcttgctatttgagcatgcacagctgcttgtcctgctctcttcaggaggccctggtgtcaggcaggtttgccagtgaagacttcttgggtagtttagatcccatgtcacctcagctgatattatggcaagtgatatcacctctcttcagcccctagtgctattctgtgttgaacacaattgatacttcaggtgcttttgatgtgaaaatcatgaaaagaggaacaggtggatgtatagcatttttattcatgccatctgttttcaaccaactatttttgaggaattatcatgggaaaagaccagggcttttcccaggaatatcccaaacttcggaaacaagttattctcttcactcccaataactaatgctaagaaatgctgaaaatcaaagtaaaaaattaaagcccataaggccagaaactccttttgctgtctttctctaaatatgattactttaaaataaaaaagtaacaaggtgtcttttccactc

SEQ ID NO: 1753 - DNA, 1572 bp, Artificial
  cDNA Sequence
cttggtatccccaccttcctgggctcacctctgccccactcaggtgtttaagacgtgcagcagagaggcgccatcctgacctggtgccacatcctagcccctttccttactggatcctcaaaccagaagaaaacctgaatctctgaggacgtcaacaagacagcctgggagctgcccaagacctacgtgtccccgacgcacgtcggcagcggggcctatggctccgtgtgctcggccatcgacaagcggtcaggggagaaggtggccatcaagaagctgagccgaccctttcagtccgagatcttcgccaagcgcgcctaccgggagctgctgctgctgaagcacatgcagcatgagaacgtcattgggctcctggatgtcttcaccccagcctcctccctgcgcaacttctatgacttctacctggtgatgcccttcatgcagacggatctgcagaagatcatggggatggagttcagtgaggagaagatccagtacctggtgtatcagatgctcaaaggccttaagtacatccactctgctggggtcgtgcacagggacctgaagccaggcaacctggctgtgaatgaggactgtgaactgaagattctggattttgggctggcgcgacatgcagacgccgagatgactggctacgtggtgacccgctggtaccgagcccccgaggtgatcctcagctggatgcactacaaccagacaggccaaatcctacatccagtccctgccacagacccccaggaaggatttcactcagctgttcccacgggccagcccccaggctgcggacctgctggagaagatgctggagctagacgtggacaagcgcctgacggccgcgcaggccctcacccatcccttctttgaacccttccgggaccctgaggaagagacggaggcccagcagccgtttgatgattccttagaacacgagaaactcacagtggatgaatggaagcagcacatctacaaggagattgtgaacttcagccccattgcccggaaggactcacggcgccggagtggcatgaagctgtagggactcatcttgcatggcaccgccggccagacactgcccaaggaccagtatttgtcactaccaaactcagcccttcttggaatacagcctttcaagcagaggacagaagggtccttctccttatgtgggaaatgggcctagtagatgcagaattcaaagatgtcggttgggagaaactagctctgatcctaacaggccacgttaaactgcccatctggagaatcgcctgcaggcggggtttctctatgttgcccaggctgatcttgaacttctggactcaagtgatcctcccactttggcctcccaaagtgctgggattataggcatgagccaccctgcaggcccagacagcatttttaaggccttgaaactcttctgtataatactgtaatggtggatacctattgtgcatttgttaccatctgtaggactggataacacagagtgaaccctcaagtaaactatggacttcagttaataataatgtatcagtattggttcataaattgtaacaa

SEQ ID NO: 1754 - DNA, 1750 bp, Artificial
  cDNA Sequence
cttggtatccccaccttcctgggctcacctctgccccactcaggtgtttaagacgtgcagcagagaggcgccatcctgacctggtgccacatcctagcccctttccttactggatcctcaaaccagaagaaaacctgaatctctgaggacgtcaacaagacagcctgggagctgcccaagacctacgtgtccccgacgcacgtcggcagcggggcctatggctccgtgtgctcggccatcgacaagcggtcaggggagaaggtggccatcaagaagctgagccgaccctttcagtccgagatcttcgccaagcgcgcctaccgggagctgctgctgctgaagcacatgcagcatgagaacgtcattgggctcctggatgtcttcaccccagcctcctccctgcgcaacttctatgacttctacctggtgatgcccttcatgcagacggatctgcagaagatcatggggatggagttcagtgaggagaagatccagtacctggtgtatcagatgctcaaaggccttaagtacatccactctgctggggtcgtgcacagggacctgaagccaggcaacctggctgtgaatgaggactgtgaactgaagattctggattttgggctggcgcgacatgcagacgccgagatgactggctacgtggtgacccgctggtaccgagcccccgaggtgatcctcagctggatgcactacaaccagacaggccaaatcctacatccagtccctgccacagacccccaggaaggatttcactcagctgttcccacgggccagcccccaggctgcggacctgctggagaagatgctggagctagacgtggacaagcgcctgacggccgcgcaggccctcacccatcccttctttgaacccttccgggaccctgaggaagagacggaggcccagcagccgtttgatgattccttagaacacgagaaactcacagtggatgaatggaagcagcacatctacaaggagattgtgaacttcagccccattgcccggaaggactcacggcgccggagtggcatgaagctgtagggactcatcttgcatggcaccgccggccagacactgcccaaggaccagtatttgtcactaccaaactcagcccttcttggaatacagcctttcaagcagaggacagaagggtccttctccttatgtgggaaatgggcctagtagatgcagaattcaaagatgtcggttgggagaaactagctctgatcctaacaggccacgttaaactgcccatctggagaatcgcctgcaggtggggccctttccttcccgccagagtggggctgagtgggcgctgagccaggccgggggcctatggcagtgatgctgtgttggtttcctagggatgctctaacgaattaccacaaacctggtggattgaaacagcagaacttgattcccttacagttctggaggctggaaatctgggatggaggtgttggcagggctgtggtccctttgaaggctctggggaagaatccttccttggctctttttagcttgtggcggcagtgggcagtccgtggcattccccagcttattgctgcatcactccagtctctgtctcttctgttctctcctcttttaacaacagtcattggatttagggcccaccctaatcctgtgtgatcttatcttgatccttattaattaaacctgcaaatactctagttccaaataaagtcacattctcaggttccaggtggacatgaa

SEQ ID NO: 1755 - DNA, 1686 bp, Artificial
  cDNA Sequence
gtcggggcgctgggagcccgttgggccgcgaacgcagccgccacgctggggccgccgagatcgggtgcccgggatgagcctcatccggaaaaagggcttctacaagcaggacgtcaacaagacagcctgggagctgcccaagacctacgtgtccccgacgcacgtcggcagcggggcctatggctccgtgtgctcggccatcgacaagcggtcaggggagaaggtggccatcaagaagctgagccgaccctttcagtccgagatcttcgccaagcgcgcctaccgggagctgctgctgctgaagcacatgcagcatgagaacgtcattgggctcctggatgtcttcaccccagcctcctccctgcgcaacttctatgacttctacctggtgatgcccttcatgcagacggatctgcagaagatcatggggatggagttcagtgaggagaagatccagtacctggtgtatcagatgctcaaaggccttaagtacatccactctgctggggtcgtgcacagggacctgaagccaggcaacctggctgtgaatgaggactgtgaactgaagattctggattttgggctggcgcgacatgcagacgccgagatgactggctacgtggtgacccgctggtaccgagcccccgaggtgatcctcagctggatgcactacaaccagacagtggacatctggtctgtgggctgtatcatggcagagatgctgacagggaaaactctgttcaaggggaaagattacctggaccagctgacccagatcctgaaagtgaccggggtgcctggcacggagtttgtgcagaagctgaacgacaaagcggccaaatcctacatccagtccctgccacagacccccaggaaggatttcactcagctgttcccacgggccagcccccaggctgcggacctgctggagaagatgctggagctagacgtggacaagcgcctgacggccgcgcaggccctcacccatcccttctttgaacccttccgggaccctgaggaagagacggaggcccagcagccgtttgatgattccttagaacacgagaaactcacagtggatgaatggaagcagcacatctacaaggagattgtgaacttcagccccattgcccggaaggactcacggcgccggagtggcatgaagctgtagggactcatcttgcatggcaccgccggccagacactgcccaaggaccagtatttgtcactaccaaactcagcccttcttggaatacagcctttcaagcagaggacagaagggtccttctccttatgtgggaaatgggcctagtagatgcagaattcaaagatgtcggttgggagaaactagctctgatcctaacaggccacgttaaactgcccatctggagaatcgcctgcaggcggggtttctctatgttgcccaggctgatcttgaacttctggactcaagtgatcctcccactttggcctcccaaagtgctgggattataggcatgagccaccctgcaggcccagacagcatttttaaggccttgaaactcttctgtataatactgtaatggtggatacctattgtgcatttgttaccatctgtaggactggataacacagagtgaaccctcaagtaaactatggacttcagttaataataatgtatcagtattggttcataaattgtaacaa

SEQ ID NO: 1756 - DNA, 1864 bp, Artificial
  cDNA Sequence
gtcggggcgctgggagcccgttgggccgcgaacgcagccgccacgctggggccgccgagatcgggtgcccgggatgagcctcatccggaaaaagggcttctacaagcaggacgtcaacaagacagcctgggagctgcccaagacctacgtgtccccgacgcacgtcggcagcggggcctatggctccgtgtgctcggccatcgacaagcggtcaggggagaaggtggccatcaagaagctgagccgaccctttcagtccgagatcttcgccaagcgcgcctaccgggagctgctgctgctgaagcacatgcagcatgagaacgtcattgggctcctggatgtcttcaccccagcctcctccctgcgcaacttctatgacttctacctggtgatgcccttcatgcagacggatctgcagaagatcatggggatggagttcagtgaggagaagatccagtacctggtgtatcagatgctcaaaggccttaagtacatccactctgctggggtcgtgcacagggacctgaagccaggcaacctggctgtgaatgaggactgtgaactgaagattctggattttgggctggcgcgacatgcagacgccgagatgactggctacgtggtgacccgctggtaccgagcccccgaggtgatcctcagctggatgcactacaaccagacagtggacatctggtctgtgggctgtatcatggcagagatgctgacagggaaaactctgttcaaggggaaagattacctggaccagctgacccagatcctgaaagtgaccggggtgcctggcacggagtttgtgcagaagctgaacgacaaagcggccaaatcctacatccagtccctgccacagacccccaggaaggatttcactcagctgttcccacgggccagcccccaggctgcggacctgctggagaagatgctggagctagacgtggacaagcgcctgacggccgcgcaggccctcacccatcccttctttgaacccttccgggaccctgaggaagagacggaggcccagcagccgtttgatgattccttagaacacgagaaactcacagtggatgaatggaagcagcacatctacaaggagattgtgaacttcagccccattgcccggaaggactcacggcgccggagtggcatgaagctgtagggactcatcttgcatggcaccgccggccagacactgcccaaggaccagtatttgtcactaccaaactcagcccttcttggaatacagcctttcaagcagaggacagaagggtccttctccttatgtgggaaatgggcctagtagatgcagaattcaaagatgtcggttgggagaaactagctctgatcctaacaggccacgttaaactgcccatctggagaatcgcctgcaggtggggccctttccttcccgccagagtggggctgagtgggcgctgagccaggccgggggcctatggcagtgatgctgtgttggtttcctagggatgctctaacgaattaccacaaacctggtggattgaaacagcagaacttgattcccttacagttctggaggctggaaatctgggatggaggtgttggcagggctgtggtccctttgaaggctctggggaagaatccttccttggctctttttagcttgtggcggcagtgggcagtccgtggcattccccagcttattgctgcatcactccagtctctgtctcttctgttctctcctcttttaacaacagtcattggatttagggcccaccctaatcctgtgtgatcttatcttgatccttattaattaaacctgcaaatactctagttccaaataaagtcacattctcaggttccaggtggacatgaa

SEQ ID NO: 1757 - DNA, 628 bp, Artificial
  cDNA Sequence
ggggcgctgggagcccgttgggccgcgaacgcagccgccacgctggggccgccgagatcgggtgcccgggatgagcctcatccggaaaaagggcttctacaagcaggacgtcaacaagacagcctgggagctgcccaagacctacgtgtccccgacgcacgtcggcagcggggcctatggctccgtgtgctcggccatcgacaagcggtcaggggagaaggtggccatcaagaagctgagccgaccctttcagtccgagatcttcgccaagcgcgcctaccgggagctgctgctgctgaagcacatgcagcatgagaacgtcattgggctcctggatgtcttcaccccagcctcctccctgcgcaacttctatgacttctacctggtgatgcccttcatgcagacggatctgcagaagatcatggggatggagttcagtgaggagaagatccagtacctggtgtatcagatgctcaaaggccttaagattctggattttgggctggcgcgacatgcagacgccgagatgactggctacgtggtgacccgctggtaccgagcccccgaggtgatcctcagctggatgcactacaaccagacagtggacatctggtctgtgggctgtatc

SEQ ID NO: 1758 - DNA, 1474 bp, Artificial
  cDNA Sequence
tcgggtgcccgggatgagcctcatccggaaaaagggcttctacaagcaggacgtcaacaagacagcctgggagctgcccaagacctacgtgtccccgacgcacgtcggcagcggggcctatggctccgtgtgctcggccatcgacaagcggtcaggggagaaggtggccatcaagaagctgagccgaccctttcagtccgagatcttcgccaagcgcgcctaccgggagctgctgctgctgaagcacatgcagcatgagaacgtcattgggctcctggatgtcttcaccccagcctcctccctgcgcaacttctatgacttctacctggtgatgcccttcatgcagacggatctgcagaagatcatggggatggagttcagtgaggagaagatccagtacctggtgtatcagatgctcaaaggccttaagtacatccactctgctggggtcgtgcacagggacctgaagccaggcaacctggctgtgaatgaggactgtgaactgaagattctggattttgggctggcgcgacatgcagacgccgagatgactggctacgtggtgacccgctggtaccgagcccccgaggtgatcctcagctggatgcactacaaccagacaggccaaatcctacatccagtccctgccacagacccccaggaaggatttcactcagctgttcccacgggccagcccccaggctgcggacctgctggagaagatgctggagctagacgtggacaagcgcctgacggccgcgcaggccctcacccatcccttctttgaacccttccgggaccctgaggaagagacggaggcccagcagccgtttgatgattccttagaacacgagaaactcacagtggatgaatggaagcagcacatctacaaggagattgtgaacttcagccccattgcccggaaggactcacggcgccggagtggcatgaagctgtagggactcatcttgcatggcaccgccggccagacactgcccaaggaccagtatttgtcactaccaaactcagcccttcttggaatacagcctttcaagcagaggacagaagggtccttctccttatgtgggaaatgggcctagtagatgcagaattcaaagatgtcggttgggagaaactagctctgatcctaacaggccacgttaaactgcccatctggagaatcgcctgcaggcggggtttctctatgttgcccaggctgatcttgaacttctggactcaagtgatcctcccactttggcctcccaaagtgctgggattataggcatgagccaccctgcaggcccagacagcatttttaaggccttgaaactcttctgtataatactgtaatggtggatacctattgtgcatttgttaccatctgtaggactggataacacagagtgaaccctcaagtaaactatggacttcagttaataataatgtatcagtattggttcataaattgtaacaa

SEQ ID NO: 1759 - DNA, 1652 bp, Artificial
  cDNA Sequence
tcgggtgcccgggatgagcctcatccggaaaaagggcttctacaagcaggacgtcaacaagacagcctgggagctgcccaagacctacgtgtccccgacgcacgtcggcagcggggcctatggctccgtgtgctcggccatcgacaagcggtcaggggagaaggtggccatcaagaagctgagccgaccctttcagtccgagatcttcgccaagcgcgcctaccgggagctgctgctgctgaagcacatgcagcatgagaacgtcattgggctcctggatgtcttcaccccagcctcctccctgcgcaacttctatgacttctacctggtgatgcccttcatgcagacggatctgcagaagatcatggggatggagttcagtgaggagaagatccagtacctggtgtatcagatgctcaaaggccttaagtacatccactctgctggggtcgtgcacagggacctgaagccaggcaacctggctgtgaatgaggactgtgaactgaagattctggattttgggctggcgcgacatgcagacgccgagatgactggctacgtggtgacccgctggtaccgagcccccgaggtgatcctcagctggatgcactacaaccagacaggccaaatcctacatccagtccctgccacagacccccaggaaggatttcactcagctgttcccacgggccagcccccaggctgcggacctgctggagaagatgctggagctagacgtggacaagcgcctgacggccgcgcaggccctcacccatcccttctttgaacccttccgggaccctgaggaagagacggaggcccagcagccgtttgatgattccttagaacacgagaaactcacagtggatgaatggaagcagcacatctacaaggagattgtgaacttcagccccattgcccggaaggactcacggcgccggagtggcatgaagctgtagggactcatcttgcatggcaccgccggccagacactgcccaaggaccagtatttgtcactaccaaactcagcccttcttggaatacagcctttcaagcagaggacagaagggtccttctccttatgtgggaaatgggcctagtagatgcagaattcaaagatgtcggttgggagaaactagctctgatcctaacaggccacgttaaactgcccatctggagaatcgcctgcaggtggggccctttccttcccgccagagtggggctgagtgggcgctgagccaggccgggggcctatggcagtgatgctgtgttggtttcctagggatgctctaacgaattaccacaaacctggtggattgaaacagcagaacttgattcccttacagttctggaggctggaaatctgggatggaggtgttggcagggctgtggtccctttgaaggctctggggaagaatccttccttggctctttttagcttgtggcggcagtgggcagtccgtggcattccccagcttattgctgcatcactccagtctctgtctcttctgttctctcctcttttaacaacagtcattggatttagggcccaccctaatcctgtgtgatcttatcttgatccttattaattaaacctgcaaatactctagttccaaataaagtcacattctcaggttccaggtggacatgaa

SEQ ID NO: 1760 - DNA, 193 bp, Artificial
  cDNA Sequence
agctgcccaagacctacgtgtccccgacgcacgtcggcagcggggcctatggctccgtgtgctcggccatcgacaagcggtcaggggagaaggtggccatcaagaagctgagccgaccctttcagtccgagatcttcgccaagcgcgcctaccgggagctgctgctgctgaagcacatgcagcatgagaacgt

SEQ ID NO: 1761 - DNA, 414 bp, Artificial
  cDNA Sequence
ggactccacgtcaggctgtctctggtgcgctcgcccctcccctctgaggagatgttatttccctcctttcttctccgaggggtcaagattcttctggaagaggcctgtcccctcagttcccaggtgccatgaggaagcctcgtcggaagtcccggcagaatgccgagggccggcgttccccgtccccctacagtctcaagtgctcacccacccgggagaccctgacatatgcccaggcccagcggattgtcgaggtagacattgatggacgcctgcatcgtatcagcatctatgacccactcaaaatcattactgaagatgagctaactgcccaggatatcaccgaatgcaatagtaacaaggaaaacagtgaacagcctcagttccctggcaagtccaagaaaccctcatcca

SEQ ID NO: 1762 - DNA, 870 bp, Artificial
  cDNA Sequence
cccgcctgcccgctggaaactaacctgctatatctgcaagcagaaagggctaggtgcagccatccagtgccataaggtgaactgctacacagcattccatgtgacatgtgcacagcgggctgggctcttcatgaagattgagcccatgcgcgaaaccagcctcaatggcaccatctttacagtgcgcaagactgcctactgtgaggcccactcgccaccaggtgcggccactgctaggaggaagggcgactcccctagaagcatcagtgagactggcgatgaggaagggctgaaggagggtgatggagaggaggaagaagaggaagaggtggaggaagaagagcaggaagctcaaggcggggtgagtggctccctcaagggagtgcccaagaaaagcaagatgagtttgaagcagaagatcaagaaggagccagaggaagcaggccaagacacaccctccactctccccatgcttgctgtcccacagataccctcttacaggttgaacaagatctgtagtggtctctcctttcagaggaaaaaccagtttatgcagcggcttcacaattattggctgttgaagcggcaggcacggaatggtgtccctcttatccggcgcttgcactcccatctgcagtcccaaagaaacgctgagcagcgagagcaggatgagaagacaagtgcagtgaaggaggagctgaagtattggcagaagctccggcatgacttggagcgggcgcggctgctgattgagctgattcggaagagagagaagctcaaacgagagcaggtcaaagtccagcaggctgccatggagctggagctgatgccattcaatgttctgttgaggacaacactggacctgctgca

SEQ ID NO: 1763 - DNA, 390 bp, Artificial
  cDNA Sequence
aagatgagctcttggaaaaatcaccactgcagctagggaatgagcctttgcaacgcttgctcagtgacaatggcatcaacagactatccctcatggcccctgacaccccggccggtaccccacttagtggtgtgggtcgccgcacatcagtcctcttcaagaaggccaagaatggggttaagctacagagaagcccagacagggtcctggagaatggcgaggaccatggtgtggcaggctctcctgcctctccagccagcatcgaggaagagcgccactcccggaagcggccaaggagcaggagctgtagtgagagcgaaggggagaggtccccccagcaggaggaagagacaggcatgaccaacggctttggaaaacacaccgaaagcg

SEQ ID NO: 1764 - DNA, 1324 bp, Artificial
  cDNA Sequence
tttgaagaccgcggagacctggagcccttggagctggtgtgggccaagtgccgaggctacccctcctaccctgccttgatcatcgatcccaagatgccccgggagggcctcctgcacaatggcgttcccatccctgtccccccgctggacgtgctgaagctgggagagcagaaacaggcagaggctggagagaagctcttccttgtcctcttctttgacaacaagcgcacctggcagtggcttccaagggacaaagtcctgcccttgggtgtggaagacaccgtggacaagctcaagatgctggaaggccgcaagaccagcatccgcaagtcagtgcaggtggcctatgaccgtgcgatgatccacctgagcagagtccgggggccccactccttcgtcacttccagctacctgtaagggcagggctgggcctgcatccgcttgccctgcctccatcccgcagggcacagagaagcctcttctgcccctgccagatgtatggccggcagcttccccctctcatggtaggccagggactgggctttctccccactaagggcaaggccccagttttgaccaatcgcatggttctcctggcaggcctgctgtgtgccaaaaactcccacccaaggtccctcaggggatatttcactgaagaaccagttagaagtagaaacagctgtggggcttgggcccagcttaggagattgcccagatggcaagaggtcctgggctccttcttgaggggctgcctggcccgctccatcctactcccactaactacacctcagggcgggtgaggttccgacactgatcccagagatgccgtggatacgccagggtcccagggggaatctccccaagctcacactctctcccgcttatcgcctattctcacacctcttctcggtcccatcttctgcacccattgcccagtcttgctttctctttcccatattccttttctttttctcttgtgccaaactgacagaaaccgtcaccacactggtctttttctttaatgtctcattccccttgaggccagctgctatgccaggtggtgtctctgccaggctcctcaggcccagacagaggccagcccacaacctatgaccccctcccccaggacaccacctcccacccacagaccttccctttagctgttgacacaacttcccagctctgcaagtgtgccccctggatcaaggcgggtcccctcttgtttttttctttgctgccacgaggtggtccaagccttcagggtgggctcctatcaggctgggtgtgcgagtgtccatctgtccacatggatgtcgagggtggt

SEQ ID NO: 1765 - DNA, 648 bp, Artificial
  cDNA Sequence
taacttttccgtctgcaacctttaataattgagagggtatgcgcaactcagaaaagtgcgcccgctgaggttgggtgcagagtggactggaggaaaggcgacacccatttacggtgcggccccggacggggtccccagacacggccttcccggcgtgccacgcgcggaggggactcttaacgtgaagcgctgggtgactcagccgcgtggccgcgcggtccggggcggggggcgcgcgccgctgcggcacagccggtcccggctgcggcttctggctgcgcggcctgcgcgcgcctcccgggcggattccagccccgagcgggacagcgcggcggggagcgacgagcctcgggtggttcatcccgccggagaggaatggcgagaacctggagtgttgactggcaaaacatttgcagacgcggtttttctggcaattaattggctccattaaaaattaggtagttggtggggacttcctcctgaactctggagccgagcgcattttgctcggtcttttcagccctgtttccgcgtcttccttccctgccacccgcaaattgccagctttcatccgtggctctgagtgcaaaagagctggggaaagccttaaccagcaattttcttttaaataaaactttgctttttata

SEQ ID NO: 1766 - DNA, 942 bp, Artificial
  cDNA Sequence
caggttattgcggcaggaggccagctgcttagtggatgatactttagctgtagcccaagaaaaagaagcaaacagcctggcttcatctggtcctcataatcttacttatcctctaggtcccaggaatgaagacctctcacttgactatgcctctcagccagcaaatcttcagttccctcacataatgccccttgctgaagacatcaaaggttcttgcttccaaagtgggaataaacggaaccatgaaccttttattgctccagaaagatttggaaacagtagtgtgggctttggcagtaattcccattcccaagcaccagagaaagtgacgcttcttgtagatggcacacgttttgttgtgaatccacagattttcactgctcatccggataccatgctgggaaggatgtttggaccaggaagagagtacaacttcactcggcccaatgagaagggagagtatgagattgctgaaggcatcagtgcaactgtatttcgcacagtgctggattattacaaaaccggtatcatcaattgtcctgatggcatctctatcccagatcttagagatacttgtgattatctctgcattaattttgacttcaacactatccgatgtcaagatctgagtgctttactccatgaactgtctaatgacggtgctcataagcagtttgatcactacctcgaagagctcatcttgcccatcatggtgggctgtgccaagaaaggagaacgagagtgccacattgttgtgctgacggatgaggattctgtggactgggatgaagaccaccctccaccaatgggggaggaatattcccaaattctttatagctccaagctctacagattcttcaaatatattgagaatagggatgttgcaaaaacagtgttaaaggaacggggcctaaaaaacattcgcattggaattgaaggtaa

SEQ ID NO: 1767 - DNA, 1193 bp, Artificial
  cDNA Sequence
agtgttaaaggaacggggcctaaaaaacattcgcattggaattgaaggttaccctacctgtaaagaaaaaattaagagaaggcctggcggccggtctgaagtcatctataattatgtacaacgccccttcatccagatgtcatgggaaaaggaagaagggaagagtcgccatgtggatttccagtgtgttcgaagcaaatccctcacgaatctggtagctgctggagatgatgtcttggaggaccaggagatattaatgcatcacccaccccaagtggatgaacttgaccggctaaatgccccactttctcagatggcttctaacgactttcaggattagggccagctgtgggtctactccttgttggagcccatctcacctgggatgcctgcagccagccctccctcgtgatttgtctcaccttgagtaggagacatgcttctcccctaaccttttcctttctgccataattaacatatgtccttttcagtaagtccatgcctctggcaggggatgaagaagtactcactggtaattagctaccatctttgcagcagccctggtaacttgaaaaatttgggtctggtgctgttcattgagtctttgtgtaactgcaaaagcaggaaaggaagtcaagactcctgttgcctcgtgcttagcaaagcagtccttatcctttatactctgttcttgggttttgtttttgtcttgttttataccaggcaaattgcttagtagcaaagggaccaaactgaaaaggtgacaatctctaacttctaaaagcagacaccaatcggatgctcattagaggttaatgaagatgccattcttggtggcctctgcacccaaattgcatctggaaagaactagggtctcattcagaatgtccaaaaggaaattcttaagagcttaaattcagattttgccacttcttgccatcactttgcaattattgaaatgggaatactgagctcagaaagcaaatatgatgctttcatgggagatggagccacatttgtgttctgggtgggatcactagtgcaggagaacattacattttcttctgaaggcaaaatgcttgtaggttttgcctctactttgtatttacttttaaaattgcacttgttcacctaccagtgtttacgaaatcctgtatttgggatgctttttctataataaaatattataattt

SEQ ID NO: 1768 - DNA, 1724 bp, Artificial
  cDNA Sequence
agtgttaaaggaacggggcctaaaaaacattcgcattggaattgaaggttaccctacctgtaaagaaaaaattaagagaaggcctggcggccggtctgaagtcatctataattatgtacaacgccccttcatccagatgtcatgggaaaaggaagaagggaagagtcgccatgtggatttccagtgtgttcgaagcaaatccctcacgaatctggtagctgctggagatgatgtcttggaggaccaggagatattaatgcatcacccaccccaagtggatgaacttgaccggctaaatgccccactttctcagatggcttctaacgactttcaggattagggccagctgtgggtctactccttgttggagcccatctcacctgggatgcctgcagccagccctccctcgtgatttgtctcaccttgagtaggagacatgcttctcccctaaccttttcctttctgccataattaacatatgtccttttcagtaagtccatgcctctggcaggggatgaagaagtactcactggtaattagctaccatctttgcagcagccctggtaacttgaaaaatttgggtctggtgctgttcattgagtctttgtgtaactgcaaaagcaggaaaggaagtcaagactcctgttgcctcgtgcttagcaaagcagtccttatcctttatactctgttcttgggttttgtttttgtcttgttttataccaggcaaattgcttagtagcaaagggaccaaactgaaaaggtgacaatctctaacttctaaaagcagacaccaatcggatgctcattagaggttaatgaagatgccattcttggtggcctctgcacccaaattgcatctggaaagaactagggtctcattcagaatgtccaaaaggaaattcttaagagcttaaattcagatttgtgtctcattaatgcagtgaacaattcaaaaccacacagattccttggcaggaaggataatggaataacagtgttgatgagacctttttagcttcaaggtttcggagtctaaacaaatggatgattcatttggaatgaaactcacaatgcaagtagaaggacctctccaaatcaggccagttgggttatcctggcttggaatctggtgtgaaaccataggtcttaacactctggagcagcacattgctgtggatatgtccaggagaccttagatatggcttaaaggctttcaagatgaggacagaaattgcttacaattgctcagtttctcaacagaaagactcataagagtgccagcatggggtacatggagtgaagctgggtgggaagcatcatctgcacagtccctgtcctagtgcaggacttttctctgtatgttttcataccatgggatttttggatatcagtgtattttggttcttgaaatagcctaatagctgctcacacattgggtaggaatattataccaatgtcatccccaaaggaagggtgagctgaatggaaattaagcccagtcattttatttgatctattagctctgttatcagtgcatgatcacccagatcaccctcctcagcccacacagtgctgaaccatcttccctcctgttctccatggctattaatagtatagctaaatttagagtgcagagccagatataagtattttggaattatctcccagtttgtggtagaagctgactggaatacaggttgagtatctcttatccaaaatgctag

SEQ ID NO: 1769 - DNA, 1147 bp, Artificial
  cDNA Sequence
ggttaccctacctgtaaagaaaaaattaagagaaggcctggcggccggtctgaagtcatctataattatgtacaacgccccttcatccagatgtcatgggaaaaggaagaagggaagagtcgccatgtggatttccagtgtgttcgaagcaaatccctcacgaatctggtagctgctggagatgatgtcttggaggaccaggagatattaatgcatcacccaccccaagtggatgaacttgaccggctaaatgccccactttctcagatggcttctaacgactttcaggattagggccagctgtgggtctactccttgttggagcccatctcacctgggatgcctgcagccagccctccctcgtgatttgtctcaccttgagtaggagacatgcttctcccctaaccttttcctttctgccataattaacatatgtccttttcagtaagtccatgcctctggcaggggatgaagaagtactcactggtaattagctaccatctttgcagcagccctggtaacttgaaaaatttgggtctggtgctgttcattgagtctttgtgtaactgcaaaagcaggaaaggaagtcaagactcctgttgcctcgtgcttagcaaagcagtccttatcctttatactctgttcttgggttttgtttttgtcttgttttataccaggcaaattgcttagtagcaaagggaccaaactgaaaaggtgacaatctctaacttctaaaagcagacaccaatcggatgctcattagaggttaatgaagatgccattcttggtggcctctgcacccaaattgcatctggaaagaactagggtctcattcagaatgtccaaaaggaaattcttaagagcttaaattcagattttgccacttcttgccatcactttgcaattattgaaatgggaatactgagctcagaaagcaaatatgatgctttcatgggagatggagccacatttgtgttctgggtgggatcactagtgcaggagaacattacattttcttctgaaggcaaaatgcttgtaggttttgcctctactttgtatttacttttaaaattgcacttgttcacctaccagtgtttacgaaatcctgtatttgggatgctttttctataataaaatattataattt

SEQ ID NO: 1770 - DNA, 1541 bp, Artificial
  cDNA Sequence
ccgccatttcgtggacgccgggtgagtgagagagttggttggtgttgggccggaggaaagcgggaagactcatcggagcgtgtggatttgagccgccgcattttttaaccctagatctcgaaatgcatcgtgattcctgtccattggactgtaaggtttatgtaggcaatcttggaaacaatggcaacaagacggaattggaacgggcttttggctactatggaccactccgaagtgtgtgggttgctagaaacccacccggctttgcttttgttgaatttgaagatccccgagatgcagctgatgcagtccgagagctagatggaagaacactatgtggctgccgtgtaagagtggaactgtcgaatggtgaaaaaagaagtagaaatcgtggcccacctccctcttggggtcgtcgccctcgagatgattatcgtaggaggagtcctccacctcgtcgcagatctccaagaaggagaagcttctctcgcagccggagcaggtccctttctagagataggagaagagagagatcgctgtctcgggagagaaatcacaagccgtcccgatccttctctaggtctcgtagtcgatctaggtcaaatgaaaggaaatagaagacagtttgcaagagaagtggtgtacaggaaattacttcatttgacaggagtatgtacagaaaattcaagttttgtttgagacttcataagcttggtgcatttttaagatgttttagctgttcaaatctgtttgtctcttgaaacagtgacacaaaggtgtaattctctatggtttgaaatggatcatacgaggcatgtaataccaagaattgttactttacaatgttcccttaagcaaaattgaatttgctttgaacttttagttatgcacagactgataataaacctctaaacctgcccagcggaagtgtgtttttttttaaatttaaatacagaaacaactggcaaaaattgaactaagatttacttttttttccatagctgggatataggctgcagctatagttgaacaagcagtctttaaaaactgctgtgaaacacaggccatcagggaaaacgaaatgctgcactattaaattagaggtttttgaaaaatccaactctcatcctgggcagaggttgcctagttggtatagaatgttaagtttcaagaaagtttacctttgctttaggtcataagttccttatttgattgctgtatatggatacatggctgttcgtgacattctttatgtgcaaatttgtgatttcaaaaatgtcctgccagtttaagggtacattgtagagccgaactttgagttactgtgcaagatttttttttcatgctgtcatttgtaatatgttttgtgagaatccttgggattaaagttttggttacaaattgttctttaacttgaaagcctgtttttccttgcaaactcaaatctgtgagcttggtaccaagtccaggtataacattcctattggaagccatacttatattttcttgtaaagtgcttttgaattaataaaatattagca

SEQ ID NO: 1771 - DNA, 598 bp, Artificial
  cDNA Sequence
ccgccatttcgtggacgccgggtgagtgagagagttggttggtgttgggccggaggaaagcgggaagactcatcggagcgtgtggatttgagccgccgcattttttaaccctagatctcgaaatgcatcgtgattcctgtccattggactgtaaggtttatgtaggcaatcttggaaacaatggcaacaagacggaattggaacgggcttttggctactatggaccactccgaagtgtgtgggttgctagaaacccacccggctttgcttttgttgaatttgaagatccccgagatgcagctgatgcagtccgagagctagatggaagaacactatgtggctgccgtgtaagagtggaactgtcgaatggtgaaaaaagaagtagaaatcgtggcccacctccctcttggggtcgtcgccctcgagatgattatcgtaggaggagtcctccacctcgtcgcagatctccaagaaggagaagcttctctcgcagccggagcaggtccctttctagagataggagaagagagagatcgctgtctcgggagagaaatcacaagccgtcccgatccttctctaggtctcgtaggtaagatct

SEQ ID NO: 1772 - DNA, 2164 bp, Artificial
  cDNA Sequence
gtcaccagacttctctgagccccagtttccccagcagtgtatacgggctatgtggggagtattcaggagacagacaactcactcgtcaaatcctccccttcctggccaacaaagctgctgcaaccacagggatttcttctgttcaggcgccatgtcagaaccggctggggatgtccgtcagaacccatgcggcagcaaggcctgccgccgcctcttcggcccagtggacagcgagcagctgagccgcgactgtgatgcgctaatggcgggctgcatccaggaggcccgtgagcgatggaacttcgactttgtcaccgagacaccactggagggtgacttcgcctgggagcgtgtgcggggccttggcctgcccaagctctaccttcccacggggccccggcgaggccgggatgagttgggaggaggcaggcggcctggcacctcacctgctctgctgcaggggacagcagaggaagaccatgtggacctgtcactgtcttgtacccttgtgcctcgctcaggggagcaggctgaagggtccccaggtggacctggagactctcagggtcgaaaacggcggcagaccagcatgacagatttctaccactccaaacgccggctgatcttctccaagaggaagccctaatccgcccacaggaagcctgcagtcctggaagcgcgagggcctcaaaggcccgctctacatcttctgccttagtctcagtttgtgtgtcttaattattatttgtgttttaatttaaacacctcctcatgtacataccctggccgccccctgccccccagcctctggcattagaattatttaaacaaaaactaggcggttgaatgagaggttcctaagagtgctgggcatttttattttatgaaatactatttaaagcctcctcatcccgtgttctccttttcctctctcccggaggttgggtgggccggcttcatgccagctacttcctcctccccacttgtccgctgggtggtaccctctggaggggtgtggctccttcccatcgctgtcacaggcggttatgaaattcaccccctttcctggacactcagacctgaattctttttcatttgagaagtaaacagatggcactttgaaggggcctcaccgagtgggggcatcatcaaaaactttggagtcccctcacctcctctaaggttgggcagggtgaccctgaagtgagcacagcctagggctgagctggggacctggtaccctcctggctcttgatacccccctctgtcttgtgaaggcagggggaaggtggggtcctggagcagaccaccccgcctgccctcatggcccctctgacctgcactggggagcccgtctcagtgttgagccttttccctctttggctcccctgtaccttttgaggagccccagctaccctttttctccagctgggctctgcaattcccctctgctgctgtccctcccccttgtcctttcccttcagtaccctctcagctccaggtggctctgaggtgcctgtcccacccccacccccagctcaatggactggaaggggaagggacacacaagaagaagggcaccctagttctacctcaggcagctcaagcagcgaccgccccctcctctagctgtgggggtgagggtcccatgtggtggcacaggcccccttgagtggggttatctctgtgttaggggtatatgatgggggagtagatctttctaggagggagacactggcccctcaaatcgtccagcgaccttcctcatccaccccatccctccccagttcattgcactttgattagcagcggaacaaggagtcagacattttaagatggtggcagtagaggctatggacagggcatgccacgtgggctcatatggggctgggagtagttgtctttcctggcactaacgttgagcccctggaggcactgaagtgcttagtgtacttggagtattggggtctgaccccaaacaccttccagctcctgtaacatactggcctggactgttttctctcggctccccatgtgtcctggttcccgtttctccacctagactgtaaacctctcgagggcagggaccacaccctgtactgttctgtgtctttcacagctcctcccacaatgctgaatatacagcaggtgctcaataaatgat

SEQ ID NO: 1773 - DNA, 2095 bp, Artificial
  cDNA Sequence
agcagctgccgaagtcagttccttgtggagccggagctgggcgcggattcgccgaggcaccgaggcactcagaggaggcgccatgtcagaaccggctggggatgtccgtcagaacccatgcggcagcaaggcctgccgccgcctcttcggcccagtggacagcgagcagctgagccgcgactgtgatgcgctaatggcgggctgcatccaggaggcccgtgagcgatggaacttcgactttgtcaccgagacaccactggagggtgacttcgcctgggagcgtgtgcggggccttggcctgcccaagctctaccttcccacggggccccggcgaggccgggatgagttgggaggaggcaggcggcctggcacctcacctgctctgctgcaggggacagcagaggaagaccatgtggacctgtcactgtcttgtacccttgtgcctcgctcaggggagcaggctgaagggtccccaggtggacctggagactctcagggtcgaaaacggcggcagaccagcatgacagatttctaccactccaaacgccggctgatcttctccaagaggaagccctaatccgcccacaggaagcctgcagtcctggaagcgcgagggcctcaaaggcccgctctacatcttctgccttagtctcagtttgtgtgtcttaattattatttgtgttttaatttaaacacctcctcatgtacataccctggccgccccctgccccccagcctctggcattagaattatttaaacaaaaactaggcggttgaatgagaggttcctaagagtgctgggcatttttattttatgaaatactatttaaagcctcctcatcccgtgttctccttttcctctctcccggaggttgggtgggccggcttcatgccagctacttcctcctccccacttgtccgctgggtggtaccctctggaggggtgtggctccttcccatcgctgtcacaggcggttatgaaattcaccccctttcctggacactcagacctgaattctttttcatttgagaagtaaacagatggcactttgaaggggcctcaccgagtgggggcatcatcaaaaactttggagtcccctcacctcctctaaggttgggcagggtgaccctgaagtgagcacagcctagggctgagctggggacctggtaccctcctggctcttgatacccccctctgtcttgtgaaggcagggggaaggtggggtcctggagcagaccaccccgcctgccctcatggcccctctgacctgcactggggagcccgtctcagtgttgagccttttccctctttggctcccctgtaccttttgaggagccccagctaccctttttctccagctgggctctgcaattcccctctgctgctgtccctcccccttgtcctttcccttcagtaccctctcagctccaggtggctctgaggtgcctgtcccacccccacccccagctcaatggactggaaggggaagggacacacaagaagaagggcaccctagttctacctcaggcagctcaagcagcgaccgccccctcctctagctgtgggggtgagggtcccatgtggtggcacaggcccccttgagtggggttatctctgtgttaggggtatatgatgggggagtagatctttctaggagggagacactggcccctcaaatcgtccagcgaccttcctcatccaccccatccctccccagttcattgcactttgattagcagcggaacaaggagtcagacattttaagatggtggcagtagaggctatggacagggcatgccacgtgggctcatatggggctgggagtagttgtctttcctggcactaacgttgagcccctggaggcactgaagtgcttagtgtacttggagtattggggtctgaccccaaacaccttccagctcctgtaacatactggcctggactgttttctctcggctccccatgtgtcctggttcccgtttctccacctagactgtaaacctctcgagggcagggaccacaccctgtactgttctgtgtctttcacagctcctcccacaatgctgaatatacagcaggtgctcaataaatgat

SEQ ID NO: 1774 - DNA, 376 bp, Artificial
  cDNA Sequence
cgccgaggcaccgaggcactcagaggaggtgagagagcggcggcagacaacaggggaccccgggccggcggcccagagccgagccaagcgtgcccgcgtgtgtccctgcgtgtccgcgaggatgcgtgttcgcgggtgtgtgctgcgttcacaggtgtttctgcggcagggtgacgcgcagccggagtggaagcagttttggcgggcgagcagcgccttgcaggaaactgactcatcactactccctccagcggtccgaggctctgcccacgcacctcccactccgcgcgtgatttcctggaggccggcgccccctcccggccctggcgggaatagcacacaggctttcccgcggagtggggctggccggcgcgaa

SEQ ID NO: 1775 - DNA, 1721 bp, Artificial
  cDNA Sequence
gcccaggagtggggggttgcttccgggtcgcgctcccggaaacaggaagttgcccatcctcctcgcccggcggcagctgtccccgaggcgggaggagcccgaggggcgcgagccccgcatggattttatattggaagacatggatcttgctgccaacgagatcagcatttatgacaaactttcagagactgttgatttggtgagacagaccggccatcagtgtggcatgtcagagaaggcaattgaaaaatttatcagacagctgctggaaaagaatgaacctcagagaccccccccgcagtatcctctccttatagttgtgtataaggttctcgcaaccttgggattaatcttgctcactgcctactttgtgattcaacctttcagcccattagcacctgagccagtgctttctggagctcacacctggcgctcactcatccatcacattaggctgatgtccttgcccattgccaagaagtacatgtcagaaaataagggagttcctctgcatgggggtgatgaagacagaccctttccagactttgacccctggtggacaaacgactgtgagcagaatgagtcagagcccattcctgccaactgcactggctgtgcccagaaacacctgaaggtgatgctcctggaagacgccccaaggaaatttgagaggctccatccactggtgatcaagacgggaaagcccctgttggaggaagagattcagcattttttgtgccagtaccctgaggcgacagaaggcttctctgaagggtttttcgccaagtggtggcgctgctttcctgagcggtggttcccatttccttatccatggaggagacctctgaacagatcacaaatgttacgtgagctttttcctgttttcactcacctgccatttccaaaagatgcctctttaaacaagtgctcctttcttcacccagaacctgttgtggggagtaagatgcataagatgcctgacctatttatcattggcagcggtgaggccatgttgcagctcatccctcccttccagtgccgaagacattgtcagtctgtggccatgccaatagagccaggggatatcggctatgtcgacaccacccactggaaggtctacgttatagccagaggggtccagcctttggtcatctgcgatggaaccgctttctcagaactgtaggaaatagaactgtgcacaggaacagcttccagagccgaaaaccaggttgaaaggggaaaaataaaaacaaaaacgatgaaactgctttctgggggttggttacttagttacctgccctttgcatgcatgtgtgaaccagctgtgagctgcaaggcagtggccagagcctcgccctcctgactcttcctgcaggtggctcaggaaggattcagcctggccacttggctaggactctgccagcacccatctgagactgacctcttccgggcctttggacactatgaccttgatgctgcccttcaggcaggaaacagggctggtgcctttcttcacctgcatggccagcttccttccctggcagtggagagggcagccaacaggttctaatgtcagagccatcctttaccaggtgggcctgcttgtccctgtcttgcctgccacatcactctactttttggaaggccatggctgattaaagaagttcttgtagtttcccaagcaaagtggaatctagaaacagtgaaaaaagttcagataa

SEQ ID NO: 1776 - DNA, 721 bp, Artificial
  cDNA Sequence
gcttccgggtcgcgctcccggaaacaggaagttgcccatcctcctcgcccggcggcagctgtccccgaggcgggaggagcccgaggggcgcgagccccgcatggattttatattggaagacatggatcttgctgccaacgagatcagcatttatgacaaactttcagagactgttgatttggtgagacagaccggccatcagtgtggcatgtcagagaaggcaattgaaaaatttatcagacagctgctggaaaagaatgaacctcagagaccccccccgcagtatcctctccttatagttgtgtataaggttctcgcaaccttgggattaatcttgctcactgcctactttgtgattcaacctttcagcccattagcacctgagccagtgctttctggagctcacacctggcgctcactcatccatcacattaggctgatgtccttgcccattgccaagaagtacatgtcagaaaataagggagttcctctgcatgggggtgatgaagacagaccctttccagactttgacccctggtggacaaacgactgtgagcagaatgagtcagagcccattcctgccaactgcactggctgtgcccagaaacacctgaaggtgatgctcctggaagacgccccaaggaaatttgagaggctccatccactggtgatcaagacgggaaagcccctgttggaggaagagattcagcattttttgtgc

SEQ ID NO: 1777 - DNA, 1695 bp, Artificial
  cDNA Sequence
caggaatcattgtagtcaatcattttccagttctcagccgctcagttgtgatcaagggacacgtggtttccgaactgccagctcagaataggaaaataacttgggattttatattggaagacatggatcttgctgccaacgagatcagcatttatgacaaactttcagagactgttgatttggtgagacagaccggccatcagtgtggcatgtcagagaaggcaattgaaaaatttatcagacagctgctggaaaagaatgaacctcagagaccccccccgcagtatcctctccttatagttgtgtataaggttctcgcaaccttgggattaatcttgctcactgcctactttgtgattcaacctttcagcccattagcacctgagccagtgctttctggagctcacacctggcgctcactcatccatcacattaggctgatgtccttgcccattgccaagaagtacatgtcagaaaataagggagttcctctgcatgggggtgatgaagacagaccctttccagactttgacccctggtggacaaacgactgtgagcagaatgagtcagagcccattcctgccaactgcactggctgtgcccagaaacacctgaaggtgatgctcctggaagacgccccaaggaaatttgagaggctccatccactgacgggaaagcccctgttggaggaagagattcagcattttttgtgccagtaccctgaggcgacagaaggcttctctgaagggtttttcgccaagtggtggcgctgctttcctgagcggtggttcccatttccttatccatggaggagacctctgaacagatcacaaatgttacgtgagctttttcctgttttcactcacctgccatttccaaaagatgcctctttaaacaagtgctcctttcttcacccagaacctgttgtggggagtaagatgcataagatgcctgacctatttatcattggcagcggtgaggccatgttgcagctcatccctcccttccagtgccgaagacattgtcagtctgtggccatgccaatagagccaggggatatcggctatgtcgacaccacccactggaaggtctacgttatagccagaggggtccagcctttggtcatctgcgatggaaccgctttctcagaactgtaggaaatagaactgtgcacaggaacagcttccagagccgaaaaccaggttgaaaggggaaaaataaaaacaaaaacgatgaaactgctttctgggggttggttacttagttacctgccctttgcatgcatgtgtgaaccagctgtgagctgcaaggcagtggccagagcctcgccctcctgactcttcctgcaggtggctcaggaaggattcagcctggccacttggctaggactctgccagcacccatctgagactgacctcttccgggcctttggacactatgaccttgatgctgcccttcaggcaggaaacagggctggtgcctttcttcacctgcatggccagcttccttccctggcagtggagagggcagccaacaggttctaatgtcagagccatcctttaccaggtgggcctgcttgtccctgtcttgcctgccacatcactctactttttggaaggccatggctgattaaagaagttcttgtagtttcccaagcaaagtggaatctagaaacagtgaaaaaagttcagataa

SEQ ID NO: 1778 - DNA, 434 bp, Artificial
  cDNA Sequence
ctggacgggagaaggagagacggctggccaccatgcacggctcctgcagtttcctgatgcttctgctgccgctactgctactgctggtggccaccacaggccccgttggagccctcacagatgaggagaaacgtttgatggtggagctgcacaacctctaccgggcccaggtatccccgacggcctcagacatgctgcacatgagatgggacgaggagctggccgccttcgccaaggcctacgcacggcagtgcgtgtggggccacaacaaggagcgcgggcgccgcggcgagaatctgttcgccatcacagacgagggcatggacgtgccgctggccatggaggagtggcaccacgagcgtgagcactacaacctcagcgccgccacctgcagcccaggccagatgtgcggccactacacgcaggtgtgggcc

SEQ ID NO: 1779 - DNA, 1674 bp, Artificial
  cDNA Sequence
gagaaggagagacggctggccaccatgcacggctcctgcagtttcctgatgcttctgctgccgctactgctactgctggtggccaccacaggccccgttggagccctcacagatgaggagaaacgtttgatggtggagctgcacaacctctaccgggcccaggtatccccgacggcctcagacatgctgcacatgagatgggacgaggagctggccgccttcgccaaggcctacgcacggcagtgcgtgtggggccacaacaaggagcgcgggcgccgcggcgagaatctgttcgccatcacagacgagggcatggacgtgccgctggccatggaggagtggcaccacgagcgtgagcactacaacctcagcgccgccacctgcagcccaggccagatgtgcggccactacacgcaggtggtatgggccaagacagagaggatcggctgtggttcccacttctgtgagaagctccagggtgttgaggagaccaacatcgaattactggtgtgcaactatgagcctccggggaacgtgaaggggaaacggccctaccaggaggggactccgtgctcccaatgtccctctggctaccactgcaagaactccctctgtgaacccatcggaagcccggaagatgctcaggatttgccttacctggtaactgaggccccatccttccgggcgactgaagcatcagactctaggaaaatgggtactccttcttccctagcaacggggattccggctttcttggtaacagaggtctcaggctccctggcaaccaaggctctgcctgctgtggaaacccaggccccaacttccttagcaacgaaagacccgccctccatggcaacagaggctccaccttgcgtaacaactgaggtcccttccattttggcagctcacagcctgccctccttggatgaggagccagttaccttccccaaatcgacccatgttcctatcccaaaatcagcagacaaagtgacagacaaaacaaaagtgccctctaggagcccagagaactctctggaccccaagatgtccctgacaggggcaagggaactcctaccccatgcccaggaggaggctgaggctgaggctgagttgcctccttccagtgaggtcttggcctcagtttttccagcccaggacaagccaggtgagctgcaggccacactggaccacacggggcacacctcctccaagtccctgcccaatttccccaatacctctgccaccgctaatgccacgggtgggcgtgccctggctctgcagtcgtccttgccaggtgcagagggccctgacaagcctagcgtcgtgtcagggctgaactcgggccctggtcatgtgtggggccctctcctgggactactgctcctgcctcctctggtgttggctggaatcttctgaaggggataccactcaaaggcaaggcctggtgaggggggccctggcctcatacccacctggattgtcttcctccaagtgagagaccacagcttcctgggcaggtcctgctctgtggcccagcagccccccttcaccccaacttctggccagattccaggccagcactcttgtcctcctgggaggcgtctacagggccagcccctggcactgccccaggagtgccttggctctgggtaggcccatccttcagctggctgc

SEQ ID NO: 1780 - DNA, 1659 bp, Artificial
  cDNA Sequence
ctggccaccatgcacggctcctgcagtttcctgatgcttctgctgccgctactgctactgctggtggccaccacaggccccgttggagccctcacagatgaggagaaacgtttgatggtggagctgcacaacctctaccgggcccaggtatccccgacggcctcagacatgctgcacatgagatgggacgaggagctggccgccttcgccaaggcctacgcacggcagtgcgtgtggggccacaacaaggagcgcgggcgccgcggcgagaatctgttcgccatcacagacgagggcatggacgtgccgctggccatggaggagtggcaccacgagcgtgagcactacaacctcagcgccgccacctgcagcccaggccagatgtgcggccactacacgcaggtggtatgggccaagacagagaggatcggctgtggttcccacttctgtgagaagctccagggtgttgaggagaccaacatcgaattactggtgtgcaactatgagcctccggggaacgtgaaggggaaacggccctaccaggaggggactccgtgctcccaatgtccctctggctaccactgcaagaactccctctgtgaacccatcggaagcccggaagatgctcaggatttgccttacctggtaactgaggccccatccttccgggcgactgaagcatcagactctaggaaaatgggtactccttcttccctagcaacggggattccggctttcttggtaacagaggtctcaggctccctggcaaccaaggctctgcctgctgtggaaacccaggccccaacttccttagcaacgaaagacccgccctccatggcaacagaggctccaccttgcgtaacaactgaggtcccttccattttggcagctcacagcctgccctccttggatgaggagccagttaccttccccaaatcgacccatgttcctatcccaaaatcagcagacaaagtgacagacaaaacaaaagtgccctctaggagcccagagaactctctggaccccaagatgtccctgacaggggcaagggaactcctaccccatgcccaggaggaggctgaggctgaggctgagttgcctccttccagtgaggtcttggcctcagtttttccagcccaggacaagccaggtgagctgcaggccacactggaccacacggggcacacctcctccaagtccctgcccaatttccccaatacctctgccaccgctaatgccacgggtgggcgtgccctggctctgcagtcgtccttgccaggtgcagagggccctgacaagcctagcgtcgtgtcagggctgaactcgggccctggtcatgtgtggggccctctcctgggactactgctcctgcctcctctggtgttggctggaatcttctgaaggggataccactcaaaggcaaggcctggtgaggggggccctggcctcatacccacctggattgtcttcctccaagtgagagaccacagcttcctgggcaggtcctgctctgtggcccagcagccccccttcaccccaacttctggccagattccaggccagcactcttgtcctcctgggaggcgtctacagggccagcccctggcactgccccaggagtgccttggctctgggtaggcccatccttcagctggctgc

SEQ ID NO: 1781 - DNA, 1431 bp, Artificial
  cDNA Sequence
tcggacccggaagtggcgccctgggctcgcggcggtgccgcggggatggcgggagccggagctggagccggagctcgcggcggagcggcggcgggggtcgaggctcgagctcgcgatccaccgcccgcgcaccgcgcacatcctcgccaccctcggcctgcggctcagccctcggcccgcaggatggatggcgggtcagggggcctggggtctggggacaacgccccgaccactgaggctcttttcgtggcactgggcgcgggcgtgacggcgctcagccatcccctgctctacgtgaagctgctcatccaggtgggtcatgagccgatgccccccacccttgggaccaatgtgctggggaggaaggtcctctatctgccgagcttcttcacctacgccaagtacatcgtgcaagtggatggtaagatagggctgttccgaggcctgagtccccggctgatgtccaacgccctctctactgtgactcggggtagcatgaagaaggttttccctccagatgagattgagcaggtttccaacaaggatgatatgaagacttccctgaagaaagttgtgaaggagacctcctacgagatgatgatgcagtgtgtgtcccgcatgttggcccaccccctgcatgtcatctcaatgcgctgcatggtccagtttgtgggacgggaggccaagtacagtggtgtgctgagctccattgggaagattttcaaagaggaagggctgctgggattcttcgttggattaatccctcacctcctgggcgatgtggttttcttgtggggctgtaacctgctggcccacttcatcaatgcctacctggtggatgacagcttcagccaggccctggccatccggagctataccaagttcgtgatggggattgcagtgagcatgctgacctaccccttcctgctagttggcgacctcatggctgtgaacaactgcgggctgcaagctgggctccccccttactccccagtgttcaaatcctggattcactgctggaagtacctgagtgtgcagggccagctcttccgaggctccagcctgcttttccgccgggtgtcatcaggatcatgctttgccctggagtaacctgaatcatctaaaaaacacggtctcaacctggccaccgtgggtgaggcctgaccaccttgggacacctgcaagacgactccaacccaacaacaaccagatgtgctccagcccagccgggcttcagttccatatttgccatgtgtctgtccagatgtggggttgagcgggggtggggctgcacccagtggattgggtcacccggcagacctagggaaggtgaggcgaggtggggagttggcagaatccccatacctcgcagatttgctgagtctgtcttgtgcagagggccagagaatggcttatgggggcccaggttgg

SEQ ID NO: 1782 - DNA, 1385 bp, Artificial
  cDNA Sequence
tcggacccggaagtggcgccctgggctcgcggcggtgccgcggggatggcgggagccggagctggagccggagctcgcggcggagcggcggcgggggtcgaggctcgagctcgcgatccaccgcccgcgcaccgcgcacatcctcgccaccctcggcctgcggctcagccctcggcccgcaggatggatggcgggtcagggggcctggggtctggggacaacgccccgaccactgaggctcttttcgtggcactgggcgcgggcgtgacggcgctcagccatcccctgctctacgtgaagctgctcatccaggtgggtcatgagccgatgccccccacccttgggaccaatgtgctggggaggaaggtcctctatctgccgagcttcttcacctacgccaagtacatcgtgcaagtggatggtaagatagggctgttccgaggcctgagtccccggctgatgtccaacgccctctctactgtgactcggggtagcatgaagaaggttttccctccagatgagattgagcaggtttccaacaaggatgatatgaagacttccctgaagaaagttgtgaaggagacctcctacgagatgatgatgcagtgtgtgtcccgcatgttggcccaccccctgcatgtcatctcaatgcgctgcatggtccagtttgtgggacgggaggccaagtacagtggtgtgctgagctccattgggaagattttcaaagaggaagggctgctgggattcttcgttggattaatccctcacctcctgggcgatgtggttttcttgtggggctgtaacctgctggcccacttcatcaatgcctacctggtggatgacagcgtgagtgacaccccaggggggctgggaaacgaccagaatccaggttcccagttcagccaggccctggccatccggagctataccaagttcgtgatggggattgcagtgagcatgctgacctaccccttcctgctagttggcgacctcatggctgtgaacaactgcgggctgcaagctgggctccccccttactccccagtgttcaaatcctggattcactgctggaagtacctgagtgtgcagggccagctcttccgaggctccagcctgcttttccgccgggtgtcatcaggatcatgctttgccctggagtaacctgaatcatctaaaaaacacggtctcaacctggccaccgtgggtgaggcctgaccaccttgggacacctgcaagacgactccaacccaacaacaaccagatgtgctccagcccagccgggcttcagttccatatttgccatgtgtctgtccagatgtggggttgagcgggggtggggctgcacccagtggattgggtcacccggcagacctagggaaggtgag

SEQ ID NO: 1783 - DNA, 1385 bp, Artificial; identical to SEQ ID NO: 1782
  cDNA Sequence

SEQ ID NO: 1784 - DNA, 1090 bp, Artificial
  cDNA Sequence
tcggacccggaagtggcgccctgggctcgcggcggtgccgcggggatggcgggagccggagctggagccggagctcgcggcggagcggcggcgggggtcgaggctcgagctcgcgatccaccgcccgcgcaccgcgcacatcctcgccaccctcggcctgcggctcagccctcggcccgcaggatggatggcgggtcagggggcctggggtctggggacaacgccccgaccactgaggctcttttcgtggcactgggcgcgggcgtgacggcgctcagccatcccctgctctacgtgaagctgctcatccaggtgggtcatgagccgatgccccccacccttgggaccaatgtgctggggaggaaggtcctctatctgccgagcttcttcacctacgccaagtacatcgtgcaagtggatggtaagatagggctgttccgaggcctgagtccccggctgatgtccaacgccctctctactgtgactcggggtagcatgaagaaggttttccctccagatgagattgagcaggtttccaacaaggatgatatgaagacttccctgaagaaagttgtgaaggagacctcctacgagatgatgatgcagtgtgtgtcccgcatgttggcccaccccctgcatgtcatctcaatgcgctgcatggtccagtttgtgggacgggaggccaagtacagtggtgtgctgagctccattgggaagattttcaaagaggaagggctgctgggattcttcgttggattaatccctcacctcctgggcgatgtggttttcttgtggggctgtaacctgctggcccacttcatcaatgcctacctggtggatgacagcgtgagtgacaccccaggggggctgggaaacgaccagaatccaggttcccagttcagccaggccctggccatccggagctataccaagttcgtgatggggattgcagtgagcatgctgacctaccccttcctgctagttggcgacctcatggctgtgaacaactgcgggctgcaagctgggctccccccttactccccagtgttcaaatcctggattcactgctggaagtacctgagtgtgcagg

SEQ ID NO: 1785 - DNA, 929 bp, Artificial
  cDNA Sequence
aggttttccctccagatgagattgagcaggtttccaacaaggatgatatgaagacttccctgaagaaagttgtgaaggagacctcctacgagatgatgatgcagtgtgtgtcccgcatgttggcccaccccctgcatgtcatctcaatgcgctgcatggtccagtttgtgggacgggaggccaagtacagtggtgtgctgagctccattgggaagattttcaaagaggaagggctgctgggattcttcgttggattaatccctcacctcctgggcgatgtggttttcttgtggggctgtaacctgctggcccacttcatcaatgcctacctggtggatgacagcttcagccaggccctggccatccggagctataccaagttcgtgatggggattgcagtgagcatgctgacctaccccttcctgctagttggcgacctcatggctgtgaacaactgcgggctgcaagctgggctccccccttactccccagtgttcaaatcctggattcactgctggaagtacctgagtgtgcagggccagctcttccgaggctccagcctgcttttccgccgggtgtcatcaggatcatgctttgccctggagtaacctgaatcatctaaaaaacacggtctcaacctggccaccgtgggtgaggcctgaccaccttgggacacctgcaagacgactccaacccaacaacaaccagatgtgctccagcccagccgggcttcagttccatatttgccatgtgtctgtccagatgtggggttgagcgggggtggggctgcacccagtggattgggtcacccggcagacctagggaaggtgaggcgaggtggggagttggcagaatccccatacctcgcagatttgctgagtctgtcttgtgcagagggccagagaatggcttatgggggcccaggttgg

SEQ ID NO: 1786 - DNA, 1098 bp, Artificial
  cDNA Sequence
cggtatcgccacttggagaccaccgcgaatgaagtttgcattttcctctgttcttgagcccagcttcttctcgtctcccaccccagcttcccggcattggaagaagggaccgtcctcttccttgtcttggccacccaaatcctggtatcgaaagggttgaacggaccggaagtgtgcagcagcgacgggtccccagctaatcgacgccggaagtagcaattactagacaagcattccgccgccggcttcgctatggcggcaattcccccagattcctggcagccacccaacgtttacttggagaccagcatgggaatcattgtgctggagctgtactggaagcatgctccaaagacctgtaagaactttgctgagttggctcgtcgaggttactacaatggcacaaaattccacagaattatcaaagacttcatgatccaaggaggtgacccaacagggacaggtcgaggtggtgcatctatctatggcaaacagtttgaagatgaacttcatccagacttgaaattcacgggggctggaattctcgcaatggccaatgcggggccagataccaatggcagccagttctttgtgaccctcgcccccacccagtggcttgacggcaaacacaccatttttggccgagtgtgtcagggcataggaatggtgaatcgcgtgggaatggtagaaacaaactcccaggaccgccctgtggacgacgtgaagatcattaaggcatacccttctgggtagacttgctaccctcttgagcagctcttctgagatggccccagtgaaccagcttctagatgacatagaatgacatgtaatgctaaattcattttggctttgcaagtcatgaagcttaggaggcctggcatcttgggtgagttagagatggaagtacattttaataggatgcttcttttctcttcccccagtgcctaggttgccagagcatttgcacaaatgcccctgtttatcaataggtgactacttactacacatgaaccataatgctgcttcttgtgcatgtctgctctgatatacgtcgaacaatgtagcagccactgtcatttctcagtggttttgcctaac

SEQ ID NO: 1787 - DNA, 638 bp, Artificial
  cDNA Sequence
cagcatgggaatcattgtgctggagctgtactggaagcatgctccaaagacctgtaagaactttgctgagttggctcgtcgaggttactacaatggcacaaaattccacagaattatcaaagacttcatgatccaaggaggtgacccaacagggacaggtcgaggtggtgcatctatctatggcaaacagtttgaagatgaacttcatccagacttgaaattcacgggggctggaattctcgcaatggccaatgcggggccagataccaatggcagccagttctttgtgaccctcgcccccacccagtggcttgacggcaaacacaccatttttggccgagtgtgtcagggcataggaatggtgaatcgcgtgggaatggtagaaacaaactcccaggaccgccctgtggacgacgtgaagatcattaaggcatacccttctgggtagacttgctaccctcttgagcagctcttctgagatggccccagtgaaccagcttctagatgacatagaatgacatgtaatgctaaattcattttggctttgcaagtcatgaagcttaggaggcctggcatcttgggtgagttagagatggaagtacattttaataggatgcttcttttctcttcccccagtg

SEQ ID NO: 1788 - DNA, 646 bp, Artificial
  cDNA Sequence
cacagtgcagctccatgctgagcttatgccccttctgcagtggccaagaagaaggaccatcaaggtggaggtgtacgactgggatcgggacggcagccatgacttcattggggagttcaccaccagttaccgggagctggcccgtgggcagagccaattcaacatctatgaggtggtaaacccgaaaaagaaaatgaagaaaaagaaatacgtgaattctggcacagtcaccctgctttcctttgctgtggagtcagagtgcaccttccttgactacatcaaaggagggacccagatcaacttcactgtggccattgatttcactgcctccaatgggaacccctcacagtccacatccctgcactacatgagcccctaccagctgaacgcctacgcgctggcgctgactgccgtcggagagatcatccagcactacgacagtgacaagatgttccctgccctgggcttcggggccaagctgcccccggatggcagagtgtcccacgagttcccactgaatggcaaccaggagaacccctcatgctgtggcatcgacggcatcctggaggcctaccaccgcagcctgcgcactgtgcagctgtacggccccaccaactttgcccccgtggtcacccacgtggccagg

SEQ ID NO: 1789 - DNA, 516 bp, Artificial
  cDNA Sequence
ctcacccagacagaagagaccacggtaaagatcagctgacggcctctgtgggaacaaagacagggaaaggggaaatgagttcaccagaaaccaacaggcagcacaggaggtggtaaacccgaaaaagaaaatgaagaaaaagaaatacgtgaattctggcacagacccagatcaacttcactgtggccattgatttcactgcctccaatgggaacccctcacagtccacatccctgcactacatgagcccctaccagctgaacgcctacgcgctggcgctgactgccgtcggagagatcatccagcactacgacagtgacaagatgttccctgccctgggcttcggggccaagctgcccccggatggcagagtgtcccacgagttcccactgaatggcaaccaggagaacccctcatgctgtggcatcgacggcatcctggaggcctaccaccgcagcctgcgcactgtgcagctgtacggccccaccaactttgcccccgtggtcacccacgtgg

SEQ ID NO: 1790 - DNA, 815 bp, Artificial
  cDNA Sequence
cagaagagaccacggtaaagatcagctgacggcctctgtgggaacaaagacagggaaaggggaaatgagttcaccagaaaccaacaggcagcacaggaggtggtaaacccgaaaaagaaaatgaagaaaaagaaatacgtgaattctggcacagtcaccctgctttcctttgctgtggagtcagagtgcaccttccttgactacatcaaaggagggacccagatcaacttcactgtggccattgatttcactgcctccaatgggaacccctcacagtccacatccctgcactacatgagcccctaccagctgaacgcctacgcgctggcgctgactgccgtcggagagatcatccagcactacgacagtgacaagatgttccctgccctgggcttcggggccaagctgcccccggatggcagagtgtcccacgagttcccactgaatggcaaccaggagaacccctcatgctgtggcatcgacggcatcctggaggcctaccaccgcagcctgcgcactgtgcagctgtacggccccaccaactttgcccccgtggtcacccacgtggccaggaatgcagcggccgtgcaggatggctcccagtactcggtgctgctcatcattactgatggggtcatctcggacatggcgcagaccaaggaggccattgtcaacgctgccaagctccccatgtccatcattatcgtcggcgtgggccaggcagagttcgacgccatggtggagctggatggcgacgacgtgcggatctcctcccgggggaagctggctgaacgcgacatcgtccaggtgaagcc

SEQ ID NO: 1791 - DNA, 571 bp, Artificial
  cDNA Sequence
gaagagaccacggtaaagatcagctgacggcctctgtgggaacaaagacagggaaaggggaaatgagttcaccagaaaccaacaggcagcacaggaggtggtaaacccgaaaaagaaaatgaagaaaaagaaatacgtgaattctggcacagtcaccctgctttcctttgctgtggagtcagagtgcaccttccttgactacatcaaaggagggacccagatcaacttcactgtggccattgatttcactgcctccaatgggaacccctcacagtccacatccctgcactacatgagcccctaccagctgaacgcctacgcgctggcgctgactgccgtcggagagatcatccagcactacgacagtgacaagatgttccctgccctgggcttcggggccaagctgcccccggatggcagagtgtcccacgagttcccactgaatggcaaccaggagaacccctcatgctgtggcatcgacggcatcctggaggcctaccaccgcagcctgcgcactgtgcagctgtacggccccaccaactttgcccccgtggtcacccacgtggccagg

SEQ ID NO: 1792 - DNA, 845 bp, Artificial
  cDNA Sequence
ctcggccccgggctgccgcgccagcccgtctccgcggcgggggaccgggctgccttggcccctcagcgctcgcgtcttttccggcagttggaacgcttcctgttgtcctcacccgtaaccgcctgttgccccctgtctcagagtccctcacgcgtcccctcccgtctttggctcgttggctgccgccgccggggcttcgccagccttcaagtcgagactactggccgaaggggcgtctgcggctctccgccgtccccagccctgcctctccctgggctctgccatggcaatgacaggctcaacaccttgctcatccatgagtaaccacacaaaggaaagggtgacaatgaccaaagtgacactggagaatttttatagcaaccttatcgctcaacatgaagaacgagaaatgagacaaaagaagttagaaaaggtgatggaagaagaaggcctaaaagatgaggagaaacgactccggagatcagcacatgctcggaaggaaacagagtttcttcgtttgaagagaacaagacttggattggaagattttgagtccttaaaagtaataggcagaggagcatttggtgaggtacggcttgttcagaagaaagatacgggacatgtgtatgcaatgaaaatactccgtaaagcagatatgcttgaaaaagagcaggttggccacattcgtgcggagcgtgacattctagtggaggcagacagtttgtgggttgtgaaaatgttctatagttttcaggataagctaaacctctacctaatcatggagttcctgcctggaggggacatgatgaccttgttgatgaaaaaagacactctgacagaagagg

SEQ ID NO: 1793 - DNA, 664 bp, Artificial
  cDNA Sequence
tttctgactttggtctttgcacaggactgaaaaaagcacataggacagaattttataggaatctgaaccacagcctccccagtgatttcactttccagaacatgaattccaaaaggaaagcagaaacctggaaaagaaatagacgtcagctagccttctccacagtaggcactcctgactacattgctcctgaggtgttcatgcagaccgggtacaacaagctctgtgattggtggtcgcttggggtgatcatgtatgagatgctcatcggctacccacctttctgttctgagacccctcaagagacatataagaaggtgatgaactggaaagaaactttgacttttcctccagaagttcccatctctgagaaagccaaggatctaattttgaggttctgctgtgaatgggaacatagaattggagctcctggagttgaggaaataaaaagtaactctttttttgaaggcgttgactgggaacatatcagagagagacctgctgcaatatctattgaaatcaaaagcattgatgatacctcaaacttcgatgagtttccagaatctgatattcttaagccaacagtggccacaagtaatcatcctgagactgactacaagaacaaagactgggtcttcatcaattacacgtacaagcgctttga

SEQ ID NO: 1794 - DNA, 486 bp, Artificial
  cDNA Sequence
agcgattaccggagcgcctcgcgcgcctgcccgcctgcggaggacccgggcgcacacgccttggcgcttctcgaaagagatttcctcccacgcgaccttccagttctcggagccaggttaggggtttggcggaggaggactgcggggcgcgggcctagggccccagcagccacagccaggggagcgctcaagacagaaagccggtggcttcctcacctccacctgtaatgcaggagggagaattggctatttctcctataagccctgtggcagccatgcctcccctaggcacccacgtgcaagccagatgtgaagctcaaattaacctgctgggtgaaggggggatctgcaagctgccaggaagactccgcatccagcccgcactgtggagcagggaggacgtgctgcactggctgcgctgggcagagcaggagtactctctgccatgcaccgcggagcacgggttcgagatgaacggacgcgccc

SEQ ID NO: 1795 - DNA, 734 bp, Artificial
  cDNA Sequence
gctgggagacgcctgggcgccgggggctgcaggtcccagggcgggggctgcgtccgtcaccggcaggtacccaggtatgccgcagagccaggcacgccgtgggcactcagtcagtatctgtggaatgaatgaatgatggtcgtccctgggagcttatctctgaggaatggcacaactagagaggagcgccatctctggcttcagctctaagtccaggcgaaactcattcgcatatgatgttaagcgtgaagtatacaatgaggagacctttcaacaggaacacaaaaggaaggcctcctcttctgggaacatgaacatcaacatcaccaccttcagacaccacgtccagtgccgctgctcatggcacaggttcctacgatgcgtgcttacaatctttcccttcctagaatggatgtgtatgtatcgattaaaggattggcttctgggagacttacttgctggtataagtgttggccttgtgcaagttccccaaggcctgacacttagtttgctggcaaggcaactgattcctcctctcaacatcgcttatgcagctttctgttcttcggtaatctatgtaatttttggatcgtgtcatcaaatgtccattggttccttcttcctggtgagtgctctgctgatcaacgttctgaaagtgagcccattcaacaacggtcaactggtcatgggatctttcgtcaagaatgagttttcggccccctcctaccttatgg

SEQ ID NO: 1796 - DNA, 860 bp, Artificial
  cDNA Sequence
ctgaagccaagagccgaccttctgagccctcaagaaagatcagaacagattcatgggtgatttagcctatctgtcccaggccagcgtggctgagtgtgctggctggaggcctctctctctgcttcgagggtagctgagatccaccccggaaaccggcaggatgaagggggcaagtgaggagaagctggcatctgtgtccaacctggtcactgtgtttgagaatagcaggaccccagaagcagcacccagaggccagaggctagaggacgtgcatcaccgccctgagtgcaggcctcccgagtccccaggaccacgggagaagacgaatgtcggggaggccgtggggtctgagcccaggacagtcagcaggaggtacctgaactccctgaagaacaagctgtccagcgaagcctggaggaaatcttgccagcctgtgaccctctcaggatcggggacgcaggagccagagaagaagatcgtccaggagctgctggagacagagcaggcctatgtggcgcgcctccacctgctagaccaggccagtgtttttccaggagctgctgaagacagcccgcagcagcaaggccttcccagaggatgtggtcagggtcatcttctccaacatctcctccatctatcagttccattctcagttcttcctcccagagctgcagcggcgcctggacgactggtgaggtccaccaggagcccctgaggcctcagaccacagccctggccaggtggaggtggggagaccccagggcgctaggttcagcctcctaggcccaggcccttattgtgtggccatgcctccctggggctcggtctgtctgcacagtgaagggcttgggtgaatgagc

SEQ ID NO: 1797 - DNA, 757 bp, Artificial
  cDNA Sequence
gccgaccttctgagccctcaagaaagatcagaacagattcatgggtgatttagcctatctgtcccaggccagcgtggctgagtgtgctggctggaggcctctctctctgcttcgagggtagctgagatccaccccggaaaccggcaggatgaagggggcaagtgaggagaagctggcatctgtgtccaacctggtcactgtgtttgagaatagcaggaccccagaagcagcacccagaggccagaggctagaggacgtgcatcaccgccctgagtgcaggcctcccgagtccccaggaccacgggagaagacgaatgtcggggaggccgtggggtctgagcccaggacagtcagcaggaggtacctgaactccctgaagaacaagctgtccagcgaagcctggaggaaatcttgccagcctgtgaccctctcaggatcggggacgcaggagccagagaagaagatcgtccaggagctgctggagacagagcaggcctatgtggcgcgcctccacctgctagaccaggccagtgtttttccaggagctgctgaagacagcccgcagcagcaaggccttcccagaggatgtggtcagggtcatcttctccaacatctcctccatctatcagttccattctcagttcttcctcccagagctgcagcggcgcctggacgactggacagctaacccccgcatcggtgacgtgatccagaagctggcccccttcctgaagatgtacagtgagtatgtcaagaa

SEQ ID NO: 1798 - DNA, 582 bp, Artificial
  cDNA Sequence
gctccgactaccgggccgaactgaaatacgacgacaacaggcccaaccgagtctgcctccactgctacgcattcctcactggaaatgtgctgcctgaggccaaggaggacaagaggcggggcatcctggagaaagggtcctcagccacgcctgaccagagcctgatgtgcagcttcctgcagctcatcggggacaagtggggcaagagcggcccccggggctggtgtgtgatccctcgggatgaccccctcgtgctctatgtctatgctgcccctcaggacatgagggctcacacctccatccccctgctgggctaccaggtgactgttgggccccagggggaccctcgggtcttccagctacagcagtcaggccagctctacaccttcaaggccgagacggaggagctgaagggccgctgggtgaaggccatggagcgggcggccagtggctggagccccagctggcccaacgatggggacctgtccgactgagccactgccagccgctctcctgcccacctctccccaccctgaacccagctcctgccacagactgaccctgtggcctcagtgacccact

SEQ ID NO: 1799 - DNA, 685 bp, Artificial
  cDNA Sequence
cctggctgcggggcgagccgggcgtctgctgcagcggccgcggtggctgaggaggcccgagaggagtcggtggcagcggcggcggcgggaccggcagcagcagcagcagcagcagcagcagcaaccactagcctcctgccccgcggcgctgccgcacgagccccacgagccgctcaccccgccgttctcagcgctgcccgaccccgctggcgcgccctcccgccgccagtcccggcagcgccctcagttgtcctccgactcgccctcggccttccgcgccagccgcagccacagccgcaacgccacccgcagccacagccacagccacagccccaggcatagccttcggcacagccccggctccggctcctgcggcagctcctctgggcaccgtccctgcgccgacatcctggaggttgggatgctcttgtccaaaatcaactcgcttgcccacctgcgcgccgcgccctgcaacgacctgcacgccaccaagctggcgcccggcaaggagaaggagcccctggagtcgcagtaccaggtgggcccgctactgggcagcggcggcttcggctcggtctactcaggcatccgcgtctccgacaacttgccggtggccatcaaacacgtggagaaggaccggatttccgactggggagagctgcctaatggcactcgagtgcccatg

SEQ ID NO: 1800 - DNA, 685 bp, Artificial; identical to SEQ ID NO: 1799
  cDNA Sequence

SEQ ID NO: 1801 - DNA, 2006 bp, Artificial
  cDNA Sequence
ctgctgaagaaggtgagctcgggtttctccggcgtcattaggctcctggactggttcgagaggcccgacagtttcgtcctgatcctggagaggcccgagccggtgcaagatctcttcgacttcatcacggaaaggggagccctgcaagaggagctggcccgcagcttcttctggcaggtgctggaggccgtgcggcactgccacaactgcggggtgctccaccgcgacatcaaggacgaaaacatccttatcgacctcaatcgcggcgagctcaagctcatcgacttcgggtcgggggcgctgctcaaggacaccgtctacacggacttcgatgggacccgagtgtatagccctccagagtggatccgctaccatcgctaccatggcaggtcggcggcagtctggtccctggggatcctgctgtatgatatggtgtgtggagatattcctttcgagcatgacgaagagatcatcaggggccaggttttcttcaggcagagggtctcttcagaatgtcagcatctcattagatggtgcttggccctgagaccatcagataggccaaccttcgaagaaatccagaaccatccatggatgcaagatgttctcctgccccaggaaactgctgagatccacctccacagcctgtcgccggggcccagcaaatagcagcctttctggcaggtcctcccctctcttgtcagatgcccgagggaggggaagcttctgtctccagcttcccgagtaccagtgacacgtctcgccaagcaggacagtgcttgatacaggaacaacatttacaactcattccagatcccaggcccctggaggctgcctcccaacagtggggaagagtgactctccaggggtcctaggcctcaactcctcccatagatactctcttcttctcataggtgtccagcattgctggactctgaaatatcccgggggtggggggtgggggtgggtcagaaccctgccatggaactgtttccttcatcatgagttctgctgaatgccgcgatgggtcaggtaggggggaaacaggttgggatgggataggactagcaccattttaagtccctgtcacctcttccgactctttctgagtgccttctgtggggactccggctgtgctgggagaaatacttgaacttgcctcttttacctgctgcttctccaaaaatctgcctgggttttgttccctatttttctctcctgtcctccctcaccccctccttcatatgaaaggtgccatggaagaggctacagggccaaacgctgagccacctgcccttttttctgcctcctttagtaaaactccgagtgaactggtcttcctttttggtttttacttaactgtttcaaagccaagacctcacacacacaaaaaatgcacaaacaatgcaatcaacagaaaagctgtaaatgtgtgtacagttggcatggtagtatacaaaaagattgtagtggatctaatttttaagaaattttgcctttaagttattttacctgtttttgtttcttgttttgaaagatgcgcattctaacctggaggtcaatgttatgtatttatttatttatttatttggttcccttcctattccaagcttccatagctgctgccctagttttctttcctcctttcctcctctgacttggggaccttttgggggagggctgcgacgcttgctctgtttgtggggtgacgggactcaggcgggacagtgctgcagctccctggcttctgtggggcccctcacctacttacccaggtgggtcccggctctgtgggtgatggggaggggcattgctgactgtgtatataggataattatgaaaagcagttctggatggtgtgccttccagatcctctctggggctgtgttttgagcagcaggtagcctgctggttttatctgagtgaaatactgtacaggggaataaaagagatcttatttttttttttatacttggcgttttttgaataaaaaccttttgtcttaa

SEQ ID NO: 1802 - DNA, 1995 bp, Artificial
  cDNA Sequence
aaagggtgtgggtgtctgctcctgcttgcatcgggtggggaggaaggcctcccaaagggcaccctgacttaggatgttgtgcaagcatccttgcttggatcctgtcggccatgagaatctcacccgggctcctgggcagtggtgaatgcaatttaaggatagtctatgagatacctttcttggttgtgcagacatgcatcccttcatccttcgcaggcggtcctgcctcacagggcctcaagttttgggtctgcggccagctgtgtttgtttcttggagcagttcataaagaatttcagtttatggtttgggctagcagagagggacccgagtgtatagccctccagagtggatccgctaccatcgctaccatggcaggtcggcggcagtctggtccctggggatcctgctgtatgatatggtgtgtggagatattcctttcgagcatgacgaagagatcatcaggggccaggttttcttcaggcagagggtctcttcagaatgtcagcatctcattagatggtgcttggccctgagaccatcagataggccaaccttcgaagaaatccagaaccatccatggatgcaagatgttctcctgccccaggaaactgctgagatccacctccacagcctgtcgccggggcccagcaaatagcagcctttctggcaggtcctcccctctcttgtcagatgcccgagggaggggaagcttctgtctccagcttcccgagtaccagtgacacgtctcgccaagcaggacagtgcttgatacaggaacaacatttacaactcattccagatcccaggcccctggaggctgcctcccaacagtggggaagagtgactctccaggggtcctaggcctcaactcctcccatagatactctcttcttctcataggtgtccagcattgctggactctgaaatatcccgggggtggggggtgggggtgggtcagaaccctgccatggaactgtttccttcatcatgagttctgctgaatgccgcgatgggtcaggtaggggggaaacaggttgggatgggataggactagcaccattttaagtccctgtcacctcttccgactctttctgagtgccttctgtggggactccggctgtgctgggagaaatacttgaacttgcctcttttacctgctgcttctccaaaaatctgcctgggttttgttccctatttttctctcctgtcctccctcaccccctccttcatatgaaaggtgccatggaagaggctacagggccaaacgctgagccacctgcccttttttctgcctcctttagtaaaactccgagtgaactggtcttcctttttggtttttacttaactgtttcaaagccaagacctcacacacacaaaaaatgcacaaacaatgcaatcaacagaaaagctgtaaatgtgtgtacagttggcatggtagtatacaaaaagattgtagtggatctaatttttaagaaattttgcctttaagttattttacctgtttttgtttcttgttttgaaagatgcgcattctaacctggaggtcaatgttatgtatttatttatttatttatttggttcccttcctattccaagcttccatagctgctgccctagttttctttcctcctttcctcctctgacttggggaccttttgggggagggctgcgacgcttgctctgtttgtggggtgacgggactcaggcgggacagtgctgcagctccctggcttctgtggggcccctcacctacttacccaggtgggtcccggctctgtgggtgatggggaggggcattgctgactgtgtatataggataattatgaaaagcagttctggatggtgtgccttccagatcctctctggggctgtgttttgagcagcaggtagcctgctggttttatctgagtgaaatactgtacaggggaataaaagagatcttatttttttttttatacttggcgttttttgaataaaaaccttttgtcttaa

SEQ ID NO: 1803 - DNA, 1791 bp, Artificial
  cDNA Sequence
tgcttgcatcgggtggggaggaaggcctcccaaagggcaccctgacttaggatgttgtgcaagcatccttgcttggatcctgtcggccatgagaatctcacccgggctcctgggcagtgggacccgagtgtatagccctccagagtggatccgctaccatcgctaccatggcaggtcggcggcagtctggtccctggggatcctgctgtatgatatggtgtgtggagatattcctttcgagcatgacgaagagatcatcaggggccaggttttcttcaggcagagggtctcttcagaatgtcagcatctcattagatggtgcttggccctgagaccatcagataggccaaccttcgaagaaatccagaaccatccatggatgcaagatgttctcctgccccaggaaactgctgagatccacctccacagcctgtcgccggggcccagcaaatagcagcctttctggcaggtcctcccctctcttgtcagatgcccgagggaggggaagcttctgtctccagcttcccgagtaccagtgacacgtctcgccaagcaggacagtgcttgatacaggaacaacatttacaactcattccagatcccaggcccctggaggctgcctcccaacagtggggaagagtgactctccaggggtcctaggcctcaactcctcccatagatactctcttcttctcataggtgtccagcattgctggactctgaaatatcccgggggtggggggtgggggtgggtcagaaccctgccatggaactgtttccttcatcatgagttctgctgaatgccgcgatgggtcaggtaggggggaaacaggttgggatgggataggactagcaccattttaagtccctgtcacctcttccgactctttctgagtgccttctgtggggactccggctgtgctgggagaaatacttgaacttgcctcttttacctgctgcttctccaaaaatctgcctgggttttgttccctatttttctctcctgtcctccctcaccccctccttcatatgaaaggtgccatggaagaggctacagggccaaacgctgagccacctgcccttttttctgcctcctttagtaaaactccgagtgaactggtcttcctttttggtttttacttaactgtttcaaagccaagacctcacacacacaaaaaatgcacaaacaatgcaatcaacagaaaagctgtaaatgtgtgtacagttggcatggtagtatacaaaaagattgtagtggatctaatttttaagaaattttgcctttaagttattttacctgtttttgtttcttgttttgaaagatgcgcattctaacctggaggtcaatgttatgtatttatttatttatttatttggttcccttcctattccaagcttccatagctgctgccctagttttctttcctcctttcctcctctgacttggggaccttttgggggagggctgcgacgcttgctctgtttgtggggtgacgggactcaggcgggacagtgctgcagctccctggcttctgtggggcccctcacctacttacccaggtgggtcccggctctgtgggtgatggggaggggcattgctgactgtgtatataggataattatgaaaagcagttctggatggtgtgccttccagatcctctctggggctgtgttttgagcagcaggtagcctgctggttttatctgagtgaaatactgtacaggggaataaaagagatcttatttttttttttatacttggcgttttttgaataaaaaccttttgtcttaa

SEQ ID NO: 1804 - DNA, 439 bp, Artificial
  cDNA Sequence
tcgccgggcaaacccttggcccgcctacaaggacttcccccggccagagcaatggccgctgagaacagcaagcagttttggaagaggagcgctaagctgccggggagcattcagcctgtatatggagcacagcatcctcctcttgacccacggctcaccaaaaatttcattaaagaacgatcaaaagtcaacacagttcctctgaagaataagaaggcctccagttttcatgagtttgcacggaataccagtgatgcttgggacattggcgatgatgaggaagaggacttttcctcaccttctttccaaactctgaactcaaaagttgctttggcaactgcagcccaagttctagaaaaccacagcaagctgagagtaaaaccagaacggtcccagtcaacgacatcggacgtccctgccaactacaaggtcataaagt

SEQ ID NO: 1805 - DNA, 2161 bp, Artificial
  cDNA Sequence
cctgtttcagagcaggtacataatcacttcaggaggtacgaggtagaatacctgcagtttgccttccgctggatgaacaacctgcttatgcgggagcttcctcttcgctgcaccatccgcctgtgggacacatatcagtctgaaccagaagggttctcccactttcatctctacgtgtgtgcagccttcttgatcaagtggaggaaagagatcttggatgaggaggattttcagggtctcctcatgctgctacagaacctacctacaatacactggggcaacgaagaaattgggctgcttctcgccgaggcatacagactcaagtacatgtttgccgatgccccaaatcactaccgccgataggtgctgtctcctccggggacccagactgccttcatctctgatggcagtctgatcactgtggccactgtgcgagccgtggaccccggccaggaaccactcctgttgtacaaagctcacacccaccgcccaggtcttaactttctggcatccaccactccatgtctctggatgtgtcacttggaccactgtcagtattccatgccgcgtggatgggcccagttctgggagaggacagaaaaggtggtacagggttgtctgcccctttaaaagaaactggacaaagaaggggaaggctcagggtctcacctcacattgtccctacaaggacaggccccaactgataaccgttgcttttttttttttgtgaacatagtttgatttgatcacaggtcaaaaacgccttatattttcgaaagactcctggcccctcttccctcttcctggtttcctagccgttccccttctgccccagtctgagccagtgaggggtagctttttaaaaccattattctagatggaggaggcactgatgcttgtaactctggaaagaggcctacacccaagggctaggaattttatttttccttttctcaccaggtgtctgcatgtgtgtgtgggtgtgaatgtgtatacatgcccatcagcatttagtcacatgtctgaatttctgtgtccagacgagccccatcaaactagttgggaagggccccagtgaccaagtgtataagcatcccttgaagagggattggggcaggggaggcagaaggggctctccagaccccttttccatgatgacccactccaagatattatgtgtaaattgtgttattatgtatatgggtaaagatgtacaaatatatgtcctctttgtagcagatatgattttatatttataatgtgcatcaacatgtgaaagcaatctaggtcactagcacagaggaagttgccaggaaggtggcttcagcacctccaggttggttctgggtgtcctgctgtgaggggtagaacgggaggctgctgaagtgagtagctgagcagctggagccatcccaagcatcagtgtctcagagtcctcctcgcccctttcttcaccccgccccccaacccccagactttcctggagcatctgccctttgctcctagcagcctccccaggaagggactgcagaggcgggcaagccctctctatgtgtttttatccccaccttccccggaatctggggagggcttttgtttttacgttttcaagttcagcattgtattcggacagaagctgtgactgaagactcagtgccaaggaaaggggcttcttgtgtgtccctcgggtttggggctcttctcagagagcagcactccatatcccttactgtcaccttcactccccacacagctcatgagatgtgtgacccctgtttgagttttggtatttggtagtggagggtggggggatgggggccagcagctgtcatcctcctgggaagccgagcagtgtccctggtgggtaacaccctcaagtctctttgccagtgaggccccaccacatcggtgtgagttaggtttctcatctggagctgtttctcaggcattcttcccaaccctcttccttttccccttcggtgtgcctcagtggtctccttcatagagtgagagggcttgagaccctccctcaaccggactaattaaagaaagacacttgtgttcccaagtggtggttttatttttttagtttttatgtttgtatgggaaattgtggataaagtgaaaagaattgtaaataaatggtgtatttcctcctcca

SEQ ID NO: 1806 - DNA, 419 bp, Artificial
  cDNA Sequence
cttggatgaggaggattttcagcccttattgcagagtaaaattagtcaactcttagtcaccagctgggtcacactggtggctgggaaagaccaagaagaggcagaggaagaggtggcaccgatgataaaaatccattcaagaatttagctgtgacacatctacagcaggttcaaatctctcagctgtaagacaaactggatactttataaggactgtggcctattatgcaccaaaatgccttactgaaattgtctggatgagctgcctgctgggtccagtgatacattagtaaacgaagaagttgaaatagaaggctaacatatgctttggatcgcttggcagtgtgacaccaatatggcatcaagccttactatgagtccaaggacttaatgactaaataaaagtaaaaatgaacaaa

SEQ ID NO: 1807 - DNA, 1093 bp, Artificial
  cDNA Sequence
gctgaggggatgcacagaggcagccagaacctaggtcagggtctcgctcggtgctgaccgcccccggggtcgagtaggcgatgggggagcccggcttcttcgtcacaggagaccgcgccggtggccggagctggtgcctgcggcgggtggggatgagcgccgggtggctgctgctggaagatgggtgcgaggatttggtgtcacataccaactggtatcaaaaatctgccccctgatgatttctcgaaaccactgtgttttgaagcagaatcctgagggccaatggacaattatggacaacaagagtctaaatggtgtttggctgaacagagcgcgtctggaacctttaagggtctattccattcatcagggagactacatccaacttggagtgcctctggaaaataaggagaatgcggagtatgaatatgaagttactgaagaagactgggagacaatatatccttgtctttccccaaagaatgaccaaatgatagaaaaaaataaggaattgagaactaaaaggaaattcagtttggatgaattagcaggtcctggagctgaaggcccctcaaatttgaaatccaaaataaataaagtgtcttgtgaatctggtcagccagtgaaatcacaggggaaaggtgaagtggccagtacaccctctgacaatttggatcctaagttgactgcccttgagccaagtaagaccacaggggctcccatttaccctggcttccccaaagtcacagaggttcatcatgagcagaaagcctcaaactcttcagcatctcagagaagcttacagatgtttaaggtgaccatgtccaggattctgaggctcaaaatacagatgcaggaaaaacatgaagccgttatgaatgtgaaaaagcagacccaaaaggggaactcaaagaaagttgtgcaaatggagcaggaacttcaggacttacagtcccagctgtgtgcagagcaggctcagcagcaggcaagagtggagcaactagagaagactttccaggaagaggaacagcatcttcagatagcccaaggagaaaaggacctgaagcaacagctggcccaggctctgcaggag

SEQ ID NO: 1808 - DNA, 1217 bp, Artificial
  cDNA Sequence
caagtaagaccacaggggctcccatttaccctggcttccccaaagtcacagaggttcatcatgagcagaaagcctcaaactcttcagcatctcagagaagcttacagatgtttaaggtgaccatgtccaggattctgaggctcaaaatacagatgcaggaaaaacatgaagccgttatgaatgtgaaaaagcagacccaaaaggggaactcaaagaaagttgtgcaaatggagcaggaacttcaggacttacagtcccagctgtgtgcagagcaggctcagcagcaggcaagagtggagcaactagagaagactttccaggaagaggaacagcatcttcagggtttggagatagcccaaggagaaaaggacctgaagcaacagctggcccaggctctgcaggaggaagagaaggagaagatgcaagcacagaaggaagaagttcttagccacatgaatgatgtgctagagaatgagctccaatgtattatttgttcagaatacttcattgaggctgtcaccttgaactgtgcccacagtttctgctcctactgtatcaatgaatggatgaagcggaagatagaatgccccatttgtcggaaggacattaagtccaaaacgtactctttggttctggacaattgcattaataagatggtaaataatctgagctcagaagtgaaagaacgacgaattgttctcattagggaacgaaaagcaaagagattgttctgaagaccgtgctctaagggcatttgaaagactgccaggtagtgcgagcctgagatggtctggaggattctctctagccgtgactccgctgctctgaaggtcaactgagaagtcttgtgggacagagacttgagttaggaagccctcagtcacttgccttccacggtggccagccctgctgccatcattggctgaagcaccaccaggattcacggcacccaactgcttcagggtacttcgtagactctgcctcactacatgtcgaaagagttatttgagttctcttctgtttttttttaatttgttgttgttgttactgttttgatacctcggaaacacctccgttgacagttgttttggataggttgggtgtaccccatggctgcctctgaaggcagtgtctattttgagaggatggcttacctcttctttgtgaaaatactatctcatttcctggaaataaaatgtaaaacctgtcagttgctc

SEQ ID NO: 1809 - DNA, 1054 bp, Artificial
  cDNA Sequence
cagaggttcatcatgagcagaaagcctcaaactcttcagcatctcagagaagcttacagatgtttaaggtgaccatgtccaggattctgaggctcaaaatacagatgcaggaaaaacatgaagccgttatgaatgtgaaaaagcagacccaaaaggggaactcaaagaaagttgtgcaaatggagcaggaacttcaggacttacagtcccagctgtgtgcagagcaggctcagcagcaggcaagagtggagcaactagagaagactttccaggaagaggaacagcatcttcagggtttggagatagcccaaggagaaaaggacctgaagcaacagctggcccaggctctgcaggagcattgggctctaatggaagagctaaatcgcagcaagaaggactttgaagcaatcattcaagccaagaacaaagaattagagcagaccaaggaagagaaggagaagatgcaagcacagaaggaagaagttcttagccacatgaatgatgtgctagagaatgagctccaatgtattatttgttcagaatacttcattgagcaaagagattgttctgaagaccgtgctctaagggcatttgaaagactgccaggtagtgcgagcctgagatggtctggaggattctctctagccgtgactccgctgctctgaaggtcaactgagaagtcttgtgggacagagacttgagttaggaagccctcagtcacttgccttccacggtggccagccctgctgccatcattggctgaagcaccaccaggattcacggcacccaactgcttcagggtacttcgtagactctgcctcactacatgtcgaaagagttatttgagttctcttctgtttttttttaatttgttgttgttgttactgttttgatacctcggaaacacctccgttgacagttgttttggataggttgggtgtaccccatggctgcctctgaaggcagtgtctattttgagaggatggcttacctcttctttgtgaaaatactatctcatttcctggaaataaaatgtaaaacctgtcagttgctc

SEQ ID NO: 1810 - DNA, 1259 bp, Artificial
  cDNA Sequence
cagaggttcatcatgagcagaaagcctcaaactcttcagcatctcagagaagcttacagatgtttaaggtgaccatgtccaggattctgaggctcaaaatacagatgcaggaaaaacatgaagccgttatgaatgtgaaaaagcagacccaaaaggggaactcaaagaaagttgtgcaaatggagcaggaacttcaggacttacagtcccagctgtgtgcagagcaggctcagcagcaggcaagagtggagcaactagagaagactttccaggaagaggaacagcatcttcagggtttggagatagcccaaggagaaaaggacctgaagcaacagctggcccaggctctgcaggagcattgggctctaatggaagagctaaatcgcagcaagaaggactttgaagcaatcattcaagccaagaacaaagaattagagcagaccaaggaagagaaggagaagatgcaagcacagaaggaagaagttcttagccacatgaatgatgtgctagagaatgagctccaatgtattatttgttcagaatacttcattgaggctgtcaccttgaactgtgcccacagtttctgctcctactgtatcaatgaatggatgaagcggaagatagaatgccccatttgtcggaaggacattaagtccaaaacgtactctttggttctggacaattgcattaataagatggtaaataatctgagctcagaagtgaaagaacgacgaattgttctcattagggaacgaaaagcaaagagattgttctgaagaccgtgctctaagggcatttgaaagactgccaggtagtgcgagcctgagatggtctggaggattctctctagccgtgactccgctgctctgaaggtcaactgagaagtcttgtgggacagagacttgagttaggaagccctcagtcacttgccttccacggtggccagccctgctgccatcattggctgaagcaccaccaggattcacggcacccaactgcttcagggtacttcgtagactctgcctcactacatgtcgaaagagttatttgagttctcttctgtttttttttaatttgttgttgttgttactgttttgatacctcggaaacacctccgttgacagttgttttggataggttgggtgtaccccatggctgcctctgaaggcagtgtctattttgagaggatggcttacctcttctttgtgaaaatactatctcatttcctggaaataaaatgtaaaacctgtcagttgctc

SEQ ID NO: 1811 - DNA, 1194 bp, Artificial
  cDNA Sequence
cagaggttcatcatgagcagaaagcctcaaactcttcagcatctcagagaagcttacagatgtttaaggtgaccatgtccaggattctgaggctcaaaatacagatgcaggaaaaacatgaagccgttatgaatgtgaaaaagcagacccaaaaggggaactcaaagaaagttgtgcaaatggagcaggaacttcaggacttacagtcccagctgtgtgcagagcaggctcagcagcaggcaagagtggagcaactagagaagactttccaggaagaggaacagcatcttcagggtttggagatagcccaaggagaaaaggacctgaagcaacagctggcccaggctctgcaggagcattgggctctaatggaagagctaaatcgcagcaagaaggactttgaagcaatcattcaagccaagaacaaagaattagagcagaccaaggaagagaaggagaagatgcaagcacagaaggaagaagttcttagccacatgaatgatgtgctagagaatgagctccaatgtattatttgttcagaatacttcattgaggctgtcaccttgaactgtgcccacagtttctgctcctactgtatcaatgaatggatgaagcggaagatagaatgccccatttgtcggaaggacattaagtccaaaacgtactctttggttctggacaattgcattaataagatggtaaataatctgagctcagaagtgaaagaacgacgaattgttctcattagggaacgaaaagcaaagagattgttctgaagaccgtgctctaagggcatttgaaagactgccaggtagtgcgagcctgagatgtcttgtgggacagagacttgagttaggaagccctcagtcacttgccttccacggtggccagccctgctgccatcattggctgaagcaccaccaggattcacggcacccaactgcttcagggtacttcgtagactctgcctcactacatgtcgaaagagttatttgagttctcttctgtttttttttaatttgttgttgttgttactgttttgatacctcggaaacacctccgttgacagttgttttggataggttgggtgtaccccatggctgcctctgaaggcagtgtctattttgagaggatggcttacctcttctttgtgaaaatactatctcatttcctggaaataaaatgtaaaacctg

SEQ ID NO: 1812 - DNA, 610 bp, Artificial
  cDNA Sequence
aggaagagaaggagaagatgcaagcacagaaggaagaagttcttagccacatgaatgatgtgctagagaatgagctccaatgtattatttgttcagaatacttcattgagcaaagagattgttctgaagaccgtgctctaagggcatttgaaagactgccaggtagtgcgagcctgagatggtctggaggattctctctagccgtgactccgctgctctgaaggtcaactgagaagtcttgtgggacagagacttgagttaggaagccctcagtcacttgccttccacggtggccagccctgctgccatcattggctgaagcaccaccaggattcacggcacccaactgcttcagggtacttcgtagactctgcctcactacatgtcgaaagagttatttgagttctcttctgtttttttttaatttgttgttgttgttactgttttgatacctcggaaacacctccgttgacagttgttttggataggttgggtgtaccccatggctgcctctgaaggcagtgtctattttgagaggatggcttacctcttctttgtgaaaatactatctcatttcctggaaataaaatgtaaaacctgtcagttgctc

SEQ ID NO: 1813 - DNA, 1180 bp, Artificial
  cDNA Sequence
gcccgcagtactggacccgagcgcgacggtgcggctggcggacccgggctggcttgtggggaaacgaaactgagggaggaggcggcggctctggcagcggcggcgacagtgtcggcctgaccccccctccgctccccggcagctcgctctctcccctcagcttaacgatgaagaggagaactgacccagaatgcactgcccccatcaagaaacagaaaaaaagagttgcagagcttgccctgagcctcagctccacgtccgatgatgaacctccctcctctgtcagtcatggagcaaaagcatctactacaagccttagtgggtctgatagtgagaccgaggggaaacaacacagctctgactcttttgacgatgcattcaaagcagactctcttgtggaaggaacttcttctcgctattccatgtataatagcgtctcccagaagcttatggccaagatgggcttcagggaaggtgaaggattgggtaaatacagccagggtcggaaggacatcgttgaggcttccagtcagaaaggtcgaagaggcttgggtctgacactccggggctttgaccaggagctgaacgtggactggcgagatgagccagagcccagtgcttgtgagcaggtgtcatggtttccagaatgtaccactgaaattcctgacactcaggaaatgagcgattggatggtggtgggaaagagaaagatgattattgaagatgaaacagagttttgtggggaagagctgcttcacagtgtgttgcagtgtaagagcgtgtttgatgtcttggatggggaagagatgcggcgagctcggactcgggccaatccctatgagatgatccgaggagtcttctttctaaacagggcagcaatgaagatggctaacatggattttgtatttgatcgcatgttcacaaatccgcgggactcttatgggaagccactggtgaaggaccgggaagctgagcttctgtactttgctgatgtctgcgcaggcccaggtggcttctcagagtatgtgctgtggaggaagaagtggcatgcaaagggctttggaatgactttgaagggccctaatgacttcaagctggaggacttctactctgcttccagtgaactcttcgaaccctactatggtgagggtgggattgatggagatggagatatcacccg

SEQ ID NO: 1814 - DNA, 1252 bp, Artificial
  cDNA Sequence
ccgcagtactggacccgagcgcgacggtgcggctggcggacccgggctggcttgtggggaaacgaaactgagggaggaggcggcggctctggcagcggcggcgacagtgtcggcctgaccccccctccgctccccggcagctcgctctctcccctcagcttaacgatgaagaggagaactgacccagaatgcactgcccccatcaagaaacagaaaaaaagagttgcagagcttgccctgagcctcagctccacgtccgatgatgaacctccctcctctgtcagtcatggagcaaaagggttattcacagtttccatagatgctttctgaggaatggtaaaatgtctgggagcttgcctcaaatacctcaagcatctactacaagccttagtgggtctgatagtgagaccgaggggaaacaacacagctctgactcttttgacgatgcattcaaagcagactctcttgtggaaggaacttcttctcgctattccatgtataatagcgtctcccagaagcttatggccaagatgggcttcagggaaggtgaaggattgggtaaatacagccagggtcggaaggacatcgttgaggcttccagtcagaaaggtcgaagaggcttgggtctgacactccggggctttgaccaggagctgaacgtggactggcgagatgagccagagcccagtgcttgtgagcaggtgtcatggtttccagaatgtaccactgaaattcctgacactcaggaaatgagcgattggatggtggtgggaaagagaaagatgattattgaagatgaaacagagttttgtggggaagagctgcttcacagtgtgttgcagtgtaagagcgtgtttgatgtcttggatggggaagagatgcggcgagctcggactcgggccaatccctatgagatgatccgaggagtcttctttctaaacagggcagcaatgaagatggctaacatggattttgtatttgatcgcatgttcacaaatccgcgggactcttatgggaagccactggtgaaggaccgggaagctgagcttctgtactttgctgatgtctgcgcaggcccaggtggcttctcagagtatgtgctgtggaggaagaagtggcatgcaaagggctttggaatgactttgaagggccctaatgacttcaagctggaggacttctactctgcttccagtgaactcttcgaaccctactatggtgagggtgggattgatggagatggagatatcacccg

SEQ ID NO: 1815 - DNA, 730 bp, Artificial
  cDNA Sequence
cgcaagggtgtccattttctgatggctgatgggggtttctcggtggaggggcaggagaacctgcaggagatcctcagcaagcagctgcttctgtgtcagttcctcatggcgctgtccattgtccggacaggaggccacttcatctgtaaaacctttgacctgttcacaccgtttagtgtggggcttgtctacctgctgtactgctgctttgaacgagtttgtctcttcaagcctattaccagccgtcctgccaactcagagaggtatgtggtgtgcaagggcctgaaggtgggcatagatgatgttcgggattacctcttcgcagtgaatattaaactcaatcagctgcggaacacggattccgacgtcaacttggtggtccccctggaggtgatcaagggagaccatgaatttactgactacatgatacggtccaatgagagccactgtagtctgcagatcaaagctctggcgaaaatccatgcctttgttcaagacacgacactgagtgagcctcgacaggcagagatacggaaggagtgcctccgactctgggggatcccagaccaggctcgtgtggctccttcttcctccgaccctaaatcgaagttctttgagctaatccagggcactgagattgacatcttcagctacaagcccacactgctcacctctaaaaccctggagaagatccgccctgtgtttgactaccgctgcatggtatctggca

SEQ ID NO: 1816 - DNA, 550 bp, Artificial; identical to SEQ ID NO: 1254
  cDNA Sequence

SEQ ID NO: 1817 - DNA, 2050 bp, Artificial
  cDNA Sequence
gaaatcccagatctacacatgggatggccgccagtcagaccgctggatcaagctagacctgaagacagagctgccccgggacactctgctatctgtggaaattgtgcatgagctgaaaggggaggggaaggcccagaggaagatcagtgccatccacatcctcgatgtccttgtgctgaatggcaccgacgttcgggagcagcactttaaccagcgaattcagcttgccgagaaatttgtgaaagccgtttccaagcctagtcggcccgacatgaatcccatcagggtgaaggaggtgtacagactggaagagatggagaagatttttgtcaggttggagatgaagatcatcaagggctccagtggcaccccaaagctcagctacacagggcgtgatgaccggcactttgtacccatgggcctctacatcgtcaggacagtgaatgagccctggactatgggattcagcaaaagcttcaagaagaagttcttctacaacaagaaaaccaaggactctacttttgacctccctgcagactccattgccccatttcacatttgctactatggccggctcttctgggagtggggggatggcattcgtgtgcatgactcccagaagccccaggaccaggacaagctgtccaaggaggacgtcctctccttcatccagatgcacagggcctaagagcctcagaatgtgccacccctgcagaatgccctgtcattcctgagatggggccacctggggcccacagtgctggcttcttccccctcttgaaaagggactggggagcattgcacctggcatgaggagtgggtggcctcctctccatcccctgaagagctcaggcagggccctgcagagaacactcatgttccttctgggacacctgcctgggaactttcccctgccaggactcagcctgaaggaagctgctcctgaggcaggtatgaggtcagtgcctagggcacgtgggactgatggaggacatatcagagtggcagagctgtgggctctgctgttctctcctgcatcctgtagactcacttttctgagttccatgcactgccctgagggtagccatgcccttgctttgcccaactttttattgggccatccctgagtgggtggagacctgctgtcatgagctggccaggagaacctgctataaaaaaatcaaggttttgtttctttgaacttactctgttttgatgccaaattggagaccattttcttgtctccttcccccactcatcctggccttccctggagttcttcctagcccagagctctgacagtccagcagggtgggaaggagggagtttgggcaaactctcatccctgataccacattgagatcctgggagccctcttttcgtactgagtatggagttgtagagccatcctaggtgccatccccttttggtccaaacattgggcagcgctagatggcaggaagcagccttgaagacccgtctttcccccacagcagcaggggccccagcagtaacaaagggtacctccaggggtttgggtagcgctgccctctggcagtcatgcaccgctgtctgccatagccgctctagggtcttggcagaattctgagcttgaagtgcagctcccttactaccctttcccttcctttttcttccctaataggaggtacaatctgcttttgtttgtcgttaagtggtcactcccatttcctttatcttggccgacaacacagagaggagggggagctgggcagtagcttggggtgggggtgggcacctgtggttgtttttaatgggaaatacctctcagagatgttcatgcaggctccctagggccccatcccagtgccaggctggtttccatggagatagggcactgaggctcccgtgaggttggaatcgacttcaccatgggggtccttcagccagcatccagctccccacccccaggctggcagtagcactgctgagatgctgtatttccacccaattctgggtatatcagtgtgtcttgcagaatcttggatcattaaagataaacatattttta

SEQ ID NO: 1818 - DNA, 1040 bp, Artificial
  cDNA Sequence
cccagatctacacatgggatggccgccagtcagaccgctggatcaagctagacctgaagacagagctgccccgggacactctgctatctgtggaaattgtgcatgagctgaaaggggaggggaaggcccagaggaagatcagtgccatccacatcctcgatgtccttgtgctgaatggcaccgacgttcgggagcagcactttaaccagcggtctgacctgggccccagggtagggagggtgggggtaggccagggcagcttgggaggacagcggcctcccgaggtgtggccccttatctaggccttctctgcttgttgacatcctgagagtttccccctcccacccactgactggtcccaaagtcagggtgagaattggagttgccacttcagagtttgctagggcttgggccctggttatcagagataccagcacactccattttgccacagctgctcaggttgaggtatttatgttaaggttgagcaagagggtgaccttgcgggtagagggggtactccttggaagaaatatcctgtgcttgagtggtcccatttaagttgctcatctgagtgggtgcactgtagtttccatgctttggggtgacagggcagacacatacaataaagatgatacttgaagttctagtggaggtgactgagcacagctgaaggcacacttcaggaaaaccaaccgacatagtgaaattagagaattcagcttgccgagaaatttgtgaaagccgtttccaagcctagtcggcccgacatgaatcccatcagggtgaaggaggtgtacagactggaagagatggagaagatttttgtcaggttggagatgaagatcatcaagggctccagtggcaccccaaagctcagctacacagggcgtgatgaccggcactttgtacccatgggcctctacatcgtcaggacagtgaatgagccctggactatgggattcagcaaaagcttcaagaagaagttcttctacaacaagaaaaccaaggactctacttttgacctccctgcagactcc

SEQ ID NO: 1819 - DNA, 771 bp, Artificial
  cDNA Sequence
aggggaaggcccagaggaagatcagtgccatccacatcctcgatgtccttgtgctgaatggcaccgacgttcgggagcagcactttaaccagcgaattcagcttgccgagaaatttgtgaaagccgtttccaagcctagtcggcccgacatgaatcccatcagggtgaaggaggtgtacagactggaagagatggagaagatttttgtcaggttggagatgaagatcatcaagggctccagtggcaccccaaagctcagctacacagggcgtgatgaccggcactttgtacccatgggcctctacatcgtcaggacagtgaatgagccctggactatgggattcagcaaaagcttcaagaagaagttcttctacaacaagaaaaccaaggactctacttttgacctccctgcagactccattgccccatttcacctccccagccttgcctgcctgtcgaagatggattaactccgcactcccctgggatcgccacatgaccacttcaagtccccaagccgcccttcgctgcacagactgcatttttttctgccataattacaagcaatggcactgactggagggcatgacagtgtgtggtggggggatggacaggtggcacaatgtctgctgctcaaccccagcagtgcccgagccctggaagtaactcccactatttggcttggaaagtgcttcccactgtctccttcccactcgagctgggggccttctcctctattctgaattgtaatccagagctttcccttgaaca

SEQ ID NO: 1820 - DNA, 449 bp, Artificial
  cDNA Sequence
tgagatgacttgcccaaggtcccacagccagtaatttgaatgcaggcagtcaaaccaaggaggaagcagggagcagctgtgcctggatgggcgagggtggaggactgcacaggtcagggagctcgttctggctcctgccaggggagtcggccatgcagtgtgtgaaaggtctcctggttcctgggagtgttggctgtgatgacatcatcctagaagtcactgactggattggcaatggggctgatgctgagtgcctggcacgctatgtgctgggcactgggctacacaacggacactgaatactttccatagacaaccctgcacgatgcatgaccttgggcaagttacttgacctttgtgggcctcagttgccttgtcagtaaattggggataataataggactcacttcccaggaataaatgactttctccaagtaaagcaacttaaa

SEQ ID NO: 1821 - DNA, 531 bp, Artificial
  cDNA Sequence
gcggccgctgcgactccggagccggcggggggctccggtccttccctgcgccaccgcacaggacatctctctggctggggagcggcggtgagacccgccgagggcgtctgtgtccctcctcccccgcggtcctcggtgcgtccgcacgcccctcctcctcggctccctccttcttctctccgcgcctctccgccccctccccgtctccgcaggccgagtggtgcggcccgcctccagctgaccggcctggaatcccggctccgagccccggactcgcgcccgcccgcgcgcccgctccttccccctccccccgccccgagccccccgacgccgccgccaccgcctcctcagagcggggcccgggcccagccgccgccaccgctgccgccgccgagctccgccgccgccgagcaccatgggagacgctgggagcgagcgcagcaaagcgcccagcctgccgcctcgctgtccctgcggcttctgggggtccagcaagactatgaatctctgttccaaatgctttgctggtaa

SEQ ID NO: 1822 - DNA, 955 bp, Artificial
  cDNA Sequence
ggggggctccggtccttccctgcgccaccgcacaggacatctctctggctggggagcggcggtgagacccgccgagggcgtctgtgtccctcctcccccgcggtcctcggtgcgtccgcacgcccctcctcctcggctccctccttcttctctccgcgcctctccgccccctccccgtctccgcaggccgagtggtgcggcccgcctccagctgaccggcctggaatcccggctccgagccccggactcgcgcccgcccgcgcgcccgctccttccccctccccccgccccgagccccccgacgccgccgccaccgcctcctcagagcggggcccgggcccagccgccgccaccgctgccgccgccgagctccgccgccgccgagcaccatgggagacgctgggagcgagcgcagcaaagcgcccagcctgccgcctcgctgtccctgcggcttctgggggtccagcaagactatgaatctctgttccaaatgctttgctgattttcaaaagaaacagccagacgatgattccgctccaagtacaagtaacagccaatcagatttgttttccgaagagaccaccagtgacaacaacaatacctcgataaccacgccaactcttagtcccagccagcagccgcttccgacagaactgaatgtaacttcaccgagtaaagaggagtgtgggccatgcacagacacagctcatgtctcattaatcacaccaacaaaaagatcctgtggtacagattcacagtctgagaatgaggcttcaccagtaaaacggccacgactacttgagaatacggaacggtccgaggaaaccagtcgatctaaacagaagagtcgacgtcggtgcttccagtgccaaaccaaactggagctggtgcagcaggaattgggatcgtgtcgctgcggttatgtgttctgtatgttacatcgcctccccgagca

SEQ ID NO: 1823 - DNA, 435 bp, Artificial
  cDNA Sequence
ttccgcgcctcaaaggcggagtgcggggctgtgggagaaaacgagagcctcgggctgtcgcccggcgacgggcggctgaggccttcgtattcttagaacttttagaatctgaagcaaacttatcttccccctgtctgaagaaggggagcaggtttctgagtactccggggcgcggtgcctccccctaaacgcgaatggaacttttgggaaatgcccctcccccagccccttgtctggggcaacttccttgtctcttctcccccaccggtgttggggagttccttgtctccactcccaaccacagagccacaagtacattatctatgcccaggcgagtccctatgcccaggctaggagagccgcacttcttcctacagctgacacgtttggtttttggaggggaaaggggagctgtagctgaatcagtaatggaaa

SEQ ID NO: 1824 - DNA, 449 bp, Artificial
  cDNA Sequence
tcttcgtcgccgctctctctctcacctctcagggaaagggggggacataggggcgtcgcggggccccggcgaatgcgccccccgccgcctctcgggctgcgccgcctcgcggggatgaagcaccggccgtgaagatggaggtgacctgccttctacttctggcgctgatccccttccactgccggggacaaggagtctacgctccagcccaggcgcagatcgtgcatgcgggccaggcatgtgtggtgaaagaggacaatatcagcgagcgtgtctacaccatccgggagggggacaccctcatgctgcagtgccttgtaacagggcaccctcgaccccaggtacggtggaccaagacggcaggtagcgcctcggacaagttccaggagacatcggtgttcaacgagacgctgcgcatcgagcgtattgcacgcacgcagggcggccgc

SEQ ID NO: 1825 - DNA, 892 bp, Artificial
  cDNA Sequence
ggtgatcccctcccccagctgcagtggtcccatgggcctggcccactgcccctgggtgctctggcccagggtggcaccctcagcatcccttcagtgcaggcccgggactctggctactacaactgcacagccaccaacaatgtgggcaaccctgccaagaagactgtcaacctgctggtgcgatccatgaagaacgctacattccagatcactcctgacgtgatcaaagagagtgagaacatccagctgggccaggacctgaagctatcgtgccacgtggatgcagtgccccaggagaaggtgacctaccagtggttcaagaatggcaagccggcacgcatgtccaagcggctgctggtgacccgcaatgatcctgagctgcccgcagtcaccagcagcctagagctcattgacctgcacttcagtgactatggcacctacctgtgcatggcttctttcccaggggcacccgtgcccgacctcagcgtcgaggtcaacatctcctctgagacagtgccgcccaccatcagtgtgcccaagggtagggccgtggtgaccgtgcgcgagggatcgcctgccgagctgcaatgcgaggtgcggggcaagccgcggccgccagtgctctggtcccgcgtggacaaggaggctgcactgctgccctcggggctgcccctggaggagactccggacgggaagctgcggctggagcgagtgagccgagacatgagcgggacctaccgctgccagacggcccgctataatggcttcaacgtgcgcccccgtgaggcccaggtgcagctgaacgtgcagttcccgccggaggtggagcccagttcccaggacgtgcgccaggcgctgggccggcccgtgctcctgcgctgctcgctgctgc

SEQ ID NO: 1826 - DNA, 1049 bp, Artificial
  cDNA Sequence
ggtgatcccctcccccagctgcagtggtcccatgggcctggcccactgcccctgggtgctctggcccagggtggcaccctcagcatcccttcagtgcaggcccgggactctggctactacaactgcacagccaccaacaatgtgggcaaccctgccaagaagactgtcaacctgctggtgcgatccatgaagaacgctacattccagatcactcctgacgtgatcaaagagagtgagaacatccagctgggccaggacctgaagctatcgtgccacgtggatgcagtgccccaggagaaggtgacctaccagtggttcaagaatggcaagccggcacgcatgtccaagcggctgctggtgacccgcaatgatcctgagctgcccgcagtcaccagcagcctagagctcattgacctgcacttcagtgactatggcacctacctgtgcatggcttctttcccaggggcacccgtgcccgacctcagcgtcgaggtcaacatctcctctgagacagtgccgcccaccatcagtgtgcccaagggtagggccgtggtgaccgtgcgcgagggatcgcctgccgagctgcaatgcgaggtgcggggcaagccgcggccgccagtgctctggtcccgcgtggacaaggaggctgcactgctgccctcggggctgcccctggaggagactccggacgggaagctgcggctggagcgagtgagccgagacatgagcgggacctaccgctgccagacggcccgctataatggcttcaacgtgcgcccccgtgaggcccaggtgcagctgaacgtgcagtgtgagtccaccacgccacccggactaccttcccagctttccttctggctcccagccggcctgtcccctcttcatcctctcacccaccccagtccaaccaaaccccaccagctactcctgatacccctaatgctccttgacagccccatgctgtaggacacggaggtctgtgttctttgctccatttcatcaagtatctcccatcttcattttcagggacccggtgaacaaaaaaaaaa

SEQ ID NO: 1827 - DNA, 867 bp, Artificial
  cDNA Sequence
agccatgaagaacgctacattccagatcactcctgacgtgatcaaagagagtgagaacatccagctgggccaggacctgaagctatcgtgccacgtggatgcagtgccccaggagaaggtgacctaccagtggttcaagaatggcaagccggcacgcatgtccaagcggctgctggtgacccgcaatgatcctgagctgcccgcagtcaccagcagcctagagctcattgacctgcacttcagtgactatggcacctacctgtgcatggcttctttcccaggggcacccgtgcccgacctcagcgtcgaggtcaacatctcctctgagacagtgccgcccaccatcagtgtgcccaagggtagggccgtggtgaccgtgcgcgagggatcgcctgccgagctgcaatgcgaggtgcggggcaagccgcggccgccagtgctctggtcccgcgtggacaaggaggctgcactgctgccctcggggctgcccctggaggagactccggacgggaagctgcggctggagcgagtgagccgagacatgagcgggacctaccgctgccagacggcccgctataatggcttcaacgtgcgcccccgtgaggcccaggtgcagctgaacgtgcagtgtgagtccaccacgccacccggactaccttcccagctttccttctggctcccagccggcctgtcccctcttcatcctctcacccaccccagtccaaccaaaccccaccagctactcctgatacccctaatgctccttgacagccccatgctgtaggacacggaggtctgtgttctttgctccatttcatcaagtatctcccatcttcattttcagggacccggtgaacaaaaaaaaaa

SEQ ID NO: 1828 - DNA, 959 bp, Artificial
  cDNA Sequence
caccttcggggctggtgacatggcctcccgcatcatccactacacagagcccatcaactctccgaacctttcagacaacacctgccactttgaggatgagaagatctgtggctatacccaggacctgacagacaactttgactggacgcggcagaatgccctcacccagaaccccaaacgctcccccaacactggtccccccaccgacataagtggcacccctgagggctactacatgttcatcgagacatcgaggcctcgggagctgggggaccgtgcaaggttagtgagtcccctctacaatgccagcgccaagttctactgtgtctccttcttctaccacatgtacgggaaacacatcggctccctcaacctcctggtgcggtcccggaacaaaggggctctggacacgcacgcctggtctctcagtggcaataagggcaatgtgtggcagcaggcccatgtgcccatcagccccagtgggcccttccagattatttttgagggggttcgaggcccgggctacctgggggatattgccatagatgacgtcacactgaagaagggggagtgtccccggaagcagacggatcccaataaagtggtggtgatgccgggcagtggagccccctgccagtccagcccacagctgtgggggcccatggccatcttcctcttggcgttgcagagatgatgagagctgtgtggccacccccccaaccttgcccccggcacaccaaagtgtccacattgtaccaaagactgacccccgccagctggggtgcccaggggcagggccggcccgccagggagggggcctgcattggctgcaaggatgagcagagaacaaggacagaggccaggcactgaggccctggagacagctgttccacttgcacacacgcacacactcatgctcacacacacagagatatattaaagcacaagtttctatctga

SEQ ID NO: 1829 - DNA, 201 bp, Artificial
  cDNA Sequence
aagattctgcatccactggggctcccaaaccatttgcacagatcattttgcccgtggctgggtctggacttcataagaagcttcttctggggtaggtgagagtggatgaccaggactccaccaccctgccgagtcctctcatttccatttggcttccccaggctccctcaacctcctggtgcggtcccggaacaaaggggc

SEQ ID NO: 1830 - DNA, 742 bp, Artificial
  cDNA Sequence
caacaacaacaacaaaaacttgtggtgcaggttctaagacgcagggtgtcttccagataagaatccacaagtgactcattgacttgcaccgtcctctgaggttatcagctcattacttccattagtaatgtgcccaggagtgaaggctgaagtcaccattgcagatgcttaggtcaactattttaattcattgattactagttgttaaaaaaatcatagcagccacctcctagtgctgttgttaggattaaacaatcccatggacaaggtttcaaacagccccaggcacaggctatgggctcaatgatcatcagctgctggagtccctgcaacacggtgggccacaggatagagcattaaagggcctggtagaaactggaaagacctgggtctccttggcgtagcagatggcctaggggcaggaccaggtccttgcagcaggtgtggcaggtgccccgtgcatactggaggaagaaaggactacgtctttgcaccacagcatacttccacgttcagccacaggcattcacgcttttgacaagccatcaaatggcttttctatagcaagcttcattaaaatggaagcacattgctctagtatgcagatggggccactttattactttttaatttgtttacggaaagcccatgtttggtgtacaccatctttgcaaatagtaacaaatgggcatgtttgctgcctccaaagctgtggtgtccctggataaatagaccgaaacca

SEQ ID NO: 1831 - DNA, 378 bp, Artificial
  cDNA Sequence
gcgacttggtgggcgcgtccagtgatgactgggggatcccggcaagtaacatgactaaaaagaagcgggagaatctgggcgtcgctctagagatcgatgggctagaggagaagctgtcccagtgtcggagagacctggaggccgtgaactccagactccacagccgggagctgagcccagaggccagtttcttcggcaagagaaccggaagaacatgctgctctctgtggccatctttatcctcctgacgctcgtctatgcctactggaccatgtgagcctggcacttccccacaaccagcacaggcttccacttggccccttgatcaggatcaagcaggcacttcaagcctcaataggaccaaggtgctggggtgtt

SEQ ID NO: 1832 - DNA, 579 bp, Artificial
  cDNA Sequence
cagtgatgactgggggatcccggcaagtaacatgactaaaaagaagcgggagaatctgggcgtcgctctagagatcgatgggctagaggagaagctgtcccagtgtcggagagacctggaggccgtgaactccagactccacagccgggagctgagcccagaggccaggaggtccctggagaaggagaaaaacagcctaatgaacaaagcctccaactacgagaaggaactgaagtttcttcggcaagagaaccggaagaacatgctgctctctgtggccatctttatcctcctgacgctcgtctatgcctactggaccatgtgagcctggcacttccccacaaccagcacaggcttccacttggccccttgatcaggatcaagcaggcacttcaagcctcaataggaccaaggtgctggggtgttcccctcccaacctagtgttcaagcatggcttcctggcggcccaggccttgcctccctggcctgctggggggttccgggtctccagaaggacatggtgctggtccctcccttagcccaagggagaggcaataaagaacacaaagctgttcccgt

SEQ ID NO: 1833 - DNA, 407 bp, Artificial
  cDNA Sequence
aggaggtccctggagaaggagaaaaacagcctaatgaacaaagcctccaactacgagaaggaactgaagtttcttcggcaagagaaccggaagaacatgctgctctctgtggccatctttatcctcctgacgctcgtctatgcctactggaccatgtgagcctggcacttccccacaaccagcacaggcttccacttggccccttgatcaggatcaagcaggcacttcaagcctcaataggaccaaggtgctggggtgttcccctcccaacctagtgttcaagcatggcttcctggcggcccaggccttgcctccctggcctgctggggggttccgggtctccagaaggacatggtgctggtccctcccttagcccaagggagaggcaataaagaacacaaagctgt

SEQ ID NO: 1834 - DNA, 1000 bp, Artificial
  cDNA Sequence
gccgtccccaaagctcgctgttcgcttcgctgcctgacagctgccctgccgccaccaggcagtcccagcttccccaaaccagtcttctggcctctgtggcgccccaggcccgcgggattcagggattaggatctggaagggtttggtccaatcccctatccctctcagcgtcctgggctcacctccccggcagcttagcgctcctcttccaaaactgcttgctgttctcagcggccattgctctggccgggggaagtccttgtaggcgggccaagggtttgcccggcgagatgcccccagaccccgcaatctgagggccaacccaggccgcttccccgccgccggtcacccgctcccagctcctggggacgccatcttggatgtgggcacccctccacccagcaccgctgccattggtgagctgcgcaagccgtggacgggccgaccaattgggagccggaatcctgcaggccgctgaagccgaccggtaacgtcaggggctgggcacacaggtggacggggaaggcggagcttggacgagccgagaggcggggctcaaagttcctacccgcgagagggaagaagcaggaggtctcagcatgaaacagcagcagtggtgtgggatgactgccaaaatgggcaccgtgttgtcaggggtcttcaccatcatggccgtagacatgtatctcatctttgaacagaagcacctagggaatggcagttgcactgagatcacaccaaagtacaggggtgcaagtaacatcataaataacttcatcatctgctggagttttaaaatcgtcctcttcctgtctttcatcaccatcctcatcagctgcttcctcctgtactcagtgtatgcccagatcttcaggggcctggtcatctacattgtctggatttttttctatgaaactgcaaacgtcgtaatacaaatcctcaccaacaatgactttgacattaaagaggtcagaatcatgcgctggtttggcttggtgtc

SEQ ID NO: 1835 - DNA, 390 bp, Artificial
  cDNA Sequence
ccctcggaggatgtatacaattatgtcttctgaggaagcagcaaatggaaagaaatcccactgggcagagcttgaaataagtggaaaagtaagaagcttaagcgcatctttgtggtcactaactcacctgacagctttgcatttgagtgacaattccctgtcccgaattccttcagacattgccaagcttcacaatctggtgtatttggacctgtcatctaataaaattcgtagcttacccgcagaactcggaaacatggtatcactcagggagctccatttaaataacaacctgttacgagttctaccttttgagctgggaaaactgtttcagttgcagactttaggcctgaaaggaaatccccttacccaggatatattgaaccttta

SEQ ID NO: 1836 - DNA, 759 bp, Artificial
  cDNA Sequence
ccctcggaggatgtatacaattatgtcttctgaggaagcagcaaatggaaagaaatcccactgggcagagcttgaaataagtggaaaagtaagaagcttaagcgcatctttgtggtcactaactcacctgacagctttgcatttgagtgacaattccctgtcccgaattccttcagacattgccaagcttcacaatctggtgtatttggacctgtcatctaataaaattcgtagcttacccgcagaactcggaaacatggtatcactcaggtatgcagattcaacttaatacatactagctatatgacccctaaaacaaaatataggccgggcgcagtggcttatgcctgtaattctagcgttttgggaggctgcgagaggatcatgaggtcaggagatcgagaccattctggccaacatggtgaaaccccatctctactaaaaatacaaaaaattagccaggcgtggtggcgggcacctgtagtcccagctactcgggaggctgaggcaggagaacagtgtgaacccgggaggtggagtggcagtgagccgagatcacaccgctgcactccagcctgggtgacagagcgagagtccatctcaaaaaaaacaaaaacaaaaaaacatttgttgtgttaggaaacaaaactgttcatttaatggtatttgaataaaaggaaacataactatatcctttataactttatagttttgtttttgggaaaattgaatgtcagctaataataaattaagtagatc

SEQ ID NO: 1837 - DNA, 609 bp, Artificial
  cDNA Sequence
cattcacagaacacatccatggctctcatgctcagtttggttctgagtctcctcaagctgggatcagggcagtggcaggtgtttgggccagacaagcctgtccaggccttggtgggggaggacgcagcattctcctgtttcctgtctcctaagaccaatgcagaggccatggaagtgcggttcttcaggggccagttctctagcgtggtccacctctacagggacgggaaggaccagccatttatgcagatgccacagtatcaaggcaggacaaaactggtgaaggattctattgcggaggggcgcatctctctgaggctggaaaacattactgtgttggatgctggcctctatgggtgcaggattagttcccagtcttactaccagaaggccatctgggagctacaggtgtcagcactgggctcagttcctctcatttccatcacgggatatgttgatagagacatccagctactctgtcagtcctcgggctggttcccccggcccacagcgaagtggaaaggtccacaaggacaggatttgtccacagactccaggacaaacagagacatgcatggcctgtttgatgtggagatctctctgaccgtc

SEQ ID NO: 1838 - DNA, 1388 bp, Artificial
  cDNA Sequence
gcatatcctgttccatgcggcatgctcatctgagccgagaggtggaatccagggtacagataggagatacctttttcgagcctatatcgtggcacctggctaccaaagtactgggaatactctgctgtggcctattttttggcattgttggactgaagattttcttctccaaattccagtgtaagcgagagagagaagcatgggccggtgccttattcatggttccagcagggacaggatcagagatgctcccacatccagctgcttctcttcttctagtcctagcctccaggggcccaggcccaaaaaaggaaaatccaggcggaactggactggagaagaaagcacggacaggcagaattgagagacgcccggaaacacgcagtggaggtgactctggatccagagacggctcacccgaagctctgcgtttctgatctgaaaactgtaacccatagaaaagctccccaggaggtgcctcactctgagaagagatttacaaggaagagtgtggtggcttctcagagtttccaagcagggaaacattactgggaggtggacggaggacacaataaaaggtggcgcgtgggagtgtgccgggatgatgtggacaggaggaaggagtacgtgactttgtctcccgatcatgggtactgggtcctcagactgaatggagaacatttgtatttcacattaaatccccgttttatcagcgtcttccccaggaccccacctacaaaaataggggtcttcctggactatgagtgtgggaccatctccttcttcaacataaatgaccagtcccttatttataccctgacatgtcggtttgaaggcttattgaggccctacattgagtatccgtcctataatgagcaaaatggaactcccatagtcatctgcccagtcacccaggaatcagagaaagaggcctcttggcaaagggcctctgcaatcccagagacaagcaacagtgagtcctcctcacaggcaaccacgcccttcctccccaggggtgaaatgtaggatgaatcacatcccacattcttctttagggatattaaggtctctctcccagatccaaagtcccgcagcagccggccaaggtggcttccagatgaagggggactggcctgtccacatgggagtcaggtgtcatggctgccctgagctgggagggaagaaggctgacattacatttagtttgctctcactccatctggctaagtgatcttgaaataccacctctcaggtgaagaaccgtcaggaattcccatctcacaggctgtggtgtagattaagtagacaaggaatgtgaataatgcttagatcttattgatgacagagtgtatcctaatggtttgttcattatattacactttcagtaa

SEQ ID NO: 1839 - DNA, 332 bp, Artificial
  cDNA Sequence
gcacgcggcgggcaggccggtctcgcctctcggtgctcagcggcgcctggaccgacacggcccccgcgggtgttttccagacgtgttcgtacccggagcctctgcgtggaagagcgcgttcgtcgcgaccctgccgctgctgttggtcctcgcggcgctggcgctgggcgtcctccggaagcagcggagaagccgagaaaagctgaggaagcaggcggagaagagacaaggctgtgtgcagatttccacctttgagctaagataggatgaggcataagagtcctgcagatgggcctctttttgagggcaatgaaggggcaaagaggaagctg

SEQ ID NO: 1840 - DNA, 476 bp, Artificial
  cDNA Sequence
cctgtagtcccagctacatgggaggctgaggcaggagaagggcgtgaacccgggaagcggagcttgcagtgagccgagatggcgccactgcactccagcctgggcgacagagcgagactctgtctcaaaaaaaaaaagaactatttctcctcattcatcattttgcatctgattccccatatatcttcttctcatctcccaaccaggtatgatgcccaggcaggacccctgctggctatgtgggtggtggggggtgcgggacagggtgggtgcaagatgtgatgtgtgagcagggaagcttggggtcctgatgtgctaatttcctgttttcccttggttgcttcagactggagacgggctgaaggccaggctgagtggagagcagcccaaaaatatgcagtggatgtgacgctggacccggcctcggcgcaccccagcctggaggtgtcggaggatggcaagagcgtgtcttcccg

SEQ ID NO: 1841 - DNA, 289 bp, Artificial
  cDNA Sequence
cccggcagagggctccgcgaagacagtgccgtcgttgggcgcgcgcgcgggcgggagctgtcggggcggggcggcaccgccgagctccgagctttccagaagcaaaaacaaaaaaagttcgggtacagcggctcacacctgtaatcccagctcttagggagatggaaactggaggatcacttgaggccaggagttcaagaccagcctgggcaacatagcaagacccagtctcttaaaagaaaattaaaaagaaagagtaaataaagttccagaagctttgctctcctta

SEQ ID NO: 1842 - DNA, 592 bp, Artificial
  cDNA Sequence
ctctccccgaaggtcctctgaggaggagaaacaaagcaaggcgtgcatgagcgacacgggagattatatggcaaggtggagtctcgctctgtctcccaggctggagtgcagtggcgcgatctcggctcactgcaagctctgcctcccgggttcacaccattctcctgcctcagcctccggagtagctgggactacaggcgcccgccaccacgcccggctattttgtatttttagtagagacaggggtttcaccgtgtttgccaggacggtcttgatctcctgacctcgtgatccgcccacctcggcctcccaaagtgctgggattacaggcgtgagccaccctgccaggcctcatgtttgcttatcttaaccaaaatgagccctcgtttcactttcctgttctaccctaaggaagataaaatatcattccaacttggggtagaggcaggtgccagtacccaagaccctgggctgtgcagcaggggctactgtaaacccaagaccctaaacttcctccctctgccagagccagggagcagctctgacgccctctagccccttctccgttagcctcgatttcaaataaaaacac

SEQ ID NO: 1843 - DNA, 2410 bp, Artificial
  cDNA Sequence
ggaacccacagtgattgaacctgaagaccaaaaacatgttttaaagctggaaacagagttaatgtcgaatgtggtatgtgtggcgattatacccagtgaaaagcatgaagattcggttgtaggagaggtttaaatgacagttgaggaaagtctttttgacagtgacatcctgaaaaaggtgagcaagtcgtattgtggaaatgacagtatccctgggctcacagcaggatgaggcgagttaggtatggcgaggcatggggtggttgaaatggatgtgtgttcattgagggccgtgagggtgctgcttctcccttcctgctcaggttcagtctctgactggagatcggggaacgctgtccctgtgcagctgacactctctttatctctttctccctctccctctttttgtttctcttattcccaggacatcaaggagactttcaataggtgtgttcccagtctttgcccttcgtgacccagtggcatctggttccctgtccctgcttctcttcggtatccctctcctctccttccttccccaggacctgagtttccatctcctggaccctcctctccttcccctcagcttttgcttttccctctgggaatatcgtggtcccaccccctgcccggtccccttcctccaggtgtgaagaggtacagctgcagcccccagaggtctggtcccctgacccgtgccaaccccatagccatgacttcctgacagatgccatcgtgaggaaaatgagccggatgttctgtcaggctgcgagagtggacctgacgctggaccctgacacggctcacccggccctgatgctgtcccctgaccgccggggggtccgcctggcagagcggcggcaggaggttgctgaccatcccaagcgcttctcggccgactgctgcgtactgggggcccagggcttccgctccggccggcactactgggaggtagaggtgggcgggcggcggggctgggcggtgggtgctgcccgtgaatcaacccatcataaggaaaaggtgggccctgggggttcctccgtgggcagcggggatgccagctcctcgcgccatcaccatcgccgccgccggctccacctgccccagcagcccctgctccagcgggaagtgtggtgcgtgggcaccaacggcaaacgctatcaggcccagagctccacagaacagacgctgctgagccccagtgagaaaccaaggcgctttggtgtgtacctggactatgaagctgggcgcctgggcttctacaacgcagagactctagcccacgtgcacaccttctcggctgccttcctgggcgagcgtgtctttcctttcttccgggtgctctccaagggcacccgcatcaagctctgcccttgattatcctgccacccgcaggggcccctctgtcagcacttggggggtgggtggtggagggtggcccgtaagtttgagggctcaaaggctcttcccactgcttgttactgtgttgcttcccactcccccttgaccccaggcccctgcttctccctctaggagcctaaagaaccctcctggcctccagctcagccttctctcacctactatgtctgtccaacaggtctgcatgggtccctgataatgagaacagctgcctggtcttctctcccagtctgcctagcccagccctgggactggaatttgagtaggggatgaggggaaattgtaatttcattccttaacttccttttccccacccctgctcttcaacctctttatcagttctgaggctggagggtttgggcaaggcaacatccccattccaattccattttctgatgcagattttagctgagggatttggaagccatttggggaggcaggctgggccaaagggtagagctgggtaataaatgtctattctcctggggaggagggattctaaactttccttccgtcctcaatttctacctccatagaccggccagaatttagcttcacttgagagagatctggaatggtcgccatgattgaaaccacgcaccattacatcatcattacattaattacatcaacataaattatttcttcccccttcccttttccagcactcaaccaaggagcaaagctcatcccaccccacacccctcccaggtctgctcactgccaggctcctctcccctttgttcagtggagctggcttttctcccagcccctttccatgcctttcactccatttggcaagctctgagggggagcctggggacgggtttgggtccccaggaggagagccttgggtataatctatttttctaggagcctcttgccttgtcacttgcagctttcgccctctgctttgatggctgaggtgaactcatgttctttgggaaaagggaaggcgtgctgtggaaataaaatgtttatttgcttctct

SEQ ID NO: 1844 - DNA, 870 bp, Artificial
  cDNA Sequence
ccaggacatcaaggagactttcaataggtgtgaagaggtacagctgcagcccccagaggtctggtcccctgacccgtgccaaccccatagccatgacttcctgacagatgccatcgtgaggaaaatgagccggatgttctgtcaggctgcgagagtggacctgacgctggaccctgacacggctcacccggccctgatgctgtcccctgaccgccggggggtccgcctggcagagcggcggcaggaggttgctgaccatcccaagcgcttctcggccgactgctgcgtactgggggcccagggcttccgctccggccggcactactgggaggtctgcatgggtccctgataatgagaacagctgcctggtcttctctcccagtctgcctagcccagccctgggactggaatttgaaccggccagaatttagcttcacttgagagagatctggaatggtcgccatgattgaaaccacgcaccattacatcatcattacattaattacatcaacataaattatttcttcccccttcccttttccagcactcaaccaaggagcaaagctcatcccaccccacacccctcccaggtctgctcactgccaggctcctctcccctttgttcagtggagctggcttttctcccagcccctttccatgcctttcactccatttggcaagctctgagggggagcctggggacgggtttgggtccccaggaggagagccttgggtataatctatttttctaggagcctcttgccttgtcacttgcagctttcgccctctgctttgatggctgaggtgaactcatgttctttgggaaaagggaaggcgtgctgtggaaataaaatgtttatttgcttctct

SEQ ID NO: 1845 - DNA, 431 bp, Artificial
  cDNA Sequence
acacccagaccgagacctcgggaatgctccggccccctgccgccgtctcccggcccggttctctttcactaaaaataggcgattctggcagcgcccctcctatggggccttgggggcaattggggttttgtcttagagcccgtgtggacccggatggcgacggcagcccgaggagagggagggctgactgtatggttggctttccgacgaccagaccctgcaggattcggcctttccctttggagttttcctccatccccctccgtccctcccaggggatgcccgcaggccacagtggtcactgaaggtcaaccctgagccgaaggagaagtggcctcgaccctggggaccccttcagaagtctacctgtgcctgcgcccgccggacctgccggcctcttccttctcatccagggggcctcttctccagcc

SEQ ID NO: 1846 - DNA, 541 bp, Artificial
  cDNA Sequence
tatggtgtgccgggggccgcgcgggccgggagttgggtgggctgggggacaggcgcgcccgcgccgcccgctccagctgggctagtgctgcacattccggccagcccctcctcaagaccccattcccaagccccttctcagctccctcgggccggcagagcggctctgatcagtaaaatgctgttgaaggcccacgggcatgactgcacccctcactaattggtcattggtttggggaggacaccactgtcccagtggaaccttgagcacaccttggagccctcctcttcctctccggacctgtgccaaactgtgagtggcacagagcaaggactgccatcctgcagccaccagaaccttccacatgaaatgaaaggctcaccacttcataggctttaaggaaattcttggccaggtgtggtgcctcactcatgtaatcccagtgctttaagaggccaagatgggaggattgtttgagccagctgtttgagaccagcctgggcaacgtcatgagaccccatctccacaaaaaaaaaaaaaa

SEQ ID NO: 1847 - DNA, 801 bp, Artificial
  cDNA Sequence
tatggtgtgccgggggccgcgcgggccgggagttgggtgggctgggggacaggcgcgcccgcgccgcccgctccagctgggctagtgctgcacattccggccagcccctcctcaagaccccattcccaagccccttctcagctccctcgggccggcagagcggctctgatcagtaaaatgctgttgaaggcccacgggcatgactgcacccctcactaattggtcattggtttggggaggacaccactgtcccagtggaaccttgagcacaccttggagccctcctcttcctctccggacctgtgccaaactgtgagtggcacagagcaaggactgtatgtgttctcttctttgttgcatactcagttccttgaccacagtgccaagcacacagcgagcactccctgtgtatctgctgagtaaataaacgaatgaacaaacccaacacatttcagccaagtcctgctgatgtttctcctccgatctagctcctcctttccagccttacttctgccactccagatttcacccccatcagcttcagactggataaaaggaaaccatttctctaaaggatcacttgctctctcatttcaggccatcctgcagccaccagaaccttccacatgaaatgaaaggctcaccacttcataggctttaaggaaattcttggccaggtgtggtgcctcactcatgtaatcccagtgctttaagaggccaagatgggaggattgtttgagccagctgtttgagaccagcctgggcaacgtcatgagaccccatctccacaaaaaaaaaaaa

SEQ ID NO: 1848 - DNA, 488 bp, Artificial
  cDNA Sequence
tatggtgtgccgggggccgcgcgggccgggagttgggtgggctgggggacaggcgcgcccgcgccgcccgctccagctgggctagtgctgcacattccggccagcccctcctcaagaccccattcccaagccccttctcagctccctcgggccggcagagcggctctgatcagtaaaatgctgttgaaggcccacgggcatgactgcacccctcactaattggtcattggtttggggaggacaccactgtcccagtggaaccttgagcacaccttggagccctcctcttcctctccggacctgtgccaaactgccatcctgcagccaccagaaccttccacatgaaatgaaaggctcaccacttcataggctttaaggaaattcttggccaggtgtggtgcctcactcatgtaatcccagtgctttaagaggccaagatgggaggattgtttgagccagctgtttgagaccagcctgggcaacgtcat

SEQ ID NO: 1849 - DNA, 477 bp, Artificial
  cDNA Sequence
aatgatcaaattatgtttcccatgcatcaggtgcaatgggaagctcttctggagagtgagagaagcttccagttaaggtgacattgaagccaagtcctgaaagatgaggaagagttgtatgagagtggggagggaagggggaggtggagggatggggaatgggccgggatgggatagcgcaaactgcccgggaagggaaaccagcactgtacagacctgaacaacgaagatggcatattttgttcagggaatggtgaattaagtgtggcaggaatgctttgtagacacagtaatttgcttgtatggaattttgcctgagagacctcattgcactcattcctcacgtcggccattccaggccccgtttttcccttccggcagcctcttggcctctaatttgtttatcttttgtgtataaatcccaaaatattgaattttggaatatttccaccattatgtaaatattttgataggtaa

SEQ ID NO: 1850 - DNA, 672 bp, Artificial
  cDNA Sequence
cgtgaggtgcccagaagatcatgcagtcatcagtcccacggagcagcctgcgaggctgaggctcctcccactggaccgccccccaactggcaccactgctgcccctgcccctactctcagcctcacgtgactctcgggcagaagcagtggtggggcagccagggcagcgtcaagagtctgagccagctgcaggacaagttcgagcatcttaaaatgattcaacaggaggagataaggaagctcgaggaagagaaaaaacaactggaaggagaaatcatagatttttataaaatgaaagctgcctctgaagcactgcagactcagctgagcaccgatacaaagaaagacaaacatcctgatccatatgaattcctcttattaagaaaaataaagcatccaggattcaatgaagaactgactatcaccttgttaatcattcagaaacatgttgcaggcttaagccatttttgatatagatactgaaacaattacttgctaagagcaaacttgaaggtatggataaggccctgagtcatcttcctgagctgaatgatagttaagctgaattaacaatttggacaagacagcaaatgctattgtccaagttttctaaagaagaatctgaagtgaaatgacatcaagagacctatcaagacctgtatccaggaaaag

SEQ ID NO: 1851 - DNA, 498 bp, Artificial
  cDNA Sequence
atcccagctactcgggaggctgaggcaggagaatcacttgaacccgggaggcagaggttgcagtgagccgagatcgcgcccctgcactccagcctgggtgacagagcaagactccatctcaaaaaaaataaaggaaatatgcgtcgttggatgctgtatgacaatcaagctacttataacaaacaaaattgagaatgaaggattatgatccaaactcagctgggcctcccctccctgccccaggattgtggagtgagaacgttgcagcaggagagaacaacgcagcaaagcacagcaggggaaccggaaatgctcaccttttgacagggtacttttagttctggggccttatcttaaggatattccaacatatacaaaaagattcatgcacagagatatttactttagtattatttaccataggaaaaaagttggaaacaatacattttatgttctgtaaaatgaaagaacagttaaataaatcatggctctaagacg

SEQ ID NO: 1852 - DNA, 395 bp, Artificial
  cDNA Sequence
gacggcacaggagccagtcatcatccccaaagacacagctccgaatacctcatcctgaaatcccaaagatcaaaatcccaaaagtataaatctggaaaaaataatgtcgatgttatttatttacatttttaaaaggattatgatccaaactcagctgggcctcccctccctgccccaggattgtggagtgagaacgttgcagcaggagagaacaacgcagcaaagcacagcaggggaaccggaaatgctcaccttttgacagggtacttttagttctggggccttatcttaaggatattccaacatatacaaaaagattcatgcacagagatatttactttagtattatttaccataggaaaaaagttggaaacaatacattttatgttctgtaa

SEQ ID NO: 1853 - DNA, 319 bp, Artificial
  cDNA Sequence
ctgggccagcgctggggatcgggcctggggcctggattgcgacccgcggcgggccgcggctcctagccgagacggggcgggcgggaaccaggttaacacagaaatctgcctcctgggccatgccgcttctaaggcctgtttcttctcatgagccccagcacaagacagatgggccagttctcacagtggataacttcccctgcctgagcaagagatgggatagtatctgggatctgtccatcaccagactctgagcttaataaggcagctgaatgaagggaggtaacggacccctgagaggggcactgaagtctgcagt

SEQ ID NO: 1854 - DNA, 445 bp, Artificial
  cDNA Sequence
cgcggctcctagccgagacggggcgggcgggaaccaggttaacacagaaatctgcctcctgggccatgccgcttctaaggcctgtttcttctcatgagccccagcacaagacagatgggccagttctcacagtggataacttcccctgcctgagcaagagatgggatagtatctgggatctgtccatcaccagactctgagcttaataaggcagctgaatgaagggagaaggtgttgagctggcgagttcgcggaggctactattcaggaaatcttatccagatgagtacactggaagctacacctctccattactctgtccaggtcccttacaagttgttacgaggagcaaatgaaacaaggattttgaaaagtatccagggccgtgtacacaggaaacaataacatcgatgttgctctacgtgccttaaaagcacagaaacaa

SEQ ID NO: 1855 - DNA, 741 bp, Artificial
  cDNA Sequence
catggactttggacctggataagaagagagaagctgcactttggtggatctgatttgggattctcagttttgaaaatggagtgctgaatggggatttgatgatctcctggagagcaactgagacaagagaagaaaggtgcatggctgcctcctaatcccatagtccagaggaggcatccctaggactgcgggcaagggagccgggcaagcccagggcagccttgaaccgtcccctggcctgccctccccggtgggggccaggatgctgaagaagcagtctgcagggcttgtgctgtggggcgctatcctctttgtggcctggaatgccctgctgctcctcttcttctggacgcgcccagcacctggcaggccaccctcagtcagcgctctcgatggcgaccccgccagcctcacccgggaagtgattcgcctggcccaagacgccgaggtggagctggagcggcagcgtgggctgctgcagcagatcggggatgccctgtcgagccagcgggggagggtgcccaccgcggcccctcccgcccagccgcgtgtgcctgtgacccccgcgccggcggtgattcccatcctggtcatcgcctgtgaccgcagcactgttcggcgctgcctggacaagctgctgcattatcggccctcggctgagctcttccccatcatcgttagccaggactgcgggcacgaggagacggcccaggccatcgcctcctacggcagcgcggtcac

SEQ ID NO: 1856 - DNA, 423 bp, Artificial
  cDNA Sequence
tggggatttgatgatctcctggagagcaactgagacaagagaagaaaggtaaggctcctgtctcatttcccacttaatgtcttgctgtgcctgtgcagaaggtgttgagctggcgagttcgcggaggctactattcaggaaatcttatccagatgagtacactggaagctacacctctccattactctgtccagagcctggcagagagcaggtgtgtgatacacgtcgtcaggtgactgaccgaggaattcagggcaaacagatcatctcaatttgccttgctgatgtgccagctgggattacgctgatggatgaagctcttcagagctatgggcaatatctacatatttgattgtcaagaaacttcgtgtggaaatagcttcaaacttacacaaattgcaagaataaaaaatagtataagga

SEQ ID NO: 1857 - DNA, 706 bp, Artificial
  cDNA Sequence
tggggaagtcagctacccagcagcctgtagtcctcggctacccaccctcaccgcctggggtcccatggtgagacagctgggtgggcatcaggcttctgcagagggccaggccggagggagctgggcgagggagtggggctggctcctggcttgcaccggcctcgtggaatccaggcctcagacctgatcgctggcgaaactggctctgtgcgctggagcccctggtcttctgcgtctgtcctcctcccggccagactttactcctggctcagcgacaggtgcatggctgcctcctaatcccatagtccagaggaggcatccctaggactgcgggcaagggagccgggcaagcccagggcagccttgaaccgtcccctggcctgccctccccggtgggggccaggatgctgaagaagcagtctgcagggcttgtgctgtggggcgctatcctctttgtggcctggaatgccctgctgctcctcttcttctggacgcgcccagcacctggcaggccaccctcagtcagcgctctcgatggcgaccccgccagcctcacccgggaagtgattcgcctggcccaagacgccgaggtggagctggagcggcagcgtgggctgctgcagcagatcggggatgccctgtcgagccagcgggggagggtgcccaccgcggcccctcccgcccagccgcgtgtgcctgtgacccc

SEQ ID NO: 1858 - DNA, 814 bp, Artificial
  cDNA Sequence
acgttgcccgcccggccgtccggccccggcgcgccgcagaaagggctggcgagtcgaaaggcgaggcggccgcggcagcgcttgggacgcgcctgggcaccgggctcgctccctgcgccccggagcaggccaagttcggggccaggacgtcgggaggacctggtgagtgcatggctgcctcctaatcccatagtccagaggaggcatccctaggactgcgggcaagggagccgggcaagcccagggcagccttgaaccgtcccctggcctgccctccccggtgggggccaggatgctgaagaagcagtctgcagggcttgtgctgtggggcgctatcctctttgtggcctggaatgccctgctgctcctcttcttctggacgcgcccagcacctggcaggccaccctcagtcagcgctctcgatggcgaccccgccagcctcacccgggaagtgattcgcctggcccaagacgccgaggtggagctggagcggcagcgtgggctgctgcagcagatcggggatgccctgtcgagccagcgggggagggtgcccaccgcggcccctcccgcccagccgcgtgtgcctgtgacccccgcgccggcggtgattcccatcctggtcatcgcctgtgaccgcagcactgttcggcgctgcctggacaagctgctgcattatcggccctcggctgagctcttccccatcatcgttagccaggactgcgggcacgaggagacggcccaggccatcgcctcctacggcagcgcggtcacgcacatccggcagcccgacctgagcagcattgcggtgccgccg

SEQ ID NO: 1859 - DNA, 638 bp, Artificial
  cDNA Sequence
tccggccccggcgcgccgcagaaagggctggcgagtcgaaaggcgaggcggccgcggcagcgcttgggacgcgcctgggcaccgggctcgctccctgcgccccggagcaggccaagttcggggccaggacgtcgggaggacctggtgagtgcatggctgcctcctaatcccatagtccagaggaggcatccctaggactgcgggcaagggagccgggcaagcccagggcagccttgaaccgtcccctggcctgccctccccggtgggggccaggatgctgaagaagcagtctgcagggcttgtgctgtggggcgctatcctctttgggacatatttgtggccaaaatgatactaaccaaaggggcttccttgtcagggcctggtggagttggtgggtcatcggggctcactgcctcctgcccttctctcctgtctgacccccacttagcccttctctccttgcagcctagcagtttatagttctgagatggaaagttgaagggggcaagcaagacctctcctcagcccatgcccagctgtcaggagagaggtgcagggaggaaggccttgtgctgggacaacctctctcttgccttacctcagagagggactatgccctgacccctcctttctgaaaa

SEQ ID NO: 1860 - DNA, 534 bp, Artificial
  cDNA Sequence
gcagcgcttgggacgcgcctgggcaccgggctcgctccctgcgccccggagcaggccaagttcggggccaggacgtcgggaggacctgagcctggcagagagcaggtgtgtgatacacgtcgtcaggtgactgaccgaggaattcagggcaaacagatcatctcaatttgccttgctgatgtgccagctgggattacgctgatggatgaagctcttcagagctatgggcaatatctacatatttgattgtcaagaaacttcgtgtggaaatagcttcaaacttacacaaattgcaagaataaaaaatagtataaggatattcgtacacactctctttactcagattcacctgttaatattttgctccatttgctctctatgtgtgcagagtatgtttttgttctgaaccatttgagaagttgcatctatcctggtcctctacttctcaatacttcagtgtgtattacctaagaattggaattaatcagttatcactgatactttaacctactgtccatattccacctttgtcat

SEQ ID NO: 1861 - DNA, 613 bp, Artificial
  cDNA Sequence
aaataaccgggagacaagctttcggaggcttttgactgactggatgtgggaatgttgtggaagacttctggcctgccatttcctgagaacgggactgctgagagaggagctgggaggagcactgcaaatttcactttggacacagcctggcagagagcaggtgtgtgatacacgtcgtcaggtgactgaccgaggaattcagggcaaacagatcatctcaatttgccttgctgatgtgccagctgggattacgctgatggatgaagctcttcagagctatgggcaatatctacatatttgattgtcaagaaacttcgtgtggaaatagcttcaaacttacacaaattgcaagaataaaaaatagtataaggatattcgtacacactctctttactcagattcacctgttaatattttgctccatttgctctctatgtgtgcagagtatgtttttgttctgaaccatttgagaagttgcatctatcctggtcctctacttctcaatacttcagtgtgtattacctaagaattggaattaatcagttatcactgatactttaacctactgtccatattccacctttgtcattttacccaataacgtctttttaaa

SEQ ID NO: 1862 - DNA, 345 bp, Artificial
  cDNA Sequence
ttttgactgactggatgtgggaatgttgtggaagacttctggcctgccatttcctgagaacgggactgctgagagaggagctgggaggagcactgcaaatttcactttggacacgttaacacagaaatctgcctcctgggccatgccgcttctaaggcctgtttcttctcatgagccccagcacaagacagatgggccagttctcacagtggataacttcccctgcctgagcaagagatgggatagtatctgggatctgtccatcaccagactctgagcttaataaggcagctgaatgaagggaggtaacggacccctgagaggggcactgaagtctgcagtggg

SEQ ID NO: 1863 - DNA, 370 bp, Artificial
  cDNA Sequence
gagctgtatcctgacatccacccgcctccttccttgccccttccagggcagttcacctgcccccagtgccgaaagagctttacacgtcgcagctttcgtcccaacttgcagctggccaacatggtccagataattcgccagatgtgccccactccttatcggggaaaccggagtaatgatcagggcatgtgctttaaacaccaggaagccctgaaactcttctgtgaggtggacaaagaggccatctgtgtggtgtgccgagaatccaggagccacaaacagcacagcgtgctgcctttggaggaggtggtgcaggagtaccaggcataactggatgcctggattgtcctgccacccagctgccaccaat

SEQ ID NO: 1864 - DNA, 729 bp, Artificial
  cDNA Sequence
gccgaaagagctttacacgtcgcagctttcgtcccaacttgcagctggccaacatggtccagataattcgccagatgtgccccactccttatcggggaaaccggagtaatgatcagggcatgtgctttaaacaccaggaagccctgaaactcttctgtgaggtggacaaagaggccatctgtgtggtgtgccgagaatccaggagccacaaacagcacagcgtgctgcctttggaggaggtggtgcaggagtaccagaagatagggtcaacttcttcagttgagttatctgaaagtgttgggcagtgacaccatgccaaacactgttaaattcatgccattaaaaacagtggagtgttctgcaaagcccgattctctgcagctttaagactggacagtattgaaatattcacaggaatcttccaagccgtgaaagcttaatattaaacagcccttttaattgcaaaggagaaaaaaatggagacacttgtgaaaccttgcattctgagtgctgccacaaataaattaaggaattccagaatttcttcatctacttctgcagtcttaactctgaattaatgactgtatatatcaaacttcagatcttaaaaaacatcagctcgcaagaggctgaggcaggagaatgacatgaacctgggaggcggagcttgcagtaagccgagactgagccactgcactccagcctgggcaatagagcaagactccatct

SEQ ID NO: 1865 - DNA, 757 bp, Artificial
  cDNA Sequence
taattcgccagatgtgccccactccttatcggggaaaccggagtaatgatcagggcatgtgctttaaacaccaggaagccctgaaactcttctgtgaggtggacaaagaggccatctgtgtggtgtgccgagaatccaggagccacaaacagcacagcgtgctgcctttggaggaggtggtgcaggagtaccaggttcagctgttcactgctgtatcacaagtcagactgtttaaacttgttcctctacttctgtggctgtaccctggatctcatcttcagattggctacacatctgaaatcaactcccattgcactatgaccttagctcttagccttccaatacacttaagcacactccaattacacctgcccttcagctttagggagcccactgtttcactgactccatattttttccttcccaatttatcagacatttaacagccttactatcctactgagcctagactgcatgattcattttggcataaagacctgatacaggccgggcgcggtggctcacgcctgtaatcccagcactttgggaggccaaggcgggtggatcacgaggtcaggagatcgagaccatcctggctaacacagtgaaaccccgtctctactaaaaacacaaaaaattagccaggcatggtgacgtgcacctgtagtcccagctattcaggaggcctgggcaggagaatcacttgaacccgggaggcggaggttgcagtgagccgaaatcgccgtcactgcactcc

SEQ ID NO: 1866 - DNA, 574 bp, Artificial
  cDNA Sequence
ggatgagagccactcagagtgggtgtcttgtgtccgcttctcgcccaacagcagcaaccctatcatcgtctcctgtggctgggacaagctggtcaaggtatggaacctggctaactgcaagctgaagaccaaccacattggccacacaggctatctgaacacggtgactgtctctccagatggatccctctgtgcttctggaggcaaggatggccaggccatgttatgggatctcaacgaaggcaaacacctttacacgctagatggtggggacatcatcaacgccctgtgcttcagccctaaccgctactggctgtgtgctgccacaggccccagcatcaagatctgggatttagagggaaagatcattgtagatgaactgaagcaagaagttatcagtaccagcagcaaggcagaaccaccccagtgcacctccctggcctggtctgctgatggccagactctgtttgctggctacacggacaacctggtgcgagtgtggcaggtgaccattggcacacgctagaagtttatggcagagctttacaaataaaaaaaaaactggcttttctga

SEQ ID NO: 1867 - DNA, 922 bp, Artificial
  cDNA Sequence
gcggagagcgcgcatggcggctgtgggaccgcggaccggccccggaaccggcgccgaggctctagcgctggcggcagagctgcagggcgaggcgacgtgctccatctgcctagagctctttcgtgagccggtgtccgtcgagtgcggccacagcttctgccgcgcctgcatagggcgctgctgggagcgcccgggcgcggggtctgttggggccgccacccgcgcgccccccttcccactgccctgtccgcagtgccgcgagcccgcgcgccccagtcagctgcggcccaaccggcagctggcggcagtggccacgctcctgcggcgcttcagcctgcccgcggctgccccgggagagcacgggtctcaggcggccgcggcccgggcagcggctgcccgctgcgggcagcatggcgaacccttcaagctctactgccaggacgacggacgcgccatctgcgtggtgtgcgaccgcgcccgcgagcaccgcgagcacgccgtgctgccgctggacgaggcggtgcaggaggccaaggagctcttggagtccaggctgagggtcttgaagaaggaactggaggactgtgaggtgttccggtccacggaaaagaaggagagcaaggagctgctggtgagccaggcacccgcaggccccccgtgggacattacagaggcctgagaactcagcaccagggctcggtgtgtgtggtgttggagtgtgtgctatggaaccgcagaatcgatttcagaaagataatagagtccatattatatagggtgtccacataattgttgtacaaaccagagctttttaaagtgaaaagcagtgctaaaataattattgcaaaacaactggcttaaactggagctgtcccagcgaatcaggacgctcagtcactctgatattacgtaacataccagt

SEQ ID NO: 1868 - DNA, 663 bp, Artificial
  cDNA Sequence
cttccggccgtgcggtccgcgcttttgtcccgctggcggccgggttcccgcggcgccgccacagccagttgccttcttcctcatctctgcagtaactgtcttcatggtttcatagccttctccctgatacccctccccagtgtcacatttgaagacgagcactgaggatgaggaaccaactgaagaatatgaaaatgttggaaatgcagcatctaagtggccaaaagtggaggatcctatgcctgaatctaagtttcagatgaactcccataatgaatgatgaatttgtgatgagggataacctggaagtggtattcacacattatgctacaataaaaggttctaccgtggagaggattttgacacattcagtaactaatggaacacaccgtcaacatgaattcgcaccttacatgacagaagtgattcagggattcctatgaatagaaatgctgagaaggaacgcattttattgcagaagctaaaaagctaaagtaccagtcatctagagagaaggaaattaatgtttcttaataatcctgttaaatgtttgattgtttttggaatgtgttattgtaaagatgtcatgcaggacatgtatatgttgtctgttgtaaaatgttaacgaatactttgttcagggctcactctctctttgtcatg

SEQ ID NO: 1869 - DNA, 624 bp, Artificial
  cDNA Sequence
ctgccgcgtgttcctgcaagcagaaaaggagttaactagtgtcacatttgaagacgagcactgaggatgaggaaccaactgaagaatatgaaaatgttggaaatgcagcatctaagtggccaaaagtggaggatcctatgcctgaatctaagtttcagatgaactcccataatgaatgatgaatttgtgatgagggataacctggaagtggtattcacacattatgctacaataaaaggttctaccgtggagaggattttgacacattcagtaactaatggaacacaccgtcaacatgaattcgcaccttacatgacagaagtgattcagggattcctatgaatagaaatgctgagaaggaacgcattttattgcagaagctaaaaagctaaagtaccagtcatctagagagaaggaaattaatgtttcttaataatcctgttaaatgtttgattgtttttggaatgtgttattgtaaagatgtcatgcaggacatgtatatgttgtctgttgtaaaatgttaacgaatactttgttcagggctcactctctctttgtcatgaaagccagctccttgtggcgaggtaaagtggaattccaataaagaaattccttaaatcaaaa

SEQ ID NO: 1870 - DNA, 603 bp, Artificial
  cDNA Sequence
gcaagcagaaaaggagttaactagtgtcacatttgaagacgagcactgaggatgaggaaccaactgaagaatatgaaaatgttggaaatgcagcatctaagtggccaaaagtggaggatcctatgcctgaatctaaggttggtgacacatgtgtttgggatagcaaggtagagaatcaacagaaaaagcctgtggaaaacaggatgaaggaggacaaaagcagcatcagggaagcaatcagcaaagccaagagtacagcaaatataaagacagaacaggaaggtgaggcatctgagaagagcttgcatctgagcccacagcatatcacacaccagactatgcctataggacagagaggcagtgagcaaggcaaacgtgtggagaacattaatggaacctcctaccctagtctacagcagaaaaccaatgctgttaagaaattacataaatgtgatgaatgtgggaaatccttcaaatataattcccgccttgttcaacataaaattatgcacactggggaaaagcgctatgaatgtgatgactgtggagggactttccggagcagctcgagccttcgggtccacaaacggatccacactgggg

SEQ ID NO: 1871 - DNA, 567 bp, Artificial
  cDNA Sequence
acgactggatgcggcggccggagcagcggcaggggcgggcctgcatacgccctgagatctcaagaacgatgacctttggccgcaagggtgtgagccacgggcagttctttgaccagcacctcaagtttatcaagctgaaccagcagtttgtgcacttcacccagctggacctgtcttacctgcagcgggaggcctatgaccgagatttcctcgcccgcgtctacggtgctccccagctgcaggtggagaaagaggctcctgctggcttggtagaagacagaattcgatctgcctgtccctttttcccctggggtttgacacacaggctcctctcagcatgaggtggagcagtgaccaggtggagcagtgaccaggacgcctctggcccagtgctgcccagcctccccgcccgctcccaggcgccccatgtcctcacaggccaggacgccatggcaggatggagaggacttggtggatttttgtttcttgcctgacctcagtttcatgaaagaaagtggaagctacagaattattttctaaaataaaggctgaattgtctgaaaaata

SEQ ID NO: 1872 - DNA, 721 bp, Artificial
  cDNA Sequence
cagcagtttgtgcacttcacccagctggacctgtcttacctgcagcgggaggcctatgaccgagatttcctcgcccgcgtctacggtgctccccagctgcaggtggagaaagtgaggaccaatgaccggaaggagctgggggaggtgcgggtgcagtatacgggcagggacagcttcaaggctttcgccaaggctctgggtgtcatggatgaccttaagtcgggggttccgagagctggctaccggggtattgtcaccttccagttccggggccgccgtgtccacctggcgcccccactgacgtgggagggctatgatcctagctggaattagcacctgcctgtccttcctgggcccctccttgccacatcatgagctgaggtgggaccacagtccccaggctgcatcggcctgcctgtgtttccctcttaggtgcatttatctttttgatttttccgagtggcatttaagtgcacaaatgataacaagaggattattctcccgttctcaagggagtcagatcaggggaactattctagggtattgctgcccagcctccccgcccgctcccaggcgccccatgtcctcacaggccaggacgccatggcaggatggagaggacttggtggatttttgtttcttgcctgacctcagtttcatgaaagaaagtggaagctacagaattattttctaaaataaaggctgaattgtctgaaaaata

SEQ ID NO: 1873 - DNA, 589 bp, Artificial
  cDNA Sequence
aggccagccggcgcccgcgcggacactttcagccccgagccgcggccgctcgggtcggacccacgcgcagcggccggagatgcagcggggcgccgcgctgtgcctgcgactgtggctctgcctgggactcctggacggcctggtgagtggctactccatgacccccccgaccttgaacatcacggaggagtcacacgtcatcgacaccggtgacagcctgtccatctcctgcaggggacagcaccccctcgagtgggcttggccaggagctcaggaggcgccagccaccggagacaaggacagcgaggacacgggggtggtgcgagactgcgagggcacagacgccaggccctactgcaaggtgttgctgctgcacgaggtacatgccaacgacacaggcagctacgtctgctactacaagtacatcaaggcacgcatcgagggcaccacggccgccagctcctacgtgttcgtgagagactttgagcagccattcatcaacaagcctgacacgctcttggtcaacaggaaggacgccatgtgggtgccctgtctggtgtccatccccggcctcaatgtcacgctgcgc

SEQ ID NO: 1874 - DNA, 650 bp, Artificial
  cDNA Sequence
ccaggacttcctttccaaccccttcctggtgcacatcacaggcaacgagctctatgacatccagctgttgcccaggaagtcgctggagctgctggtaggggagaagctggtcctgaactgcaccgtgtgggctgagtttaactcaggtgtcacctttgactgggactacccagggaagcaggcagagcggggtaagtgggtgcccgagcgacgctcccagcagacccacacagaactctccagcatcctgaccatccacaacgtcagccagcacgacctgggctcgtatgtgtgcaaggccaacaacggcatccagcgatttcgggagagcaccgaggtcattgtgcatgaaaatcccttcatcagcgtcgagtggctcaaaggacccatcctggaggccacggcaggagacgagctggtgaagctgcccgtgaagctggcagcgtaccccccgcccgagttccagtggtacaaggatggaaaggcactgtccgggcgccacagtccacatgccctggtgctcaaggaggtgacagaggccagcacaggcacctacaccctcgccctgtggaactccgctgctggcctgaggcgcaacatcagcctggagctggtggtgaatgtgcccccccagatacatgagaaggagg

SEQ ID NO: 1875 - DNA, 529 bp, Artificial
  cDNA Sequence
ctcgcaggtgtccaccatggccctacacatcgcccaggctgacgctgaggacagcccgccaagcctgcagcgccacagcctggccgccaggtattacaactgggtgtcctttcccgggtgcctggccagaggggctgagacccgtggttcctccaggatgaagacatttgaggaattccccatgaccccaacgacctacaaaggctctgtggacaaccagacagacagtgggatggtgctggcctcggaggagtttgagcagatagagagcaggcatagacaagaaagcggcttcagctgtaaaggacctggccagaatgtggctgtgaccagggcacaccctgactcccaagggaggcggcggcggcctgagcggggggcccgaggaggccaggtgttttacaacagcgagtatggggagctgtcggagccaagcgaggaggaccactgctccccgtctgcccgcgtgactttcttcacagacaacagctactaagcagcatcggacaagacccccagcacttggggg

SEQ ID NO: 1876 - DNA, 464 bp, Artificial
  cDNA Sequence
cgcgcgccccgagcccccgcgccatgaagctcgccgccctcctggggctctgcgtggccctgtcctgcagctccgctgctgctttcttagtgggctcggccaagcctgtggcccagcctgtcgctgcgctggagtcggcggcggaggccggggccgggaccctggccaaccccctcggcaccctcaacccgctgaagctcctgctgagcagcctgggcatccccgtgaaccacctcatagagggctcccagaagtgtgtggctgagctgggtccccaggccgtgggggccgtgaaggccctgaaggccctgctgggggccctgacagtgtttggctgagccgagactggagcatctacacctgaggacaagacgctgcccacccgcgagggctgaaaaccccgccgcggggaggaccgtccatccccttcccccggcccctctcaataaacgtggttaagagca

SEQ ID NO: 1877 - DNA, 419 bp, Artificial
  cDNA Sequence
agattttgaaacaggaccaaacatatttgatttgcagatttatgtgaaggatgaggttggtgtcacagacctgcaagtcctgactgtccaggtaacagatgtgaacgagccacctcagtttcaaggcaacttggcagaaggtctacacctctacatagtagaaagagcaaaccctggattcatttaccaggttgaggccttcgatccagaagacacaagccgaaacattcccctcagttatttcctgatttctcccccaaagagcttcagaatgtctgctaatggcaccctcttctccacaacagaattggactttgaagcaggacacagaagtttccatctcatcgtggaggtgagggacagtggaggcctcaaagcctccacagagctccaggtgaacatcgtgaacctcaacgacg

SEQ ID NO: 1878 - DNA, 362 bp, Artificial
  cDNA Sequence
gttttcccagccacctcctctacagcattaccacttgactggtacaatccaagtggcccaaaggatagaccgagatgcaggtgaattgagacaaaatcccaccatttccctggaagttctagtgaaggacagaccatatgggggtcaggagaatcgcatccagataaccttcattgtggaagacgtcaacgacaatcctgccacatgccaaaagttcaccttcaggtatgcacactttgaaagttgggctggacattctatctctttggtggccctctgcccttctgcttctctggtatattctcaggagaattataagcatttggagaaacagctcagtagaataaatcgatgtgaactgt

SEQ ID NO: 1879 - DNA, 675 bp, Artificial
  cDNA Sequence
tacaatccaagtggcccaaaggatagaccgagatgcaggtgaattgagacaaaatcccaccatttccctggaagttctagtgaaggacagaccatatgggggtcaggagaatcgcatccagataaccttcattgtggaagacgtcaacgacaatcctgccacatgccaaaagttcaccttcagcattatggtgccggaaagaacagccaaggggacgttgcttcttgacctaaacaagttctgctttgatgatgacagtgaggcaccaaacaacagattcaacttcaccatgccatctggagtggggagcggcagcagatttttacaggatccagctggctctgggaagattgtgctgattggtgatctagactacgaaaatccaagtaacctagcagccggcaataaatatacggtgataatccaggtgcaggatgtggcccccccttactataaaagcaaataacgtctacgtttatatcctaacaagcccagaaaatgagtttcctctcatttttgataggccatcctatgtatttgatgtgtcagaaagaaggcccggttactgtgaacatccttgaagaaaatgatgaaaagccaatttgtactccaaactcttatttcctggccctcccagtggatctgaaagttggcacaaatattcagaatttcaag

SEQ ID NO: 1880 - DNA, 1466 bp, Artificial
  cDNA Sequence
agactgcagagagagacgtcgtggtggaaactatccagatgaacactatctttgatggagaagccatagatccagtgaccggggaaacatatgaattcaactcaaaaactggagccagaaagtggaaagatccactaacccaaatgccaaaatggaaagagtccagccaccagggagctgccccacgcagagtcactgctggggaagggatggggtcactgagaagtgccaactgggaagaagatgagctgagtggcaaagcgtgggctgaggatgctggtctgggttccagaaatgagggtggcaagctgggcaacccaaagaacagaaatccagccttcatgaacagggcttaccccaaaccacacccaggaaagtaaacggggtctaaggaggggcctgtcaatcactgagatgctgcctcaccctaaattctatggggatggtgtgggcatggtgtaggggggaaaatgtgggctgaggggattcagacatccagggtcaaacatgggatgtttgacaaatttttaaacaaatagaaaggggtttgatcacatagttgcgtgttctgaaatgatacaggaacattttctatcagatttcagaactacctgtgcttctgataagcaagactgttaactttggggtgtggaattgttgtgtttcttctttgcattgactgctaggaagctctattctgttcaccatagaaagtttgtaggaattcctgacataaatagtgaagactatccttacatctggtttccaccttattttcctgccctcgttttaacatcacccagatttcttcagttataaatatgccatacacctttgtaagtcacctcaaatcttcttcaaaagaagcagaacagtgaaaaaaacagatgagtaagttaagagttggtcatctggaaagaagaaaactcagtaggcaccttcttttgttttttcttgtggtgtccggatcagcatcctgcatgtgagattcatccacgttgtcctgtctagcagtagttcagttctcttcatggttatgtctggtttcattctatgattatatcacaatttatctattctacacttgggtggcagctgcttcagattttttacttttaaaaaatatacttaaaagtgaactacaggcagggcatgatggctcatgcctgtaatgccagcactttgccaaggtgggcagatcacctaaggtcaggagttcaagatcagcctggcctagatggcaaaaccctgtctctactaaaaaatacaaaaattagcttggtgtggtggtgggcacatgtaatcccagctacttgggaggctgaggtagggagaactgcttaaacctgagaggtggaggttacagtgagttgagattgtgccactgcactctagcctgggtgacaaagcaagactccatctcagaaaaaaaaaataaaagtgaattacaacactatgaactttct

SEQ ID NO: 1881 - DNA, 2078 bp, Artificial
  cDNA Sequence
gtcaggaggatcaggagggacaagagggatggaggcgaaaggctggatccttaatccaggccggagacaaagccgcgccagggagctcgcggcgcgcggcccctgtcctccggcccgagatgaatcctgcggcagaagccgagttcaacatcctcctggccaccgactcctacaaggttactcactataaacaatatccacccaacacaagcaaagtttattcctactttgaatgccgtgaaaagaagacagaaaactccaaattaaggaaggtgaaatatgaggaaacagtattttatgggttgcagtacattcttaataagtacttaaaaggtaaagtagtaaccaaagagaaaatccaggaagccaaagatgtctacaaagaacatttccaagatgatgtctttaatgaaaagggatggaactacattcttgagaagtatgatgggcatcttccaatagaaataaaagctgttcctgagggctttgtcattcccagaggaaatgttctcttcacgactattcttgttcagtcctggtatccaatcacagtggccacaaattctagagagcagaagaaaatattggccaaatatttgttagaaacttctggtaacttagatggtctggaatacaagttacatgattttggctacagaggagtctcttcccaagagactgctggcataggagcatctgctcacttggttaacttcaaaggaacagatacagtagcaggacttgctctaattaaaaaatattatggaacgaaagatcctgttccaggctattctgttccagcagcagaacacagtaccataacagcttgggggaaagaccatgaaaaagatgcttttgaacatattgtaacacagttttcatcagtgcctgtatctgtggtcagcgatagctatgacatttataatgcgtgtgagaaaatatggggtgaagatctaagacatttaatagtatcaagaagtacacaggcaccactaataatcagacctgattctggaaaccctcttgacactgtgttaaaggttttggagattttaggtaagaagtttcctgttactgagaactcaaagggttacaagttgctgccaccttatcttagagttattcaaggggatggagtagatattaataccttacaagagattgtagaaggcatgaaacaaaaaatgtggagtattgaaaatattgccttcggttctggtggaggtttgctacagaagttgacaagagatctcttgaattgttccttcaagtgtagctatgttgtaactaatggccttgggattaacgtcttcaaggacccagttgctgatcccaacaaaaggtccaaaaagggccgattatctttacataggacgccagcagggaattttgttacactggaggaaggaaaaggagaccttgaggaatatggtcaggatcttctccatactgtcttcaagaatggcaaggtgacaaaaagctattcatttgatgaaataagaaaaaatgcacagctgaatattgaactggaagcagcacatcattaggctttatgactgggtgtgtgttgtgtgtatgtaatacataatgtttattgtacagatgtgtggggtttgtgttttatgatacattacagccaaattatttgttggtttatggacatactgccctttcattttttttcttttccagtgtttaggtgatctcaaattaggaaatgcatttaaccatgtaaaagatgagtgctaaagtaagctttttagggccctttgccaataggtagtcattcaatctggtattgatcttttcacaaataacagaactgagaaacttttatatataactgatgatcacataaaacagatttgcataaaattaccatgattgctttatgtttatatttaacttgtatttttgtacaaacaagattgtgtaagatatatttgaagtttcagtgatttaacagtctttccaacttttcatgatttttatgagcacagactttcaagaaaatacttgaaaataaattacattgccttttgtccattaatcagcaaataaaacatggccttaacaaa

SEQ ID NO: 1882 - DNA, 744 bp, Artificial
  cDNA Sequence
gtcaggaggatcaggagggacaagagggatggaggcgaaaggctggatccttaatccaggccggagacaaagccgcgccagggagctcgcggcgcgcggcccctgtcctccggcccgagatgaatcctgcggcagaagccgagttcaacatcctcctggccaccgactcctacaaggttactcactataaacaatatccacccaacacaagcaaagtttattcctactttgaatgccgtgaaaagaagacagaaaactccaaattaaggaaggtgaaatatgaggaaacagtattttatgggttgcagtacattcttaataagtacttaaaaggtaaagtagtaaccaaagagaaaatccaggaagccaaagatgtctacaaagaacatttccaagatgatgtctttaatgaaaagggatggaactacattcttgagaagtatgatgggcatcttccaatagaaataaaagctgttcctgagggctttgtcattcccagaggaaatgttctcttcacggtggaaaacacagatccagagtgttactggcttacaaattggattgaggtaaattgtttttttaattcttatttaacattaattgaataaagaccattgaactgagattacagtttagaatttgttactaataaagctatataatctcctataatttacttaacctttccaggcttcaatttcctcatctataaaatgacagactaaataatctttaaggtttctt

SEQ ID NO: 1883 - DNA, 2267 bp, Artificial
  cDNA Sequence
gctgccgcgccccgccctttctcggcccccggagggtgacggggtgaaggcgggggaaccgaggtggggagtccgccagagctcccagactgcgagcacgcgagccgccgcagccgtcacccgcgccgcgtcacggctcccgggcccgccctcctctgacccctcccctctctccgtttccccctctccccctcctccgccgaccgagcagtgacttaagcaacggagcgcggtgaagctcatttttctccttcctcgcagccgcgccagggagctcgcggcgcgcggcccctgtcctccggcccgagatgaatcctgcggcagaagccgagttcaacatcctcctggccaccgactcctacaaggttactcactataaacaatatccacccaacacaagcaaagtttattcctactttgaatgccgtgaaaagaagacagaaaactccaaattaaggaaggtgaaatatgaggaaacagtattttatgggttgcagtacattcttaataagtacttaaaaggtaaagtagtaaccaaagagaaaatccaggaagccaaagatgtctacaaagaacatttccaagatgatgtctttaatgaaaagggatggaactacattcttgagaagtatgatgggcatcttccaatagaaataaaagctgttcctgagggctttgtcattcccagaggaaatgttctcttcacgactattcttgttcagtcctggtatccaatcacagtggccacaaattctagagagcagaagaaaatattggccaaatatttgttagaaacttctggtaacttagatggtctggaatacaagttacatgattttggctacagaggagtctcttcccaagagactgctggcataggagcatctgctcacttggttaacttcaaaggaacagatacagtagcaggacttgctctaattaaaaaatattatggaacgaaagatcctgttccaggctattctgttccagcagcagaacacagtaccataacagcttgggggaaagaccatgaaaaagatgcttttgaacatattgtaacacagttttcatcagtgcctgtatctgtggtcagcgatagctatgacatttataatgcgtgtgagaaaatatggggtgaagatctaagacatttaatagtatcaagaagtacacaggcaccactaataatcagacctgattctggaaaccctcttgacactgtgttaaaggttttggagattttaggtaagaagtttcctgttactgagaactcaaagggttacaagttgctgccaccttatcttagagttattcaaggggatggagtagatattaataccttacaagagattgtagaaggcatgaaacaaaaaatgtggagtattgaaaatattgccttcggttctggtggaggtttgctacagaagttgacaagagatctcttgaattgttccttcaagtgtagctatgttgtaactaatggccttgggattaacgtcttcaaggacccagttgctgatcccaacaaaaggtccaaaaagggccgattatctttacataggacgccagcagggaattttgttacactggaggaaggaaaaggagaccttgaggaatatggtcaggatcttctccatactgtcttcaagaatggcaaggtgacaaaaagctattcatttgatgaaataagaaaaaatgcacagctgaatattgaactggaagcagcacatcattaggctttatgactgggtgtgtgttgtgtgtatgtaatacataatgtttattgtacagatgtgtggggtttgtgttttatgatacattacagccaaattatttgttggtttatggacatactgccctttcattttttttcttttccagtgtttaggtgatctcaaattaggaaatgcatttaaccatgtaaaagatgagtgctaaagtaagctttttagggccctttgccaataggtagtcattcaatctggtattgatcttttcacaaataacagaactgagaaacttttatatataactgatgatcacataaaacagatttgcataaaattaccatgattgctttatgtttatatttaacttgtatttttgtacaaacaagattgtgtaagatatatttgaagtttcagtgatttaacagtctttccaacttttcatgatttttatgagcacagactttcaagaaaatacttgaaaataaattacattgccttttgtccattaatcagcaaataaaacatggccttaacaaa

SEQ ID NO: 1884 - DNA, 2315 bp, Artificial
  cDNA Sequence
gctgccgcgccccgccctttctcggcccccggagggtgacggggtgaaggcgggggaaccgaggtggggagtccgccagagctcccagactgcgagcacgcgagccgccgcagccgtcacccgcgccgcgtcacggctcccgggcccgccctcctctgacccctcccctctctccgtttccccctctccccctcctccgccgaccgagcagtgacttaagcaacggagcgcggtgaagctcatttttctccttcctcgcagccgcgccagggagctcgcggcgcgcggcccctgtcctccggcccgagatgaatcctgcggcagaagccgagttcaacatcctcctggccaccgactcctacaaggttactcactataaacaatatccacccaacacaagcaaagtttattcctactttgaatgccgtgaaaagaagacagaaaactccaaattaaggaaggtgaaatatgaggaaacagtattttatgggttgcagtacattcttaataagtacttaaaaggtaaagtagtaaccaaagagaaaatccaggaagccaaagatgtctacaaagaacatttccaagatgatgtctttaatgaaaagggatggaactacattcttgagaagtatgatgggcatcttccaatagaaataaaagctgttcctgagggctttgtcattcccagaggaaatgttctcttcacggtggaaaacacagatccagagtgttactggcttacaaattggattgagactattcttgttcagtcctggtatccaatcacagtggccacaaattctagagagcagaagaaaatattggccaaatatttgttagaaacttctggtaacttagatggtctggaatacaagttacatgattttggctacagaggagtctcttcccaagagactgctggcataggagcatctgctcacttggttaacttcaaaggaacagatacagtagcaggacttgctctaattaaaaaatattatggaacgaaagatcctgttccaggctattctgttccagcagcagaacacagtaccataacagcttgggggaaagaccatgaaaaagatgcttttgaacatattgtaacacagttttcatcagtgcctgtatctgtggtcagcgatagctatgacatttataatgcgtgtgagaaaatatggggtgaagatctaagacatttaatagtatcaagaagtacacaggcaccactaataatcagacctgattctggaaaccctcttgacactgtgttaaaggttttggagattttaggtaagaagtttcctgttactgagaactcaaagggttacaagttgctgccaccttatcttagagttattcaaggggatggagtagatattaataccttacaagagattgtagaaggcatgaaacaaaaaatgtggagtattgaaaatattgccttcggttctggtggaggtttgctacagaagttgacaagagatctcttgaattgttccttcaagtgtagctatgttgtaactaatggccttgggattaacgtcttcaaggacccagttgctgatcccaacaaaaggtccaaaaagggccgattatctttacataggacgccagcagggaattttgttacactggaggaaggaaaaggagaccttgaggaatatggtcaggatcttctccatactgtcttcaagaatggcaaggtgacaaaaagctattcatttgatgaaataagaaaaaatgcacagctgaatattgaactggaagcagcacatcattaggctttatgactgggtgtgtgttgtgtgtatgtaatacataatgtttattgtacagatgtgtggggtttgtgttttatgatacattacagccaaattatttgttggtttatggacatactgccctttcattttttttcttttccagtgtttaggtgatctcaaattaggaaatgcatttaaccatgtaaaagatgagtgctaaagtaagctttttagggccctttgccaataggtagtcattcaatctggtattgatcttttcacaaataacagaactgagaaacttttatatataactgatgatcacataaaacagatttgcataaaattaccatgattgctttatgtttatatttaacttgtatttttgtacaaacaagattgtgtaagatatatttgaagtttcagtgatttaacagtctttccaacttttcatgatttttatgagcacagactttcaagaaaatacttgaaaataaattacattgccttttgtccattaatcagcaaataaaacatggccttaacaaa

SEQ ID NO: 1885 - DNA, 933 bp, Artificial
  cDNA Sequence
gctgccgcgccccgccctttctcggcccccggagggtgacggggtgaaggcgggggaaccgaggtggggagtccgccagagctcccagactgcgagcacgcgagccgccgcagccgtcacccgcgccgcgtcacggctcccgggcccgccctcctctgacccctcccctctctccgtttccccctctccccctcctccgccgaccgagcagtgacttaagcaacggagcgcggtgaagctcatttttctccttcctcgcagccgcgccagggagctcgcggcgcgcggcccctgtcctccggcccgagatgaatcctgcggcagaagccgagttcaacatcctcctggccaccgactcctacaaggttactcactataaacaatatccacccaacacaagcaaagtttattcctactttgaatgccgtgaaaagaagacagaaaactccaaattaaggaaggtgaaatatgaggaaacagtattttatgggttgcagtacattcttaataagtacttaaaaggtaaagtagtaaccaaagagaaaatccaggaagccaaagatgtctacaaagaacatttccaagatgatgtctttaatgaaaagggatggaactacattcttgagaagtatgatgggcatcttccaatagaaataaaagctgttcctgagggctttgtcattcccagaggaaatgttctcttcacggtggaaaacacagatccagagtgttactggcttacaaattggattgaggtaaattgtttttttaattcttatttaacattaattgaataaagaccattgaactgagattacagtttagaatttgttactaataaagctatataatctcctataatttacttaacctttccaggcttcaatttcctcatctataaaatgacagactaaataatctttaaggtttctt

SEQ ID NO: 1886 - DNA, 933 bp, Artificial; identical to SEQ ID NO: 1885
  cDNA Sequence

SEQ ID NO: 1887 - DNA, 853 bp, Artificial
  cDNA Sequence
agcggactcccgggcgccggtgctcggggctcggggctcggggcttgggcgtcgccggcgagcgcatgcccttccctgaagcgcggcctcttggcctggagctgggaccagttaggtaacggccccggggacccgcagtggagagtgagcggggctttcccccgggccagcccggcgcgctcgcccctggctgggcaggttactcactataaacaatatccacccaacacaagcaaagtttattcctactttgaatgccgtgaaaagaagacagaaaactccaaattaaggaaggtgaaatatgaggaaacagtattttatgggttgcagtacattcttaataagtacttaaaaggtaaagtagtaaccaaagagaaaatccaggaagccaaagatgtctacaaagaacatttccaagatgatgtctttaatgaaaagggatggaactacattcttgagaagtatgatgggcatcttccaatagaaataaaagctgttcctgagggctttgtcattcccagaggaaatgttctcttcacggtggaaaacacagatccagagtgttactggcttacaaattggattgagactattcttgttcagtcctggtatccaatcacagtggccacaaattctagagagcagaagaaaatattggccaaatatttgttagaaacttctggtaacttagatggtctggaatacaagttacatgattttggctacagaggagtctcttcccaagagactgctggcataggagcatctgctcacttggttaacttcaaaggaacagatacagtagcaggacttgctctaattaaaaaatattatggaacgaaagatcctgttc

SEQ ID NO: 1888 - DNA, 1795 bp, Artificial
  cDNA Sequence
aggtaaagtagtaaccaaagagaaaatccaggaagccaaagatgtctacaaagaacatttccaagatgatgtctttaatgaaaagggatggaactacattcttgagaagtatgatgggcatcttccaatagaaataaaagctgttcctgagggctttgtcattcccagaggaaatgttctcttcacggtggaaaacacagatccagagtgttactggcttacaaattggattgagactattcttgttcagtcctggtatccaatcacagtggccacaaattctagagagcagaagaaaatattggccaaatatttgttagaaacttctggtaacttagatggtctggaatacaagttacatgattttggctacagaggagtctcttcccaagagactgctggcataggagcatctgctcacttggttaacttcaaaggaacagatacagtagcaggacttgctctaattaaaaaatattatggaacgaaagatcctgttccaggctattctgttccagcagcagaacacagtaccataacagcttgggggaaagaccatgaaaaagatgcttttgaacatattgtaacacagttttcatcagtgcctgtatctgtggtcagcgatagctatgacatttataatgcgtgtgagaaaatatggggtgaagatctaagacatttaatagtatcaagaagtacacaggcaccactaataatcagacctgattctggaaaccctcttgacactgtgttaaaggttttggagattttaggtaagaagtttcctgttactgagaactcaaagggttacaagttgctgccaccttatcttagagttattcaaggggatggagtagatattaataccttacaagagattgtagaaggcatgaaacaaaaaatgtggagtattgaaaatattgccttcggttctggtggaggtttgctacagaagttgacaagagatctcttgaattgttccttcaagtgtagctatgttgtaactaatggccttgggattaacgtcttcaaggacccagttgctgatcccaacaaaaggtccaaaaagggccgattatctttacataggacgccagcagggaattttgttacactggaggaaggaaaaggagaccttgaggaatatggtcaggatcttctccatactgtcttcaagaatggcaaggtgacaaaaagctattcatttgatgaaataagaaaaaatgcacagctgaatattgaactggaagcagcacatcattaggctttatgactgggtgtgtgttgtgtgtatgtaatacataatgtttattgtacagatgtgtggggtttgtgttttatgatacattacagccaaattatttgttggtttatggacatactgccctttcattttttttcttttccagtgtttaggtgatctcaaattaggaaatgcatttaaccatgtaaaagatgagtgctaaagtaagctttttagggccctttgccaataggtagtcattcaatctggtattgatcttttcacaaataacagaactgagaaacttttatatataactgatgatcacataaaacagatttgcataaaattaccatgattgctttatgtttatatttaacttgtatttttgtacaaacaagattgtgtaagatatatttgaagtttcagtgatttaacagtctttccaacttttcatgatttttatgagcacagactttcaagaaaatacttgaaaataaattacattgccttttgtccattaatcagcaaataaaacatggccttaacaaa

SEQ ID NO: 1889 - DNA, 1850 bp, Artificial
  cDNA Sequence
ttcaaataacaatctggtttataaaatgaaaatagaaaattatgatcttagaatgaagaagtgaatttctaagccatgataattattacggttgctgtgattagacagacttttctgtggagcttcctgacaaccaagaaaaaaggggaaatcaaggaactgttcttatcagaaagtaggaacccagcaattctttcattttctcattgggaacttaatagtcactgaattacaaagtagacagtgaccttgattatacaacatatgcggaagtgtttcctgtaacttacactattcttgttcagtcctggtatccaatcacagtggccacaaattctagagagcagaagaaaatattggccaaatatttgttagaaacttctggtaacttagatggtctggaatacaagttacatgattttggctacagaggagtctcttcccaagagactgctggcataggagcatctgctcacttggttaacttcaaaggaacagatacagtagcaggacttgctctaattaaaaaatattatggaacgaaagatcctgttccaggctattctgttccagcagcagaacacagtaccataacagcttgggggaaagaccatgaaaaagatgcttttgaacatattgtaacacagttttcatcagtgcctgtatctgtggtcagcgatagctatgacatttataatgcgtgtgagaaaatatggggtgaagatctaagacatttaatagtatcaagaagtacacaggcaccactaataatcagacctgattctggaaaccctcttgacactgtgttaaaggttttggagattttaggtaagaagtttcctgttactgagaactcaaagggttacaagttgctgccaccttatcttagagttattcaaggggatggagtagatattaataccttacaagagattgtagaaggcatgaaacaaaaaatgtggagtattgaaaatattgccttcggttctggtggaggtttgctacagaagttgacaagagatctcttgaattgttccttcaagtgtagctatgttgtaactaatggccttgggattaacgtcttcaaggacccagttgctgatcccaacaaaaggtccaaaaagggccgattatctttacataggacgccagcagggaattttgttacactggaggaaggaaaaggagaccttgaggaatatggtcaggatcttctccatactgtcttcaagaatggcaaggtgacaaaaagctattcatttgatgaaataagaaaaaatgcacagctgaatattgaactggaagcagcacatcattaggctttatgactgggtgtgtgttgtgtgtatgtaatacataatgtttattgtacagatgtgtggggtttgtgttttatgatacattacagccaaattatttgttggtttatggacatactgccctttcattttttttcttttccagtgtttaggtgatctcaaattaggaaatgcatttaaccatgtaaaagatgagtgctaaagtaagctttttagggccctttgccaataggtagtcattcaatctggtattgatcttttcacaaataacagaactgagaaacttttatatataactgatgatcacataaaacagatttgcataaaattaccatgattgctttatgtttatatttaacttgtatttttgtacaaacaagattgtgtaagatatatttgaagtttcagtgatttaacagtctttccaacttttcatgatttttatgagcacagactttcaagaaaatacttgaaaataaattacattgccttttgtccattaatcagcaaataaaacatggccttaacaaa

SEQ ID NO: 1890 - DNA, 1572 bp, Artificial
  cDNA Sequence
ttgttactacagactattcttgttcagtcctggtatccaatcacagtggccacaaattctagagagcagaagaaaatattggccaaatatttgttagaaacttctggtaacttagatggtctggaatacaagttacatgattttggctacagaggagtctcttcccaagagactgctggcataggagcatctgctcacttggttaacttcaaaggaacagatacagtagcaggacttgctctaattaaaaaatattatggaacgaaagatcctgttccaggctattctgttccagcagcagaacacagtaccataacagcttgggggaaagaccatgaaaaagatgcttttgaacatattgtaacacagttttcatcagtgcctgtatctgtggtcagcgatagctatgacatttataatgcgtgtgagaaaatatggggtgaagatctaagacatttaatagtatcaagaagtacacaggcaccactaataatcagacctgattctggaaaccctcttgacactgtgttaaaggttttggagattttaggtaagaagtttcctgttactgagaactcaaagggttacaagttgctgccaccttatcttagagttattcaaggggatggagtagatattaataccttacaagagattgtagaaggcatgaaacaaaaaatgtggagtattgaaaatattgccttcggttctggtggaggtttgctacagaagttgacaagagatctcttgaattgttccttcaagtgtagctatgttgtaactaatggccttgggattaacgtcttcaaggacccagttgctgatcccaacaaaaggtccaaaaagggccgattatctttacataggacgccagcagggaattttgttacactggaggaaggaaaaggagaccttgaggaatatggtcaggatcttctccatactgtcttcaagaatggcaaggtgacaaaaagctattcatttgatgaaataagaaaaaatgcacagctgaatattgaactggaagcagcacatcattaggctttatgactgggtgtgtgttgtgtgtatgtaatacataatgtttattgtacagatgtgtggggtttgtgttttatgatacattacagccaaattatttgttggtttatggacatactgccctttcattttttttcttttccagtgtttaggtgatctcaaattaggaaatgcatttaaccatgtaaaagatgagtgctaaagtaagctttttagggccctttgccaataggtagtcattcaatctggtattgatcttttcacaaataacagaactgagaaacttttatatataactgatgatcacataaaacagatttgcataaaattaccatgattgctttatgtttatatttaacttgtatttttgtacaaacaagattgtgtaagatatatttgaagtttcagtgatttaacagtctttccaacttttcatgatttttatgagcacagactttcaagaaaatacttgaaaataaattacattgccttttgtccattaatcagcaaataaaacatggccttaacaaa

SEQ ID NO: 1891 - DNA, 599 bp, Artificial
  cDNA Sequence
gaaaatatggggtgaagatctaagacatttaatagtatcaagaagtacacaggcaccactaataatcagacctgattctggaaaccctcttgacactgtgttaaaggttttggagattttaggtaagaagtttcctgttactgagaactcaaagggttacaagttgctgccaccttatcttagagttattcaaggggatggagtagatattaataccttacaagaggtatgtgttttatattaaaagtttcaataaggcatttcttataattaagtttgtttatgtttgataaagaacacaatataaatacaattttaagtctttgtaagtgtttatgttggtataaatctctgtgcattgcttaaagtttagaaataatagtagtttaaaatacagaggtgccagccaagccatacttactcttccagttgtcattggccaccctgaatgatgaatctaaagaagtatcattgtgaaacaaggaaatgtcagtcaagaaatattccttggaatataaaacaaagccttgactctgctggcataggtctgagttttcatagactggagcttcacaaatctgtaaaactcataatattaa

SEQ ID NO: 1892 - DNA, 739 bp, Artificial
  cDNA Sequence
agggatacgttatgaaataggaaagcctttaccttagtaatactcttgttccctctccaaagattgtgtgtgtggttttggcgtagttggtatagttgggcttttcttcaacagcatgtacatgctgtgcttactgtcagtttaaaggcagtttgtaatataaagagataccttaagggtcacatgttagaatgctcacagacttcctacaaatggagtattaggtgttcttcagtggcaaaaaggatatccaagatgtcatactttttctttattacaaacgactatccttcaaaacaggctaaagtgttatgtttctgaaagccagatgtggattggttcagttatacctattaagtgcttaaaacttaaatgtaaattatgtatgtgcttttttgtaagggagtgtttagacatttctgatgattagtcttctacttgtctaactttcttaatttggatttcagattaacgtcttcaaggacccagttgctgatcccaacaaaaggtccaaaaagggccgattatctttacataggacgccagcagggaattttgttacactggaggaaggaaaaggagaccttgaggaatatggtcaggatcttctccatactgtcttcaagaatggcaaggtgacaaaaagctattcatttgatgaaataagaaaaaatgcacagctgaatattgaactggaagcagcacatcattaggctttatgactgggtgtgtgttgtgt

SEQ ID NO: 1893 - DNA, 1361 bp, Artificial
  cDNA Sequence
gcgccagccccgcctgcccttcctcgccaccgggctgctctggtctcgtcggtcccctcctccgccccgtcgtcctgactctctctccctcctttcctcagaggatgtccggcttccagatcaacctcaacccgctcaaggagccactcggcttcatcaaggtcctcgagtggattgcttctatctttgcttttgccacctgtggaggttttaagggccaaacagaaattcaagtgaattgtcctcctgcagttactgagaataaaactgttacagctacttttggttatccattcaggttgaatgaggcatcatttcagccacctccaggtgtaaacatatgtgatgtaaattggaaagattacgtcctcataggcgattactcttcttctgcacaattctatgttacctttgcagtctttgtgttcctgtactgcattgctgcccttctgctttatgttggctacacgagtctgtatctggatagtcgtaaacttcctatgatagactttgttgttacacttgttgccacttttttgtggttggtgagcacttcagcctgggctaaagctctgacagatattaaaatagctactggtcacaatattattgatgaacttccgccttgtaagaagaaagcagtactgtgttactttggctctgtgaccagtatgggatccctaaatgtatctgtgatatttggctttctaaatatgatactctggggaggaaatgcttggtttgtgtacaaggagaccagcctacacagtccatcaaatacatctgcccctcatagccaaggaggtattccacctcctaccggaatataattaaagggagaaatacactgtatgaagtatatgttgatactatgacatgttgccaacaccttgagaagcattatttgtttctaataaaagtaatggctttgtcaatatattggtgggtttaaaactttgctgcttttttacataaagcctgtgcctttcctagaaagttaagatgtaaatgtattctcacatgtaaatttgaaagttcaggggtctattatgaaatgatacacatttttaaatgaaccataatttttttcactaagctgtttgccttccaaagtgtttacaccttaagccttaacatgtatcttcattcagaaaacagttatattgtcataccatagtaggaagaaaaacctttatttggaatatacactactgtaagtttgtacagatcatatacctaccacctgtctttgcttaaagagccttgattacataaatatgtaggaaaaaacatattgagttcaaaatttatatctaacattgtttatgttatgatttttttttaattgcaaagactaggtg

SEQ ID NO: 1894 - DNA, 300 bp, Artificial
  cDNA Sequence
gcgccagccccgcctgcccttcctcgccaccgggctgctctggtctcgtcggtcccctcctccgccccgtcgtcctgactctctctccctcctttcctcagaggatgtccggcttccagatcaacctcaacccgctcaaggagccactcggcttcatcaaggtcctcgagtggattgcttctatctttgcttttgccacctgtggaggttttaagggccaaacagaaattcaagtgaattgtcctcctgcagttactgagaataaaactgttacagctacttttggttatccattcaggt

SEQ ID NO: 1895 - DNA, 769 bp, Artificial
  cDNA Sequence
tagattgcttctatctttgcttttgccacctgtggaggttttaagggccaaacagaaattcaagtgaattgtcctcctgcagttactgagaataaaactgttacagctacttttggttatccattcaggttgaatgaggcatcatttcagccacctccaggtgtaaacatatgtgatgtaaattggaaagattacgtcctcataggcgattactcttcttctgcacaattctatgttacctttgcagtctttgtgttcctgtactgcattgctgcccttctgctttatgttggctacacgagtctgtatctggatagtcgtaaacttcctatgatagactttgttgttacacttgttgccacttttttgtggttggtgagcacttcagcctgggctaaagctctgacagatattaaaatagctactggtcacaatattattgatgaacttccgccttgtaagaagaaagcagtactgtgttactttggctctgtgaccagtatgggatccctaaatgtatctgtgatatttggctttctaaatatgatactctggggaggaaatgcttggtttgtgtacaaggagaccagcctacacagtccatcaaatacatctgcccctcatagccaaggaggtattccacctcctaccggaatataattaaagggagaaatacactgtatgaagtatatgttgatactatgacatgttgccaacaccttgagaagcattatttgtttctaataaaagtaatggctttgtcaatata

SEQ ID NO: 1896 - DNA, 1066 bp, Artificial
  cDNA Sequence
taggttgaatgaggcatcatttcagccacctccaggtgtaaacatatgtgatgtaaattggaaagattacgtcctcataggcgattactcttcttctgcacaattctatgttacctttgcagtctttgtgttcctgtactgcattgctgcccttctgctttatgttggctacacgagtctgtatctggatagtcgtaaacttcctatgatagactttgttgttacacttgttgccacttttttgtggttggtgagcacttcagcctgggctaaagctctgacagatattaaaatagctactggtcacaatattattgatgaacttccgccttgtaagaagaaagcagtactgtgttactttggctctgtgaccagtatgggatccctaaatgtatctgtgatatttggctttctaaatatgatactctggggaggaaatgcttggtttgtgtacaaggagaccagcctacacagtccatcaaatacatctgcccctcatagccaaggaggtattccacctcctaccggaatataattaaagggagaaatacactgtatgaagtatatgttgatactatgacatgttgccaacaccttgagaagcattatttgtttctaataaaagtaatggctttgtcaatatattggtgggtttaaaactttgctgcttttttacataaagcctgtgcctttcctagaaagttaagatgtaaatgtattctcacatgtaaatttgaaagttcaggggtctattatgaaatgatacacatttttaaatgaaccataatttttttcactaagctgtttgccttccaaagtgtttacaccttaagccttaacatgtatcttcattcagaaaacagttatattgtcataccatagtaggaagaaaaacctttatttggaatatacactactgtaagtttgtacagatcatatacctaccacctgtctttgcttaaagagccttgattacataaatatgtaggaaaaaacatattgagttcaaaatttatatctaacattgtttatgttatgatttttttttaattgcaaagactaggtg

SEQ ID NO: 1897 - DNA, 871 bp, Artificial
  cDNA Sequence
ctgatttttgctttaggactttgttgttacacttgttgccacttttttgtggttggtgagcacttcagcctgggctaaagctctgacagatattaaaatagctactggtcacaatattattgatgaacttccgccttgtaagaagaaagcagtactgtgttactttggctctgtgaccagtatgggatccctaaatgtatctgtgatatttggctttctaaatatgatactctggggaggaaatgcttggtttgtgtacaaggagaccagcctacacagtccatcaaatacatctgcccctcatagccaaggaggtattccacctcctaccggaatataattaaagggagaaatacactgtatgaagtatatgttgatactatgacatgttgccaacaccttgagaagcattatttgtttctaataaaagtaatggctttgtcaatatattggtgggtttaaaactttgctgcttttttacataaagcctgtgcctttcctagaaagttaagatgtaaatgtattctcacatgtaaatttgaaagttcaggggtctattatgaaatgatacacatttttaaatgaaccataatttttttcactaagctgtttgccttccaaagtgtttacaccttaagccttaacatgtatcttcattcagaaaacagttatattgtcataccatagtaggaagaaaaacctttatttggaatatacactactgtaagtttgtacagatcatatacctaccacctgtctttgcttaaagagccttgattacataaatatgtaggaaaaaacatattgagttcaaaatttatatctaacattgtttatgttatgatttttttttaattgcaaagactaggtg

SEQ ID NO: 1898 - DNA, 411 bp, Artificial
  cDNA Sequence
tcggaacgttccgaagatgacgtcggagcgttctcgaatcccgtgtctctcggctgctgctgccgaaggaacagggaaaaagcaacaagaaggaagagcaatggcgacactggatcgcaaagtgcccagtccggaggcgtttctgggcaaaccctggtcctcctggatcgacgccgccaaattacactgctccgacaatgtagatttagaagaggctggaaaagagggtggaaaaagcagggaggttatgaggcttaataaagaagcatggaaatacggtacctgaaatgggacacactgagtagataggtcatcccagaccaagatatgcaagagaagccacaacctgctgcaattgggcatcaaacacatatggtcgtcataaataaatcatatcctgttctcatttgc

(The sequence listing continues in the following parts.)

What is claimed is:

1. A method for identifying an antineoplastic agent, comprising:
(a) contacting a test compound with a cell that expresses one or more amplicons of Table 2 having an amplification ratio of at least 2.0; and
(b) determining a change in said amplification ratio due to said contacting;
wherein a change in said amplification ratio due to said contacting indicates that said test compound has gene modulating activity
thereby identifying said test compound as a gene modulating agent.

2. The method of claim 1 wherein said change in expression is a decrease in expression.

3. The method of claim 2 wherein said decrease in expression is a decrease in copy number of the gene.

4. The method of claim 1 wherein said cell was genetically engineered to express said amplicon.

5. A method for identifying an antineoplastic agent, comprising:
(a) contacting a test compound with a cell that expresses at least one gene corresponding to a polynucleotide comprising a nucleotide sequence of SEQ ID NO: 1-3049 and under conditions promoting expression of said gene; and
(b) determining a change in expression of said gene as a result of said contacting
wherein a change in expression indicates gene modulation thereby identifying said test compound as a gene modulating agent.

6. The method of claim 5 wherein said change in expression is a decrease in expression.

7. The method of claim 5 wherein said decrease in expression is a decrease in copy number of the gene.

8. The method of claim 5 wherein said gene comprises a nucleotide sequence of one of SEQ ID NO: 1-3049.

9. The method of claim 5 wherein said cell was genetically engineered to express said gene.

10. A method for detecting the cancerous status of a cell, comprising detecting elevated expression in said cell of at least one gene corresponding to a polynucleotide comprising a nucleotide sequence of SEQ ID NO: 1-3049 whereby such elevated expression is indicative of cancerous status of the cell.

11. The method of claim 10 wherein said elevated expression is an elevated copy number of the gene.

12. A method for identifying a compound as an anti-neoplastic agent, comprising:
(a) contacting a test compound with a polypeptide encoded by a gene selected from SEQ ID NO: 1-3049,
(b) determining a change in a biological activity of said polypeptide due to said contacting,
wherein a change in activity indicates anti-neoplastic activity and thereby identifies such test compound as an agent having antineoplastic activity.

13. The method of claim 12 wherein said change in biological activity is a decrease in biological activity.

14. The method of claim 12 wherein said biological activity is an enzyme activity.

15. The method of claim 14 wherein said enzyme is selected from kinase, protease, peptidase, phosphodiesterase, phosphatase, dehydrogenase, reductase, carboxylase, transferase, deacetylase and polymerase.

16. The method of claim 15 wherein said kinase is a protein kinase.

17. The method of claim 15 wherein said kinase is a serine or threonine kinase.

18. The method of claim 15 wherein said kinase is a receptor tyrosine protein kinase.

19. The method of claim 15 wherein said protease is a serine protease, cysteine protease or aspartic acid protease.

20. The method of claim 15 wherein said transferase is a methyltransferase.

21. The method of claim 20 wherein said methyl transferase is a cytidine methyltransferase or an adenine methyltransferase.

22. The method of claim 15 wherein said deacetylase is a histone deacetylase.

23. The method of claim 11 wherein said carboxylase is a γ-carboxylase.

24. The method of claim 15 wherein said peptidase is a zinc peptidase.

25. The method of claim 15 wherein said polymerase is a DNA polymerase.

26. The method of claim 15 wherein said polymerase is a RNA polymerase.

27. The method of claim 12 wherein said biological activity is a membrane transport activity.

28. The method of claim 12 wherein said polypeptide is a cation channel protein, an anion channel protein, a gated-ion channel protein or an ABC transporter protein.

29. The method of claim 12 wherein said polypeptide is an integrin.

30. The method of claim 12 wherein said polypeptide is a Cytochrome P450 enzyme.

31. The method of claim 12 wherein said polypeptide is a nuclear hormone receptor.

32. The method of claim 12 wherein said biological activity is a receptor activity.

33. The method of claim 12 wherein said receptor is a G-protein-coupled receptor.

34. The method of claim 12 wherein said polypeptide is contained in a cell.

35. A method for identifying an anti-neoplastic agent comprising contacting a cancerous cell with a compound found to have anti-neoplastic activity in the method of claim 12 under conditions promoting the growth of said cell and detecting a change in the activity of said cancerous cell.

36. The method of claim 35 wherein said change in activity is a decrease in the rate of replication of said cancerous cell.

37. The method of claim 35 wherein said change in activity is a decrease in the total number of progeny cells that can be produced by said cancerous cell.

38. The method of claim 35 wherein said change in activity is a decrease in the number of times said cancerous cell can replicate.

39. The method of claim 35 wherein said change in activity is the death of said cancerous cell.

40. A method for treating cancer comprising contacting a cancerous cell with an agent first identified as having gene modulating activity using the method of claim 1, 5, or 12 and in an amount effective to cause a reduction in cancerous activity of said cell.

41. The method of claim 40 wherein said cancerous cell is contacted in vivo.

42. The method of claim 40 wherein said reduction in cancerous activity is a decrease in the rate of proliferation of said cancerous cell.

43. The method of claim 40 wherein said reduction in cancerous activity is the death of said cancerous cell.

44. The method of claim 40 wherein said cancer is a cancer of breast, colon, lung or prostate tissues.

45. A method for treating cancer comprising contacting a cancerous cell with an agent having affinity for an expression product of a gene corresponding to a polynucleotide comprising a nucleotide sequence of SEQ ID NO: 1-3049 and in an amount effective to cause a reduction in cancerous activity of said cell.

46. The method of claim 45 wherein said expression product is a polypeptide.

47. The method of claim 45 wherein said agent is an antibody.

48. A method for monitoring the progress of cancer therapy in a patient comprising monitoring in a patient undergoing cancer therapy the expression of a gene corresponding to a polypeptide having a sequence selected from SEQ ID NO: 1-3049.

49. The method of claim 48 wherein said gene comprises a sequence of SEQ ID NO: 1-3049.

50. The method of claim 48 wherein said cancer therapy is chemotherapy.

51. The method of claim 48 wherein said cancer is a cancer of breast, colon, lung or prostate tissues.

52. A method for determining the likelihood of success of cancer therapy in a patient, comprising monitoring in a patient undergoing cancer therapy the expression of a gene corresponding to a polynucleotide having a sequence of one of SEQ ID NO: 1-3049 wherein a decrease in said expression prior to completion of said cancer therapy is indicative of a likelihood of success of said cancer therapy.

53. The method of claim 52 wherein said gene comprises a sequence of SEQ ID NO: 1-3049.

54. The method of claim 52 wherein said cancer therapy is chemotherapy.

55. The method of claim 52 wherein said cancer is a cancer of breast, colon, lung or prostate tissues.

56. A method for producing test data with respect to the anti-neoplastic activity of a compound comprising:
(a) identifying a test compound as having anti-neoplastic activity using a method of claim 12;
(b) producing test data with respect to the anti-neoplastic activity of said test compound sufficient to identify the chemical structure of said test compound.

57. A method for determining the progress of a treatment for cancer in a patient afflicted therewith, following commencement of a cancer treatment on said patient, comprising:
(a) determining in said patient a change in expression of one or more genes corresponding to a polynucleotide comprising a nucleotide sequence of SEQ ID NO: 1-3049; and
(b) determining a change in expression of said gene compared to expression of said one or more determined genes prior to commencement of said cancer treatment;
wherein said change in expression indicates progress of said treatment
thereby determining the progress of said treatment.

58. The method of claim 57 wherein said change in expression is a decrease in expression and said decrease indicates success of said treatment.

59. A method for determining the progress of a treatment for cancer in a patient afflicted therewith, following commencement of a cancer treatment on said patient, comprising:
(a) determining in said patient a change in expression of one or more genes corresponding to a polynucleotide comprising a nucleotide sequence of SEQ ID NO: 1-3049; and
(b) determining a change in expression of said gene compared to expression of said one or more determined genes prior to commencement of said cancer treatment;
wherein said change in expression indicates progress of said treatment
thereby determining the progress of said treatment.

60. The method of claim 59 wherein said change in expression is a decrease in expression and said decrease indicates success of said treatment.
